United States Patent Application Publication US 2009/0018031 A1 - sequence listing, part 9

SEQ ID NO: 4425 - DNA, 6000 bp, Homo sapiens
cagggagtcaaatcccatatacagggtttcctgggctaagtgaaaattctagaagacaatgactggttgaccccacaccggccaggaagctgggtttctctccctgagtgtgggggaggccgaggtcctgaagcaggctggtgagtgctttcctctgctgccaagtcctgccctggagagtttggtatagttactgcctcttctaaaaggggaggtgggaggattgtgtgggcagactgactttcttagaagttgctgagacatggggtcatttcatccagggtaaagaagagatatggtgagatgtaattctgtggcaggtgctccctggggaatgggagctggggagtcgctccctggggaatgggagctggggagtccctccctgcctcttccccttctaatcttattttcttccagagatccctctttctccacttgcttggtgttctgtctctttgggatgggctaggcatcaatagggggcagtttgagtttcctaggagactcatagttctggccttcagatgcctgtgagctggaaggaatggaacacggctgggtcaccatctgttgcatcgttccttccttggcatgggagagatggaagggaggtggccatggggatcagagggcaggaggggaagtggcggacggtggccctcagtcatgcctagccgatccctgggctgaaggcagatttcagaacccagtgcagccaagccagagcctcaggatgaaagagaaaggaagagactgagaatggaggtgttgttgattctgaggctgctgcctggggtgtctgaatccctcaattctgagagtctgtagagtggagcaaatagggtgacattgagtgtggccctgacaggtcagacagaaagctctgagagtcagcagggggagatttgagaaagaaagatgagcatgtctgcagagccggggcaggctctgctacagggacaggatgctggttagatgttattgttaggttattgcttttgttgttattactcaggcttatactgtacaacagatctatcccgtgttatagcaaccaaggatttattgtactgattcattgatgagctattaaaatatctcccagtaataggaagtatctgataggatgtctgtccactcatcccacgtgtgtttattgtactgtctcaggagagacaagacatggactctgagcttaacatcagagtctgatgcaggagatggatttgggaataaactcatcccatgaggcaggaggaaatgaccagtggaacagagcatggggcatgctaggaagcacaagagaaactgccacccactttcaatgggaaggcagcaaccctgttgtggaggggtggcccacttagggccttggcaaaaagggaatttgcactgtggagaaggaagagaatagcatttctggcgtcagcaaagtgggagcagagatggcaggaggtgcagaaagcacgtggcctatacaggcctggaggctggtgtggggatataggagggcagatgctgggagaggagaagccacacaggggtcaggagctgggtcataccagggcttgagggctgctctgagaaggcagattttatccctcagattcctggatgactttttctggacaaatcctggagttgtcctggatgacaaatgtaatagaggctaggcccaggcaggacacacactggctccttattctttaagaagaagaaaaaaaaaagaatatgaatgagaatgtagttattataatgttaataacctgagctgctctgcaaacattattactttgtattaggaacaaatttcttgacaaatacatatgatcattagttccaactaaaaggagctgctgcctgtccacatggaaccctccatcccaatgagggataaatctgagctcttttcagatctcccgtgtacccacatgcatactccttaattttgtatacttctatttcctcctatttcagctcctctctctcagtcctgaacaagttgtttccaggcagctgtagtgataagccctgctacatttttttatcccaatgcagaatggctgagttttgcattggctctgttgggcttttattatctctttgttccccaacaatttcctgtggcagtgatgtgtgaatgtatttctcccttggttcttgtagtactattctagtcacttgactagtttattctaagaactaattgctggcatgtggccttggtagcagtaatctgttggtgtatccctaggcactaactcatgtgcacaaccttggaatacctgacgaactgtttcattcatggctcttagacatttcaaactgaatatattctgttccatgcttgtgatctccctgcatcccagtgactaccagactcactctcccttctgtgttcttggtgtcaattattagagtcatcctagtccagtttcccaagctagaaaccttgatgccatccttcttcttgcttctactaccggtcagtcatcagatcctattctaacacaaaaacagtcctcaacaggctttggagaacattaaaccatccttctatcatgatctccccttttctctctcactctgaccagggccacctgtggaatctggaagaaggcaagtgaagtgaagcgggagaggagacatgggctgagcaacctcactctgggcttcactcccagaataaggggatactataaggcagagtgtggcctgcagctaagccccagaccagcccctgagaggcagaatataggtctccgttgggtcaggtttaccctatattcagagaaaacataaaggtcttgcttttagtgacgtcacttgagtttgtcaggaaggaatgcactaagaaaaagtaaaaacagctttatgttcctgtgcagtattttatttagttcttataacaaccatctgaaaaagtcagtaatgcagtaatatttatttccatttttgagattttttaaaggcttggaaaacaagtaatttgtaaaagataagaggcaggattgaaacctttacctggatcttccattccataaatattccttgccagggactatgctggccactcggcacacaggaatgaacaggacacggtgtcagcctcaagaatttcactaagattgacagcgtttgcaaaaggcatttaaaaaaaaaaaagaatttcacaaagtggggagaaagattaagtcagaagttagcaaactacagcctctgggccaggtccagaccaatatctgcctgtttttgtcaatacagtcttattggaactgagacacgcctgttcactcactgtctgtggctgctttcacactgcgaaggtaaagttcagtagtcgtgacagaaagtgcgtgcctcacaaagcctaagatagtcactatctggacgtttacagatgtttcccacccttagtttaaacatagttttaccgcagtgtgccacatgccccagagaggtagatttgtggttgagtggcacagcaggagtgcaggattcttcactcggcagatgtctgagcagagtcttgaagactgagtaggaattgatcacatggaaggaggaaagatccttccaggcacaggggatcacatgtgtaaggtatggaggcacagatggtgtgctacagcatgcagttaaaaagcatttggggttggtggtgggagggtagcgggggcagttggagagacctgcaggagcctgatctccaaaaaccttgagtgctgcactcagaagtatgggtctgatcttatagattaatgggatgatatgaaagggttttcagaggagcactgacatgatcagatcaggtgtttagaaaagtcactggaatagcagcatggagaatggattggatggaggagaccaactaggaggttattgccgtagtgtatgagacatgtatgtgaaaggtgagatggggagaatgcgggggagatggagaataagcaacactgggaagtagacagtctgagggccttgatgcctgggtatgggctatgaaaaggggtgggttgtaagggcaattcccaggtgtctggcttgaatgacttgggtgggtaccaccaacaaagatggggactggagatggggcacatgaccccaatggagacactgaattttaggcagaagaagagaatccggccatgggatcagtgtcaccatggaggctataaatgccagacccaagatggggcctcaaagtgatgtctcagaagccaaggaagaaagaatattaggataaatggagtggttaacaatttttaatacctccaggaggtttggcaaaataaagactgagaacactagattcagccagtgggaggtcaggagaggagagttagaggagcatgaggagtgaatgggaaaggaagaagccaaaaaaaaaaagctttcagaagagaagagatggagaaaaaaattctagtatgcatatatagggaggctgtgggatacagagaaggatctttttgttataagataggagaggctgggcatggtgactcacgcctgtaatcccagcacttggggaggccaacgtgggtggatcatctatggtcaggagttcgaggccagcctggccaacatggtgaaaccttgtctctactaaaaatacaaaaattagctgggcgtggtggcaggtgcctgtaatcccagctactcgggaggctgaggtaggaaaatcacttgaacccaagaggcggaggttgcaatgagctgagatcacgctattgcactccaccccgggcgacagagtgagactccatttcaaaaaaaaaaaaaaaaacagatgagagaaacttgaagatgtttctctgctgaggcagagagccagttgagaagagtttggaagttctggggagagcagcatttcatggtcaagggcagatccatgcagaagctggggctggtccaggtagaggtgggcaggaggaaggacactttttatatacagaaagtggcagcataggtaggcatcaaccagcattctaagggcacttctgattctgacagcactgccagttgcaagtgatagaaaattcaactctaattggcttgcaaattaaagagaattgttaatgtaaatgtatatgtaattaaaaacccacaataagacttgtttcagaaaatgttcaatcagtaactcaaacaaggacatgaaggattgagtcttcctatgtcttctctctgccttccgggttatcctcagatttcacatggagacaccctttcccacccccaacagctccagcctctcctcttactgaagatgaccacagggtctttttcagaagagaggggaaactcctctttcccagaggtctcaacagaagtcttcatgaatcacattgccgcctgctggaatagatgcccattcctaaaccagtcgtggtggtgacaggctaggagatggtaattggcttaaactaatcagggcccagccctggaattggtgtaggattgctctgagaaaggggtagagatgaattctccgaagaaaaatatgggcactgtggacgggaggaggatagtatgggtgctggctatgcagccagtaaatatgcactagagttctctgtgtgctggacgttgtgcaggttgaacaagacactgtcttagcctcaaggaattcatggtgcagttggggaaacagacaattaattgacactgaaatctagcactcattatagtgaatatattccaaaatgctctaagagcacttaggacgaggacctaatccagccttggtgggaagggatggtgccaggaaagtaagggagacttcccagaggaggtagcacctgacctgagcctggaagatggcaaagaattaggagaaagaaggagagcagtaaaggcagactaggaaagaagagtgattgccgtaaagacagtgtggaagtaaacaaagatcacccacatgagaacaagcggaagctatttattcagagcttgctacagcaagggagtcagccaccatcacctgcatttgac

SEQ ID NO: 4426 - DNA, 6000 bp, Homo sapiens
gtaaggaggacaatgatcatgtgtgcatcatctgctctatactaaccaccgtcttgtctaatttcattctcattatggcctctgagagaaacatgattatcttcatggagaagagaatcagaggctcagaaaggttaagtgacttgcccagggaagcacagctagtaaatggcagaggtgggatttgatttcaggactgcctgactccaaagcctatgttcagagggaccactggggggcaaacccagggcccagttgaaggggttcccatcttacggtgctctacaggcacaggctcagggctttcattttttccttgctcattaacaagccatatcggtgtcccttggcccttgacagccccctcggtggcaccctcaggactcagcggaggaggtggagcccccggagagctcatcgtcaactggacggtaagctgcaagggtcagatgtcctcctcctcctccctgacccctctcccgcttgagcagctgcagaaaggaccactgcacagctctgactcaaacgcggataacttcctgtcccccttccacgcacccgctgccccttacgcgaatccacgctgcaggcgtaggcgtccagggccgctactcttggcaaaggttgggtggggccagggaacgggcagggacacatgccgcggaccctcgcccatgccatgctcttgcccctcagcccatgtcacgggagtaccagaacggagacggcttcggctacctgctgtccttccgcaggcagggcagcactcactggcagaccgcccgggtgcctggcgccgatgcccagtactttgtctacagcaacgagagcgtccggccctacacgccctttgaggtcaagatccgcagctacaaccgccgcggggatgggcccgagagcctcactgcactcgtgtactcagctgaggaaggtgggctgcccctgggccccctgctcgtccctaccccagccacttgtccacagggatgtggggtgggggaacgctactcatctcccagctcagttccataggaggaggttgagaggacacctgggttccacatcattggcctcacttccagctcttgctaccttgtctcccttcggggttaggaaaagggaggctctctgggaatagaagtgggccctggagcattgcttggggggctcccactcggccttcatcctgaaggctttcctccaaaatcttaagcaaaggcaatcctggttgggggctgctctgcaggacacaggggggccctgggaatccaaacccattctgtattggtccccagagcccagggtggcccctaccaaggtgtgggccaaaggggtctcatcctcagagatgaacgtgacctgggaacccgtgcagcaggacatgaatggtatcctcctggggtatgaggtgagcaccaacctgggacttgggagaggaaggggtgctggggcttcaaagccaggtgggaacaactcacagaccactaatcattcctcctggcgtccctggttcgctgacatggcaaactgagcatccagtctgtgtagcactgtgaatgcaaatttcactaagaccccatggcaggccaggcgcggtggctcatgcctgtaatcccatcactttgggaggctgaggcggtagatctcctgagatcaggagtttgagaccagcctggccaacatggtgaagccccgcctctactaaaaatacaaaaattagctgggcatggtggcccatgcctgtaatcccagctactcaggaggctgaggcaggagaatcgcttgcgttcaggaggcagaggttgcagtgagctgagattgcgccactgcactccagcctgggtgacaaagcgagactccatctcaaaaaaaaaaaaaaaaagaccccatggcttatgcccattggggaagacagaccctggaggcagccttaaagtaaatgcttggctagagccagcattggaagctgagagggtagaaggaacaggttctgggaaggggcatggcctgcccctttcatcccagagcccattcaggctggcctgtccagggctgcacagaaaacagcctgagccgctctatggacagttgatcatcctgtcccgggggaatctggggcccagcagtctggcctgagtcctgggcccactgagaactccacaaaggggtacctgtggagcagatggcaagtgatgggaagcaagagggagagaaagaaggaaaagcaagaagaaaccatcaagctgggcctactagtgatagcacaagttcattctagtagagtactctagatttgagtacaatagcttaggcaagccacagtgtggagataattccaaactctgcccttgcctctgcctttgaaagcatatttagcaggtcttcatgctatgattaccatgaaaatgggtttgcatttattaggcaaccttcagaagcttgcttagggccaggggactactttgcaatacaaataagcattttctgtcccttagcagaatgcccacggtagccccccaagttaatgaaatgaaatgggttccagcaggccattgctaggttgagcctgtgccaccagctccctccctgacccatgtcttgagcaccttccttgaactacgcaccaacagacagcagggactcacacccacatggccctgctgtctgggtgctcatgatctagtctccaggttctgaggcctaagactgggtcacagggaccaggatgagcaagagaggaacagaatgtgggggccggggcagccctgagatcctgggcttgactactaccccttgggtacccccgcctccttcagatccgctactggaaagctggggacaaagaagcagctgcggaccgagtgaggacagcagggctggacaccagtgcccgagtcagcggcctgcatcccaacaccaagtaccatgtgaccgtgagggcctacaaccgggctggcactgggcctgccagcccttctgccaacgccacgaccatgaagccccgtgagtctgtctgcctggggtgggggtagggcaatattttggagggtgggtgcctctgagatcattccttccccaatgataagacaaatgctctagcccaccagctctgggctgaacagaaattaggcagcgagcctaatggaaataagggaatggaattcatggcccctgaagcgtctcacacttctccaacctttggattttcatgggctttgtttcgtgggcatgacagaatgtgctgggtgtaactgctagaggcaaacatccagagaagggctggttaaaggtgagggggtgcggggtgccagggaaacgtttggacatctctccaattcttcctctctggcagctccgcggcgacctcctggcaacatctcctggactttctcaagctctagtcttagcattaagtgggaccctgtggtccctttccgaaatgagtctgcagtcaccggctataaggtgaggaagcaatcagctaggcccagaatgggaaggaacagctcctctgtgtttccagtgaacataagcagcagcaatttatagcaagaggcatctgagtgagacataagcaaagggtttgtgactgtgagaggaatgaaattcatgaactattctctcagtaacttgcagtagaaactataaaaacgggcagatggtatcactgcagaaaggcagagttcacaggggcagtgatggactatggggatggagtatgggggttcttctagcttaaggagtctacggaaacagttcagtggcctgcaagctttcctccaccaatgaggagctttgtcaatggggaggaggggtgaggaggctggacctcaagagcccagaaccatcgggtctcctcccagtacctaaagctggggatgactcaacgatcagccctggtgtcaggaaactccacctggaaacctccttcccacagatgctgtaccagaatgacttacacctgactcccacgctccacctcaccggcaagaactggatagaaatcccagtgcctgaagacattggccatgccctggtacaaattcggaccacagggcccggaggggatgggatccctgcagaagtccacatcgtgaggaatggaggtgctgctcctcccctacccttatcccctcgagagattcaggatccacccagatacctgagaggatcattcccacccaggccaactccaatctctacccgcaaaggaaagtggaaggcaggcaggaaccaagtgcaaagtagtcttagaactgcctcgccgccacctttctacccagcccccagaacatccccgagggccagggaagggcgcagggtgcagggggaggctgaggaccaaccagcaatagcaaacggcctacaaagcaccgtaggagtcggactgagaagaccacccagccgtccgctcccaggcctgcagctggccctgtgagtctccttaggaaaggtctcaatcttgccacaagggtggggctagggtagtcccaggcccagctgactcagcttgtgctggtttcaggcacaagcatgatggtggagaacatggcagtccgcccagcaccacaccctggcaccgtcatttcccactccgtggcgatgctgatcctcataggctccctggagctctgatcctggaacccctccctctgcgccgcagctggacgccacctccgacggacacagccagccccttcctgctgccaaggtggcctgacactgtgccagagagtggctggttttaaatacctactttaaacagtgccctttttgtaggaggtaggatattttatattctgccgcaggatagaacccacgcaaggattttctttaaattgagaggcaccaggcagtaacttccatgatgacactgacgcctatacctgagctctaggctgcctggagggaaggaacaggcccatgggaagaagggggttttaaaaacatgtcttcaactcagcagagatggccctctgggaccctatacggactccgccacttgagagcagtcctaggcccggcaggaacaccagacatgaacaggttgaagaactggagcgaagtgcacacctcaccatccttcagtctaaggaagaagggcaagccctgggaccaagagctctcccgccttctccctcgagcagcagcaaggaccctgacgctgtccccgataactccctaggggctcctgcctgcccaagcggctgagaaccagcgccccgatgcctgaggctgggagcctgagccccttcagctttgaggggggtgatactccaggctgtttggggtgggagccaaaaagagttgagaggccagggcccttggtggaaaggggcaccagccttggtctgagatagtcacaacccaggtgacgatgccctctcagccaacactgccaacctgaccctgtcatcccgattgacagcgccacttcaggtggctgggtgactaaagggcttgtcttggtggggtctcccacccctccaagacccattctgcacagtccctccagggtttgggcaggagatggccaatcatgcgcccacctctccagtgctgcctgcagtcagctcggcctccccgacctgcagccccagactctgctctcccagcactgactcactcctgcctgggaggggaatgcagcattcatgctgtgtgtcctggtattgggaggtttctgggaagggcagaggataaatgtggccctgcctgctcccaggtatacctaggaccacctggccagatccgctcccagacggccttggactgcttgcatttccccggagaaaaaggggttaataaatgggccatcctttcctgagctctgggtatactaccagtcacagaacgtcagagctggaagaagccttagagctcaacttcttcaagcccctcactttacagatgaggaaatggaggtggtccagagagggtctgggattcccaaggtcacacagcccagaagagatggggctgggttaagaactcgagtct

SEQ ID NO: 4427 - DNA, 6000 bp, Homo sapiens
ctgagctgcagtagggagttgggggaagtgagtgtcatttctggggacagccttttcctacctcccttctctgtccagggacaggctcttggacccctagcccatttcccaaatcttccagaggccaacctagaggcctcctgcccgctgctgcttttgtcctctttgatccccctccaggtctgattctgggagttctcactcttcctttccatttcctcttccttacagttctccagataccccaccactgggaccctagagctgagctagtgtccatagctagtgaataattcatcaggctcagcaagagctaaattagacccaaggtgatactgtgaccaggaggcctcctttgggcatctggaaaggcgaatcctgccctggaaagacaagtgctctgtaacattaacttcattgtataaggtttcttcattgcctgagaaggtagcttcagatccaaatataatctgggccctgtgcctgtccactgacttctcaggggctcaatggcttatgggcatgccccccaagaggtgccactcatgtccttttgaaagccttcctggcatcaacagtcagctgaacagcatgctacagtttgcagaatgcgttcacacacatttctcgtttagtcacgtcagctcatggtatgctctgagcccttgagtcagcaggagcacaccagaattcggtgtttcaatcctctgcttttagaaaggaattattccaaattattcctggcaaatagggtggggtagagggtgctctgcttcctaaaagttgcccaaaaaggagatgtggcttcctctccgggtcactttctcttgggcctgttcccagtaaaacctcctccagggagagtgactataaaggcatgaaatcatccgtctttcctacctgcctggtacagattttgatttgcctaaaagtgacctatgtaagtggttctgttcactgcccaacatctgggctcatgtctgtgcccaagaaggactacctaaacaggagtgtctgtggcattagatgggcagaggaccagcaggagagatggcatactccctccctggaagcagctgaaaggtgccctggtgtgtgcatgtgggtgctgccctgcagcttcctccactctggcctgatctgtctgctttcccagctcacacagctgtgcctattcctccacgtattcctaggaagcatgcccacctgggttgctgctgttcacgctgaagaatattatccttcctctcgcatttccctgggggttagcagagctctttggtcacatgggtttctaagaagatgcaccttctggcttgatctgaaagtgaatacttggggagggaacctctgaaagatgaccattttccaaacctccatttccaagcaggcttggtgagcataaaagaagccgccagcctttcaaagaggagtcctcactggcagattttcacagcacatttggggcctgaaatttttttaaggcctcaccttgtattctaagctactaaatttagctactttttagcgtggttctttgctcctaaagcctatgacttctccagtttcccacccttcaaaatgtgtggtttgtgatttttttttttttaagagaaagaaaagtaggccaggtgcagtggctcatgcctgtaatctcagtgatttgggaggccaaggcaggaggatcactggaggccagaagttcgaggccagcctgggcaacatagtgagaccttgtctctcttaaaaaaaaaaaataataataataaaactagctgagtgtggtgacatgcacctgtagtcccagctacttgggaggctgaggcagaggatcatttgagccccccagagtttgaggcttccgtgaaccatgatcacaccactgcactccaccttaggggaaagaacgagaccctgtctctacaagaaaaagcaagaaaaataagatgattttaaaagggcagtggggagagaacggaagaataacaacaaggcaaaggaagagaaaataaaaaaaataagatttaaagaatactaaagaaagaaggggcatggcataaaaattaagggaagagaaagaaggatgtggaagaaaaaactaaactaaggggaacccagtaaaagggctgagaccttccagacgtgcagagagaagagcctgtgcccaggacctgggcttccttccagtccacccttctcagatgacaagagcctatctgtcacccccgcctcaggcttaacttggaagggtggaaagagtgaagccagagaccccctgccacagctcagctgcccatcctgtgaattgatagtgaccactctgtgtcactgagatgtggcctccatctctgccaggccagagaggaggcgccccagggatgtccaagactgaccaagaagtgcaagtgatgtggcttactccacagctccttttctttgcaaaagaagagctgctttgcaagtggtgtcctttcagagcccactgctttagtgcccttggcagcttttcccaggtgtgcctgcaactctctttgctcctgatggcagctacttctttggctttttctgtttcagaccaagtcttccaggtactgtctggaatactgtggtttgtgtatgcatgtgcacatacatccatggtgagggagcttcaggaccagtcacctatttcagtaaaacttagaaagtgccatgtgtttgcacgagggccctgggagataatggtcctatgtaccatttgcagctaggagaagtgagactcagctgcacagagtctccaaggcttggctcattcaccctctcctccatctcctgatgccactggtctcactctccaaggccgcctcgtccaagctgctgctttgtagttgctcctgcctcctcacagttgtgaagcggcacggacagaacatggaagccgcacagctagcaagtggcagggtgtggattttagaccaggtcttctgactcccaagcactctgtgggccactgaaaggctcatccagtgcccagcgagcccagctctggcacatcttcctgccagacacattcaccttaaccccctgtctttacgccgtcctcccatcacatttgtggaaacagtctcagcgcctacagtgacttgaccaaggtcacttagaaagcatggaagtgagtctcacgcccagggctctacagggcctttcccaccatgccaccatgctttgggctatctgttccccacccccaccacaggaagctctgcatccttggcagatttgggaacacgtctcatgtataaagacgagcaggcttagaaaagcattgctctgctgctagcttgcctggcagacatctccctggttcttgtttgctacttttctcctagtgaactattggttccctcctgaacccctgttttcctgctgttcagttattgtgctgatgggtaagctgctcttggagtggagctataaccttccattagggagctgccaggtgcctgtgttgggggcagctctccccagttcattctggtggtgcagcatggccttgcaggaaactctttctgttgcttctgagccctcctgatcccgggaagcacagagagacctaccatgcagagtgaaccccagggctctcagctcactcggcccctccccacctgtctcctgctgccactgccttctcttccttttcctctgcttaataagaaaaagtttaaaatgttagcttgggctgggcatggtggctcacacctgtaatcccagcactttgggaggccaaggcaggtggatcgtttgtgcccaggagttcaaggtcagcctgagcaacatggtgaaaccccatctctgcaaaaactagctagacatggtggtgcacaccagtagtcctagctacttaggtggttgaggtgggaggattgcttgagcctgggaggtcaaggctgtagtgaggtgtgatcgtgccactgcactccagtctgggtgacagagcaagatcctgtctcaaaaaaaaaaaaaaaaaaaaatcctagcttggtggggcctagcctggagcgggcagagaaggggtatcttggccgggtgcagtggctcatgcctgtaatcccagcattttgggaggctgaggcgggtggatcacgaggtcaagagatcaagaccatcctggccaacgtggtgaaacctcgtctctgtactaaaaatacaaaaattagctgggcgtggtggtgcacgcctgtagtcccagctacttgggagactgaagcaggagaatcggttgaacccaggaggtggaggttgcagtgagccaagatcgcgtcaatgcattccagcctggtgacagggcaaaactccatctcaaaaagtgaaaaaagaaggggtatcttgagtatgagaagaccaagctgtctttgtttctacctgagacagaactgcagtggctggactgcctttcatggcagctaaatgaggtagatcatttcattgttttacgatgtcagtattgagggaggatcagtcttatgctaggcacagtgaatggtccagatgaacataagatctgatccctgccttatcatttaataggggcataagacctatttacaaataacccttatgcaagaacagtgcttggtgcgaaaatataaagtcaagatccagtaccataggagggggatcatttgcagaagtaggggagctgccagaagtgttccctggccctacaggtcagagctggccccagaaattgggacctatgtaatatgctttgccaggcttcttcacaaaccccaagtcatcagccaaccacaaatgtttgtatagtttccatgagcccagggtatgaggactcctgatctcagtgattttggcctgcaagccctggcactggctcccagagatagcactgggcccttatctcttcacaccttcttgaatttgggactacccaatcaacgtgacgcgtgtcggccatcagtatttaagcctggagttcctcaccagactcaagtgggtgcagaatccatgtctttctgaacgacagttctgctgtgagaagctgccattagagagatccagcaggccccaggactcagctggccagccggtgacactgctcactgctcattgtcctcagctgtggacctctgtccccctctgctggccactcacagaatttcctgctggcactgtcaagatgaagtccaaggaggaagagactgctgtgagtttcccatctgtgctttatcttgggtgtttttgccagggcaatgctggcagagactgggaagcagaagctagtgcagaagtggccattggtgtccagggcagagactggatttctgggacaggatctcagggcagaagaattcccctggtgaggctggctgctgtcagcttcctccaggtggttattggagtagagaaactgccttggaagtgatggtgccttaagccaacgggcagggcagcagggagaggaggagaggactctggctggagctggctgtgttaggatctgccagggagcccccctccaggctctagtcttttttggctttggagagctcttcgctatcctggaaggctggctgggaggctcacttccattccgaatccatgagactgctctgtttgtgagaggagcttctgatcatgggaggcatttctgtgagatgggaggggtgaggtggagtgcctgtcttctgggtggttgaaggatgcaggtgcacatgtcatgtgtcctcgtgcacatccctttcaaccccctttgccccccacccccacccctcctcattgatgcctgtcacacctgggtgtccttatgcacacaactcacagtggaacagctggacttgtggaggggcatctcatcagagctcggtcctcccgcgctcggtgatcctccctgtctcctgccagatgggaaggagcagcccgtgagccccaggggagggggaaatctcctagagcaatccgcccctaatccccaggctgtgcctcagtctggagatggcggct

SEQ ID NO: 4428 - DNA, 6000 bp, Homo sapiens
ttgatttggctcgctgatattttattttattgattttgttttctatttgtatgtctaccattcctccccctgccagatgcacacacaaaactgaattttttttatcaattttaaacaggattctaacttattatatattctccttttatcatttcaaaattctcacctcctttttttctgatcattttttagcaattcatttgaaaataaatgaataggaaatttatttttaatcttcttgatttaggtaatgaaaatgtttaaagctaggaattttccttgcattctgcttggccatacctcacagattttcctcataatgttgccactatcaccgttttcaatgcattcttaattgcagatttgaaattccctctatcttttcagagtaaatgggaagaatttttttccaagaagttaaagtgtttctttcttccatcttttgttatttatttcaattgtattgtactgtggtcagaaaatcctgccataatagatcaacttttcaaaacatatactgaggtttactttttgatccatatggtcaatttttttaatgtctcgtgggcatttgaaaataaggtatattttctattctcaaagttctgtgtgtgtgtgtgtgtctttttcaatatagatagataggtatgacaaccttattaattgttttgttctcagaacacaatgttaagggctcaaacctactgtcaagcaaacctgggtccaacactttctgtgtgatcttgagcatatcattgaccactctaaatcccagttatcatgggattagtatcccaatgactgcggactttgtagacatttctttctgatgtttaatggagtccaaatagtaggtctctataggaactcctattaaaatctcctgtctttctttacgctctaatgccctgaactcccagaatcttctcactcttctatgccaataaaaattctctggccaggcgtggtggctcatgcctgtgatcgcagcactttgggaggccgaggcaggtggatcacctgaggtcagtagtttgagtccagcctgactaacatggttgaaaccccatttctactaaatacaaaaaattatccaggcatggtggcgtatgcctgtaatcccagctactcaggaggctgaggcaggagaattgcttgaacctgggaggcggaggttgcagtgaaccgagatcgcgcaattgcactccagcttaggcaacaagagtgaaactccgtctcactctgtcgcccaggctagagtgcagtggcacattcttggctcactgcaacctctgcctcccaggttcaagcgattcttgtgcctcagcctcccaagtagctgggtttacaggcacatgccatgacatccggctaattttttatatttttggtagagatggggtttcaccatgttggccaggctagtcttgaactcttgacctcaagtgatccacccacctggacctcccaaagtgctgggattacaggtgtgagccactgtgcccggccaaaattctctttttctgacatcttgggctccccaagccctctgtcctctactcattcccatctctatgtgtcaagctccagacacagggccttgagctgttgtctctcatcctgagtaaatgccacttgtcttcagtcctagtgcttgagaatccatcctctgcttttccctgccgattccttgtcctttttctcctcaaagaacagagaaagaagcagaagcagagaaaatggtgacaaactctccacatgttaataaatgttatcacagctatttttaagtctcattacctgcctcacatgtgtcaaaccttagaattccaaagagccacatacatcacccaactaccacagtgagtagcatccagacaaggtgaattttacaaggttacaaagctgctcagttaacttgtcccaatccagtttcctctccactattttagcctgaacttcttgggaatttcctggctgcatcatttgtgatggcttcatcttaatgcatgcaaatcagttccctttagtttttccctaaatttcctagtccggttgaccagataaaaaaatgtgtagaagactctgccttctattccttccttcatcccccagctacccacctttacactccctcctcattgctccagaaaggagcaaatccagagttggtctcattccagaatctgagaaagacaccacctacttcagaagagcagaaactctttacaacaccaggattgggaagaggtggctaaagaaaaaggaaaatccttacacaaagaactacctgatacacatgaaagcctacactgagaacatctcatctaggtcttaccaccaaaaaggcatttttttccctctcatagaaaccacaaaggtctgaatctgacccagaggactatccttttctaatcatggaaaggaatcttgacttgaaactgtccaagagctccgaccaatccagtagcaagagaaagggtggccggggtgcctactgatgggaggagctcctgagcccagccctggaggcctcagagttcaggggcccacttagatgataccagagagcaagagagaggaactggggtttgcgaaccttgtggctttgtctgtttcctgtttcagcaaggctgctgtgcaaaaagaaagacggtaccaagaagggacgtgttaatggggcccagacctatggattgaaagcgtgtgctttacccatctgctgtcttgctccatctgagaccagagccaagatctgcccaggactggaatgctttcccgagtggcttgagttggagcctgggactaggaggtaactgagaaggaggatgcttttgtgtccaggtttgggaactccaacttcggggtagggcagaagatgctctaccatcccagctcccctgggtggagagtgggtggcatagtttaagggtgtcaggggtttgggtaaccaagaaagtatcctgtattggtttcctgtggcgctagccatggcacagggtacagcttgcaccactcctctgttccagtagattagattacattagattaggagtgagtcaaacgacttagagttcaggctacccagtgatatgggcatgaattaaatgaccttttacagttttcttcaaagcagggatccctgaacacaagactgccttcccagcagcttaagcgcaggcccctctcccctcagttcacactgagagctctgggccaggaaggccaacccatgcaggaagccattcattgtctccattacaaacatggccaggaagtaaaagcgagactcagaaaggcatgtcaagccacagtcaggtgaggagccatgccctgttctctctctgcagcctgagagaccaggctgagccttcccagccagtaaaccttcttcctccaagctctaagtgagcccagtcatgctgccaggggggaacctgagagatgccagaaagcctgggcagtggccaagtgatctttctttgaaccctacagggaccagttcccttttctttagcagcctacccctgtcagccgtcccacataccttcttgttttcaagcaagtcagtagggtccagatatcccagaaacctgggtagggttctatgcagcatgctgcaccaaatcctagcaggtgtggtagccaaggcatctgggaacactcccctctctaaggagccatttccactgcagctcctttcttgggtaagaaggctccatgtctgccccaaggaagcagagagcagagcagctgtgtgtttcagtggactaaggttggtggcctgggtggagagcccagagagacctcatctcaggcactgtcttctcccccacagccctttcctcttcgcggcaagaaggtaggaggattctcaatgttctgcctccactacaaaacctgtggggaagctgagccaaacagggaggggacctcacaccttatgtgtgacacaggcagaccccatctcttccttacctttcggcttggtgtaattgggatggcaattatgtccagaccacagagaagcctttctccttatagcccaaacccagaggtcagaagtaaatgtgacttcagcctggggccagcatcccctcaatctggtaaacaatatactctgtcaaagagagagagggttgagaggatgagagaaggcattcttggtcctagaagtgctagtttagcttggagcctttgtcttacagcaccaagtcttcaatatccaacatcggcataacaaggataatattcgcaattacttttgcaccaacctaataggaatactttatgtctttattattaaaaggtaacatttattgtgtgctccatgccaggtgcatggcctgcattttgtcatttaatccttataacctacaaggcaggtcctagccccattttataaatgaggagactggggcttagagatgtttaatagcttatctaaaaacacacacaggttgtaggtgacagagccaggacatgagtccacgcagtgtgactccaagagccagggttctccactgcaatccatggcagaatagccaggggctgtggctcagggatgctgtgagtgtaggttctagacatggagttcacatgcacataatcctgcgtctcctccattcagtcatttataacaatagacatgggtctctcagaccctttcttttaagtctttaaataaagaaagtggcagggaagaagtcaagggaccaccccctatgcccactcccacccttatccgagaagaagaagtaaggaaaaacaaagaagagagccattcagaatgggtatgtagaggacaaacattaataacctcacatttctgcttggaatcaatgctgcctgacaccagagtatgcccctccaaccctcaagagtcaggcatttgagtgtccagggcttgaccacacaaaactcctctcagggaagaagactgccccacccatgaccctggggaatgagtggtaggatcagagagaaaacaagaatcctgcagagaattccagactgagccagagtagcgaagtcccagtaaaggggcagagagtctgctacctgttgagtctgtttggcctataaataaaccccaaggggttagagctagcaaatgcctgctagttggtgaagctgagataccctcctcccagggtggtgggtaatgaggtcgtgggaggaagagaagcagcagcagctgtgagggggagtccctcttccttcatcagtccctggtctgactccagtgatcagaggaggcaggacacagaatttccaacgctcaggatccagctcatccaaatccagcccaactcagcaaagtgaccagagggttctaggaggataaactacagaaggtaggtggggaagagtaggaaagagaaaggcacagagaaggaaaaggggattcaggtctaggtgctatgtgaatatcaggtaaggccatgcagagggtcatcctgtggcccctacaccaagcctggctccctggaaacttctgattactgtctttgttttgtttcttttctgtttgcagcagccttattgaggtacaattcatgtgcttgtgggtttggatggcacaatctgtgtctgggctaaggaaagcagacttggcaccaacattaaccctgacaggttggtaatcctaaagaaatggaaccctcagccccaacagtattggagccagatgctctgaaatgggttttggccagcactaggcatgtggcagatgctcagtcaatattgattggacttgatctgcacctgagagacacagcccagtcctgagcttggagtggggggcccatggaccattgtcaggacagcaggttggaggaattagggtagggtttccctcctaaaccatgccaggtccaggctcacaagctcgttgctaaaagtcaagaagagagcagtgggtgctggtcacaggactggtcaccacctgagggggtgtggttagccctccagatccttgagaagtgtcactcaactatg

SEQ ID NO: 4429 - DNA, 6000 bp, Homo sapiens
ctttccccaagtaactattcaagtccaggctctcagtgggctcaagggagtgtccacatctcctggaatttggccataatgttaatatcctacaactgtgggctcagttgtagagttagctaccattgacacctttatattaaatagaaggggaaagagatgggaatgaagagaaatactagctaaaatttacatgtaaatgcattacacagcaaataagaaaatacaggtaatcgtttagagctaatttttatgtttttcattaagaaaactttttaacttgtaaaactgatatatgatgtacatattttgggggtatatgtggtaatttgatacattcatataatcagagtaattgagatctccattaccttatttacctttttaaatactaggaacatttgaattattttcttgctgttttgaaacatacaatcaattaatgttaactatagttaccctgttgatctattgaacagcaggtcttctgtcttctaagtgtatatgtgtacccattaatcaacctcttttcatcctcccctcctgctttcccttcccagcctctggtaaatcaccaatctactctatcttgatgagattcacttttatatctctgacatgtgagtgagaacatgcaatgtttatctttttgtgcttggcttagttcacttaacataatgacctccaattccattcatgtttctataaatgacagaatttcattcttttttatggctgaataatattccactgtctatatatttcaattttttaactccattcattaatggacatttaggttgattgcatattttggttattgtgaataatgctgcaataaacatggggagtacagatattgctttgacatgttgatttcctttccatggggtgtgtatccagtagtggaattgctggatcatatggtggttctatttttgttttttgggggcagtttttatactgtttttcatagtggctgtagtagtttacattcccaccaacagtgtatgaggtttctcctttctttacatcttcaccagcatctgttatttttttgataaaagccatcctaactggggtgagacgatatctcattgtggctttgatttgcatttctgtaatgattagttatgttgaacactttttcgtatattttttggccatttgtatgtcattttttgagaaatgtcttttagatcttttgtccatttttaaatgggattctttcttttttttgctgtcgagttgtttgagctccttgtatattctggttattaatcttttgttagatagtctgtaaatattttctcccattctgtgggatgtctcttcactttgttgattgtttcttttgctgtgcagaaactttttagcttgatacaatccatttatctatttttccttttgttgcctgtggttttgaggccttgcctagaatctttgcccagaccagtgtcctggagtattttcccagtgttttcctctagcagtttcatagttgcaggtcttggatgtaagtctttagtgtggtttgaattaatttttgtatatggtgagagatagaggtctaatttggttcttctgcatgtggttatccagttttcccagcaccatttattgaagagagtgccctttgcctattgtatgttcttggcacccttgctgaaaatgagttcactgtgtatgcatggatttatatctgggttctctatcctattgcattgatctgtatgtcttttttttttaatgccagtaccatgattgatttggtttctgtagctttgcagtatattttgaagtcagatagtgtgatgccttcaacttcgttctttttgctcagggttgctttggctattcggggtcttttgtagttccatatgagttttgggattgttttttctatttctgtgaagaccgtcattggtattttgatggggatagagcagtttctgtgcctgatcagggggtttgtgactctccccttcattctgtgttctttttgtcttcggttagtacttctgctgttggggttcttaactctggtgtgatccaaattttgattcttcacaggtctaagccattgcaagtcctgctgttgtcttccattaaccagtagacatggcaatactaggtgataccccacaaaatcccctaagtttcatttatattcctcctgcctccattgtgtaggagtaactcaatttccctttggcagtaagggttaggcctctcagcttgtactataactcctctttcacttgttctcctagttccatgaggaaccccaaatggctgggtgatagtaggttgttttgatttgatagaatcattgtttcatcccctggtggaagcacttctttgctgtgtggtaagacctctaaccaagcacatcacagagtttcagggatgggaagaagatatcttaggagtaggttaagaggtgtaatagtgaggtaccactccctcttccactctttgaatactgactctacatatttaggttatgggtaagagcaccatatggagtttgctggctcagagcacattctgtatcccgtgggatagaatctcaacatcacatgatgatgtatatgggaacctttgatagactattctgtaaggctaactgcttttgaatgatgggataagactagtgaatcccatagcccatcgtctgacttcatttgctacaaagtgaggtcattagacaaaagtgatgttatgtctgataacatgacagtgactaagatggtcagtatgtccatggatggtgaaactggcagacacgttggtgaatttggaaagcagattcacatcgagaataagggacgactctctggcccctccaaaacagaagaggtctagtgtaatcagcctgataccagaatatggaaggtcatagaaaaccggcaaattagggactcagctgtgctagtagccaggttaatcttggtgagaggctgtccacattgttgatcctgtgcaaagctttcattgctgccattgcagctactttggtgatgagcccattaggacggctgtggaaagaggctggctgatgtgcacaggccatgctaccttgttatttagactgccgggcccttttgttgagtatttacatgggtcacaaatatctcccctgggctcattttgaggtgttcatttatatgcctctttcctgattttaaacgtctccttattaacatttatccaattgaattccttccacaatcctaactatcccaggaaactattggacactcccatgaatcagttttagattcttacagacaaattggccaatggcatgtaccacttgaaattccacccactgtgaggctttttccttgtttgctgtcctttggggccatctcacatataaggttgcagctgttcatttccagcagattccatcatatcttgggcagtcatcagtgaacagagctgtttcccctcctctaccaagtcctcttggggccttaggtgtgggatgagagaaggatagccacatagcaggagtcagcatattgggaggaggagttctcttttcctgcaacttaattgtgacctcaggattctccgtgtttgtgtgtgtgtgtgtgtgtgtatacacatgtgtatgtatccattgataatggaatgcttcctgatattgtggctaggtggatcagataactctagttgataatggaccactcaggtaacatggttctttggtgtcctgtggtcagggatagctcacctggtgaatgaattagagtggcctgcacagttacatacatatcacctccaaattccgaagaggtctaccaaagctgtgcctctttcttatggatgagtggcataaggtagaccaacttgtcctttacttgtgtcttgaactcccagaaactgctctgaagtgatatacccacatatatatatgtatgtttatttctgatatgctcatacttattaaggcatctggtatacctgccactcctaattttgtaggtcctattggcatgctctgttcatgatttttcttacggttatttggctgttttagggtctttaggtctgtgaactgactcaggtctggaaattgggtaaatgatcatggtggcttaagttaagccttgttcactaaaactagattatttgccagttatataatgacaataaaaataaccgtagtggaaatgatagctagcatatattgagcacttaatctgtgccaaacactgctttaagagctttatattagcctatgtaattctcacagcagccctatgagcagatagaatcgtatcgctattttacagtgaggaaatggagacacagagaggttcaacttgagtatctgtctgtctaaggtctatggacctcatgatcagttgcccttctccaaacatcccagtgaatcagagcatctgaccgccaggaaggccatgtggcttactgtggtcatcatgcacacgtcaccttggggttaagtggcattatttagtctattacttaaggggtttggtgtccgcattgaaataaagaatttcgttgtctcttaacagcatcctcagcccacagagaatggccttggcaacacatttctgagacgcttgtgctcccctcactaatgtatttatttctcaaattctcagtgaagggagtgtcttctgagctctcttgggggcataattagggagtgggctagcaggtcacacatgataaatccactcagacattcttatctcctgaaatcattttattacttcctctcttgacttcccaaagaatttctggcatctcagccccatacatatgggcagctgtggtgtctgggtttccaaactcatacagtcagctccactcccagctgctgcagctggcatgtggaatcctgacttgctggtaagtgtgctcatattgatcattccaccccatctatttagtcttcttccctccatctagattccttagaatcccacatatataggtcagagttttgctaatgtaaagtagaaaaaccttgtggttcttttggagtgaaagccttgtaataggccccttggggcatgctggggctcatttctagacagtgaggcgtgatgagcaggagagatgaagaaaatctgcttctcttgcaaagtaattccttcatgagacttcattaaaagggtcttcaggtaaggccagatcagcctcatctgaaagccttacacagggagaaaggggctgtcgctgctgacaagtgatgttccctgaggtttggggacttgggcttttcttaatcaccttaaatctctgttttagtttttaggagtttcactctttgtagattggtagcccagtctatagataccttgcaagggtgagaattcagctgacattgtaatttaataaagctaaggataaaacttctggggttttttgtttattgagcccgctgactagaagagataagagatggtttttagcagaggccaagaaggtccctgggtttcagtccataccctaagctgagaatttaggaattggagcctgtcattctcctcttactctcattctttacgctctgcttggcagcctacaccatatttcttggaattaaagacatcatgcccttagtagttgtaagttgggttccccagggaggctagtttgtaggtgtttattagggtgttctcttgagattaattcctgtaggaggaaaggggtggaaggagggcctgacagagggaggagccaactgtgacgcagtcttcatggaagctccagtcgattctgtagggagttctgcaggttgggtagttctttggagtggtcccaagcagagtgaggaggctaagcctttctacccccatggcaatcagtccttggatgtagcccaccccagaaaggcttgggtgaggtagctttcctgagtggacgcaatccccagtggaggtaatccccagctgagagtttctgctggtcacttcccatcagctgggacagtgagtccttcattgcctaagg

SEQ ID NO: 4430 - DNA, 6000 bp, Homo sapiens
tgttagggaatcaaggcttggccttggcgcaagggtgctggcaatctaaccttgactttgccctctcctccctcccccctcttctttctgcctctttagaacccccatgattgctggtgggctgtttgtgatggataagttctattttgaagaactggggaagtacgacatgatgatggatgtgtggggaggagagaacctaggtatgtacaagcctcaaatctcaggacagagaagtgcctcagctctgcaaaaggcagggtgccaattggaaaaaaaatttaaaaggcttcagagtgaccattcactgggcttaatcgatccttgcaaacacatatgtaacaccccttttgctcttgaaagtctcatgagttgggcattaaaatgtgcctccctaggttagagtggaggatgccagaatacggataaagtctttgaagggaaatgcaaactctttcaaggcgtctgaacccaagtgtttggaatgttgcaggcttgcaaaaacagagggaaacagtccaggagctcagattcatgctgagtggtggagagtggaaaatgaaccccggcgaggctggtgggattgattgaattgaaatcatgaaaatccgatggggcagggaggccttggcacttaatcccttctcgactacctttgcgaatggttctcatttgtttttctgtttgtttgtttttttgtttttaaataccccatgcaaattatttttacccaggtttaggcacagcaaaattttgcacattgtggtctatattggtagccttatatttactgcataaaagatgaaaagatgtgttttgtttgtttagggtttggagtgggggagatcttttttgcttgtttcaattaaagccttttgtttcaaatgcttgacattctgagcgaattctcctgggctgctgagtgttgttaacttacattcgtccttgggtgagtgtaccctggaggacaggggagaaggaaaggggaaaatgaggccactcatttttaatagttttgagactttgaaagtttttgttactttaaaagaaaagactagcctagcctattatttttccattgttttatgatgttgaagtcagtgataccatctcatctttgaggatttctctgccttggtttgatgttgaaagcttctttaggctcgattactatactgcacgggtggagagaccgtgagtcaaactccttttgggttgttttaaaaaaatgatacattaacctctagggaaagcttggattgaagtcacttgagtacaaaaggcttcagaattgttaaccctctaaagagagttctgtcaccctgttccatgggtatcccctaatggtttagtggaaatccagcaggccagggtcgcccagtagggcagcgtatcgtgtaggtggccatttctcaaaaacagtgtggttttcagaagtttgcatactattagctgaaatgagacatcagccagcattttgtgtcatcgtgtaggaagagtgttgatttacatatctaaggaggcattcacccagagactggggggtagatttgttgtaaggagctgctttattgtggtttggtgtttgtatttattatgtagctgtgctagaaggttctagggtctgagcggttcaggttggggtgaagatgaaccctgcaagcaggagcacatctctgcccaggaaggctggggcatctgtccctccgtgaggggctctcctgggttatgccaaggacttggactcccagtgaggtttggagggctcaagagcttcacgtgagaaggccatgccgtgagcctttctccttagcactgctctagcttctgcttctgggggccgtgcacactactagccattgccaacctgaggggcctctgtgggtgtgcattgggagaggtgtatggtgcagagaggcccgagtaagatccaaaaccacctcctcaacgtgtgccccgctggaatgaccagagcttcccattttcctaatcatgtaagtccttatgtcatttaagcaattaaaatggaggaccaagaacctaacccttaactctaacaatgggggtaaggctccttgggggcatcatctgtgtttctctacatccctgtcatgcaaggatgatgctaagtacttccagggaatcatctgtttgtgctttcttaacggagtgtggtctgcagaggtcatgacaccttgcccagggtctcagaaccaagatgtaaacactaactgcctaattaaaaagccattgagttttactgagtaattatcctcaaagttatagggttcaaatgaaatcaacgctgaagatactgtagttatacttagccttgaaaatctcccacaaaagccctggaaggatcccttgttggcttaacagattccccatagagaagccaaggggatttcctagcccctaattctaaatcttgtggtgaggcaaatggatatttaaattttattttctgaaatagagacaacttcttttttttttttttttttttttgagatggagtctcgctctgtcaccaggctggagtccagtggcacattcttggctcaccgcaacgttcgcctcccgggttcaagtgattctcctgcctcagcctcccaagtaactgggattacaggcatgtgccaccgtgcccggctaattttttgtatttttagtagagacagggtttctccatgttggtcaggctggtctcaaactcccaacctcaggtgatccgcctgcctcggcctcccaaagtgttgggattacaggcatgagccactgcgcccagccgacaacttcttaggttgtgttgggaactgtaaaaagtaaagtcggaaactttcactgcttatgcttatgtgattgtaaccatacattttctattagtacaagagagttgcttattaaagccccgtaacagctgcatggatcacccattcctagtgagtgaggcattagtttgctggacccaagtagaaactcatggtgttctgacccctgtgttgtatttcctgccatgtgcctggcattctgggcacctgttgccataactaggttgactgcctgcaggatttgccatcaactcactgtatggtctgtgatggacccaccctatttctgatcaatctgcattggtgacagtgactgcacactctgtagatactatatgtgtatatttttacttcttttaatttgttaattgacagataataattgtgcatattcatgggatacatagtgatgtttttaatacatataatgtatggtgatcagatcaaggaaattagcatatccatcatctcaaacatgtagcatgtttttgtgttgggaacattcagtatcctcctcctggttatttgaaactctgtatatattatgggtccctagagtcaccctaccgggctgtagaacacaagcaagatccctcttctctagctataattttgtatccttgaaaaaatccctactccttccttcccagcctttactatcctccgttatactttttacttctatgagatcagtgttttttagcttccatgtatgggtgaaaacatggtattcaactttctgttcttacttcacttaatttcctgggaatactatccagccagaaaaaaaaaatgaagtcctgtcattcacagtaactgttgatttttgtcctgcctccctaacatgttcttagggatcttagataatacagaggaaaattcccttttgtattatacaaacctggtaaagaaaaactgttttttgcctttcagaaaattcttagtttttttgttgaatctgtttcttgcattcagtcggacccctgactcagactccagtcactcacctagtcagtggtgataagggcaggtacctggttggaaggtacctgtgtgtcacaaaaggcacaccagtcagtctaagcttcgactgagttccaatgctcagggcagtctgtgtgtttaagtaggtgtgggtagtgcctagacctacacatctcattcctcctgccggtcagttctgtgttgaagcaagtcaacagcagccttccccagggagcattcctacctgggccagctggttactgactggtccaagcctgtgagcagcgtgcagatatcaatcagttacttgactgtccttggtcactaccatagtccataaggcagtccctaagtccatagtccgtaagtccaaactctgcctggagacttgagcctgctaatacacagggacttgtatttaataaacttttccatttgagggaagggattatttttccctggatgagaaaagccaagatgcatcctggggttcagtctgttaaaaataagttttagagaaagatggcatatatggttgtctagaatatgtaacaataaagcttaattgtacatatttatataccttcagtgttgccttttcccacggtgttgatacgaagcaagtgcaaatgatcgtgagccagctagtgaagaattcagcacaagtgttttgtcactcagtagttacgatgatactggggtatacatgatcttatgccaagaggcctttatatttacagtagaccaagaagcattcttgtctcaaggtgtctactccacatctgaaaaatatttccccgtgaacattttttcttgattgtattgtggtccagagatccaagtgtgtcaaatgtctctcctttagagagttctgcatcaggttctggaaggaggaaggtccttatcagatctccttcagcagcagagggcatgggagccccatgatgggatggtcagggggcctctgtacctgcttggtgtgtctgctgttgcagaggtgcgtcccaggctctgtcagtcacctgtgtcttgttcatcgtctcagagatctcgttccgcgtgtggcagtgtggtggcagcctggagatcatcccgtgcagccgtgtgggacacgtgttccggaagcagcacccctacacgttcccgggtggcagtggcactgtctttgcccggtaagtagtgaaaggctgagcggggtccaaaacattgatgactaccctgaaagcaggacctgaccttgggctgtttgaggacagatgtccttcagtgggtgtggtgcatttatacaatggaataccacttagcaattgaaaggcgcattccacggatgcaggatacaacctgggcgcctttccagggcatgatgctgagtgagagaagcagttacatacatgattccactcatgtcacagcctcataaaaacacagctttagggatggggccagaccagtggtggccaggagctgtgatggcaggaaagcggggagtgtgactgcagaggggcagcaccagggatgtttggaggagggacggagctgttctgtctcctggttgtggtggtagttggacaaatcttcatgagtgtgaaggctcttagaactgtacaccaccccccaaaatgttatgggaaaattttttaaagaagaaagttcattttataaccattcaaggtgcaattaaaagcaacattgtcttagtccattttatgcgtctctaaccaaataccacagactgggtaatttaaaatgaacagaaatttatctactcatagttctggaggctgagaagtccaagatcaaggtgctggtgtctggcgagggtcttcttgatgtgtcatcacatggtgggagggcaaagagagggcaggaaagagcaagagggggccaaattctcccttttataatagcatcaatcccccccatgagagtggagccctcatggcatagtcacttcttaaaggtcacctcttaaaggcctcacctcggctgggcatggtggctcatgtctgtaatcccagcgttgcgggaggccgagatgggcagatcacctgagtttgggcagatcaggagtttgagaccagcctggccaacatggaaaccgcatctctactaaaaatacaaaaattaaccgggcatagtggcaggcgcctataatcccagctactcgggaggctgaggcaggaaa

SEQ ID NO: 4431 - DNA, 6000 bp, Homo sapiens
caccggctctgtggtaaggagaccaggcgttcttgcatccggctggctttggtgaaggtgggagggacctttacaactggaaatacttgtgtgtgttgtgttcataattataaactgtgacagagaatctgcatttctgaagtgaactttgctgccttgctggctagttttcatactggatgggcttcgggggtggggcagggggtggacatcaactcctaaacgtctattcaacatgttgtgtatatgtgcattttaagaaccactggtggccagatgtggtggcttatacctgtaattccagcactttaggaggccgaggtgggaagatcacttgagcccaggagtttgagaccagcctgggcaacacagcgataccccatctctacaaaaaattgaaaaattaactggggatggtggcatggacctgtagttccagttacttgggaggctgagcgggaggatcacctgagcccgggaggttgaggctgcagtgagccgtgatggcaccattgcactccaccctgggcaatagagtgagaccctgttttaaaaaaagaaccactgatttgaaggaagtatttctccagcatactctgagaatcatccaaaaagggcttctataggagtacatggagtgagttttacatgaaatgagatgtttacttacgaattgaagacaaaggccagggcatgggggctcatgcctataatcttaccactttgggaggccgaggtgggcagatcacctgaggtcaggagttcgagaccagcctgaccaacatggagaaaaccctgtctctacaaaaaaaacaaaaactagccgggcatggcggtgcacgcctgtagtcccaactacttggggggctgagggaggaggatcgcttgagcccaggaggtggacgttgcagtgagccaagatcacgccgctgcattccagcctggatgacagagtgagaacctgtctcaaaaagaactgaaggaaaaatataggtaatacaatagcttttgacaaacatgaagtagaaaatcagaactaaagatagccacatctaacttagaatctcaatagattttctatatcacaatattgtgtggagaaattgagagacagaattactgggaaacccaccagaaggctaggtctctctttactgtcagctgcggatatttttctggtttatctaaatgaagaagaggtgaggtatggatggctgtcatggaagatgttgagggaagaacatttagttgactggtgataaaatcccactaaatgaagcagcgtcttcataaattggaagggtcttttgtgtttcaaaaagcttttgtgaaacagcttttcagggagcattttcttaaactgatgagtcttttcactagcctgataacaaccatgagatttaggttactggttttcttttttttttttttagacagagtctcactctgtcacccaggctggagtgcagtggcgccatctcggctcactgcaagctccgcctcctgggttcacaccattctcccgcctcagcctcccgagtagctgggactacaggcacctgccaccatgcccggctaatttttttgtatttttagtagaaacggggtttcaccgtgttagccaggatggtctcgatctcctgacctcgtgatccgcccacctcggcctcccaaagtgctgattgcaggcatgagccaccgcgcccggccactggtttataattgaaaattatccagatcacttgaggtcaggggtctaagaccagcctgatcaacatgatgaaacccccgctctactaaaaataaaaaattagccaggcgtggtgcgaggtgcctatactcccagctacttgggaggctgaggcaggagaattgcttgaacccaggaggctgcagtgagccaagagtgtgccactactctccagcctaggtgacaaagctagactttgtcttagaaaaaaaacaataaataagaagaaaattatcatgtggtaaataaaccaaagtagaaaactagacattatgctgccacagtccaatgatgagcatatgggggtgtttggcaactctgaatccaaatattcataattgtcacctaaatatatttaagtaaggaggtctggcacattttctgttttaaaccatgcatgtaagtataatatataaaatttattccgtctctcatttcatggtattaagtgaattttttttcagcagaataaagttaggaagaatagaaataatttgagtgcttactatgcaccaggtactttttttttttttttttttttttttttgagacagtctccctctgtcgcccaggctggagtgcagtggcgcaatctcactcactgcaacgtctgcctcctgggttcaagcgattctcctgcctcggcctcccaagtagctgggattacaggcatgtgccatgatgcctggctactttttgtatgtttagtagagatgggatttcaccatgttggcgaggctcgtctccaactcctgacctcaagtgatccacccacctcggcctcccaaagtgctgggattatatgcatgagccactgcgcctggccttactccaggtacttctatgtgtgttttagcttaatgttcccaacaagtctacgaagtaggtgggtattgaccttgttacagaggaattaaacaattgagactaaagcaggttaagtagcttgcccaagcccacatattcaggagctgaggttctagtgtgtgtgtgtggtttttttttttcttttgagacagagtctcactgtcgcccaggctggaatgcaatcgtgctatcttggctcactgcagcctccacttcctgtgtttaagtgattctcccacctcagcctcccaagtagctgagattacaggcatctgccatcatgcctggctcatttttgtatttttgtagagacagagtttcaccatattggccaggctggtttgaactcttgacctcagttgatctgcctgcctcagcctctcaaagttctgggattacaggcgcaagccaccacgtctagcttcaggagctaagatttggaccaaggtcttctgttactcaagaggccaggctggtccagccaaggcctgctgctccgagtaatagcttagtcaagaaggagcttgcaaaatcttttcctgtggacaaaaaaaaatttttttaatttgaacatggcaatacataagaatggttggaaaacattttttatgttttttgacttagtaatttcatttctaggaatttattttaagggaataatcatggagacacataaagctgtgcatgcaggtgaggtttataataggaaaaggttagggacagcctctgtgcccacctgggaggctggtcagtaggtgatgctgtatctgtacaatgaaatgctattcaggccgagcgcggtggctcacacctataatcccagcactttgggagtctgaggcagatggatcgcttgagcccagtagttggagactagcttggacaacatggcgaaaccccgtctctacaaaaacacaaaaattagccgggcatggtggcacacacctgtggtcccagctacttgggaggctgaggtgggaggattgcttgagctcaggaggtcaaggctgcggtaaaccaacgctgcaccactgcactgcagcctgggcgagagaggagaccctgtctcaaaaaaaaaaaaaaaaaaaaaacaactattcagatagtttaaattacatgatagaagaatattgctaggaatatatatgtattatgcacatacatagcaggactccacttttattgtatttgtttatatatttttgagacagggtcgcactcgcccaggctggagtatagtggcacagtcacagctcactgcagcctcaacctcctgggctcaagtgatcctcccatctcagcctcccaagtagctgggactacagggatgcaccaccacacctggctaatttttgtgttttttgtattgacagggttttgccatgttgtccaggctggtctccaactcctgggctcaagcaatctgtgtgccttggcctcccaaagtgctgggattacaggtgtgagccaccaagccctgccaggactccatttttctaagaaaacgcatcatttttgtgtatatttaccaaaggaggactgggtgtttatactaaaatggtataatttgaatcagattacaagaaatgcttcctttcccttcctttttgttttttttttttttttttgagacggagtctcgctctgttgcccaggctggagtgcaggggtgcgatctcggctcactgcaagctccgcttcccgggttcacgcctggccctttcccttccttaaacaaatccatggttgttatttttatttttgtaatttaaaaccctgatttttgaagagaagtaaactgaaagggccaagcgtggtggctcacgcctgtaatcccagcacttttggaggccgagtcaggcggatcacgaggtcaggagttccaggccagcctggccaacatggtgaaactccggctctcctgaaaatgcaaaaattagccagttttaatggggcgcgcctgtaatcccagctactcgggaggctgaggcaggagaacagcttgaacccgggaggtggaggttgcaatgaaccgagatcgcgccactgtactccagcctggggacaaagcaagactctgtctcgaaagaaaaaaaaaaagtaaactggagccagcagattgcctaagtgtaagacaagcacgtgcctgggggcttgaggtgcgcgggacctctggctcctcacatgagtttcaccgagcactgtggcttcaggtgcggccgcgggcactgccgagctgctgccatccccgagtggatccctcaactggaccatgggcctgcccaccgacaatggccacgacagcgaccaggtgtttgagttcaacggcacccaggcagtgaggatcccggatggcgtcgtgtcggtcagccccaaagagccgttcaccatctcggtgtggatgagacatgggccattcggcaggaagaaggagacaattctttgcagttctgataaaacaggtagggtaatagctctgcaagcgatgccaggccccagtgtccagtagggtgggtgccagcggcaggctccctctcctttcccagggtcccctgccagcctggtgctcgtaggccatgtgccatgctgtgtgcctggggcacttggttccctagagccacggcctgggcatttgggtattagctgttgttgctcagtggggtccacggtgatcacaggctccgcctctcaggaaagcccaagtgtatttgtttctaagccctgccttggcttagccgaagagttcatttatgcagatgaaattgtgtcttcaaaatccattcaagaaacagctttaatttctcctttggatctttagttggcaatttacccatagaaactgcctttgcagatatgaatcggcaccactactccctctatgtccacgggtgccggctgatcttcctcttccgtcaggatccttctgaggagaagaaatacagacctgcagagttccactggaagttgaatcaggtgagtgaattgaaaacgcactaatagggccgggcaaggtgctcacacctataatcccagcactttgggaggctggggcacgaggattgcttgagcccaggggttcgagaccagcctgggcaacattactaagatcctgtccctacaaaaaaaaaaaaacccacgaaaattagctgggcatggtggcacatgcctgtagtcctggctacttggggagctgaggtgggatgattgatggagcccaggaggtcaaggctgtaatgagctgcgattgtgccacttcactccagcctggatgacagagtgagaccccgtctccaaagaaaaagaaaaacactgtcatcttctaagagagagtaagcaggtactgcaaccttgcacatggatggctgtgtatagtcagtgtatat

SEQ ID NO: 4432 - DNA, 6000 bp, Homo sapiens
aaaaattagctgggcatggtggcgtgcatctgtggttccagttactcaggaggctgaggtgggaggatcgcttgagcctaggaggtggaggttgcagagagccaagattgtgccagtgcactccagcctgggtgacagtaagaccctgtctccaaaaaaaacaaaaacaaaaacgagtcagcacacctacagcccatgggccgaatctagctgtgaggctgtttttgtaaatgaagtttcttggcgttgcagctggctccatttgtttccatgtctgtggcttttttttttttttttttttttttgagacagggtctcactctgtcacccaggctggagtgcagtggcgcaatctcggctcactgcaacctctgccttcctggttcaagtgattctcctgcctcagcctcctgagtagctgggattacagtcatgtgccaccgcacctcggctaatttttgtatttttagtagagatggggtttcaccatgttggccaggctggtctcaaactcctaacctcaggtgatccacctgcctgggccttccaaagtgctgggattacaggtgtcagtcatcgcacccggccatgtggctgctttcatgctgcaatagcagaattgagtcattgcagcggtgaccattagcccacaaatcccaatgtgctcactctctggccatccacagaaaaggtttgccagcacctgcttcctaaggttcactgaagttgctttgccaggaggggaatggaattgaatcagcctgagtcagaagactgattagaaagctgttgtgaggttgtccaggcaagagacagggtagagcaatgggaagggggagcggagcagtggtcagtgtttgatctgagagaaagagaagaattgaagaagcgttctgggtttggggcctgggatgatggatggtggtaccattgactatgatgggaaaagttgtgtgtatgtgtgtgtgtgtgcatgcacacacacgatgtggctctgtttataccatgttaagtttgagatgcatcttggctgtccagctggcacagttgaatatacacatcagggaagaggctggagcagaaggtgtaaatgtgagagccatcagtgcgtagaaggtattttaagccatagggctaaacgagtgcacatcaagaagagggctcccctaggctgagcccaggcccagatccccagaaactagtccttgccccaacacgggggagctccctgagacctccataccagtcccctccttcaccacctgccatgggaacccctgagctttggttttctctcctcccaggcttaccagaactgggtgaagaagaacggggctgagcactcgctccccaccctgggcctcaccaataaccagctcttcttcctgggctttgcacaggtgagtccattaggaaaacatgccacacatggtacattctgccatcttgatgtttcaagagcccagagagccgaaaggcaagttccccacagattgagaacttcccaagtcactggactgtgcacagcacatgtgccctgtcattagagagatgcacggaagggcccaaagtaccagtgaagggattcctggatctggtgaatgagaagacgaggtgatcacccagggcccttctggttctagggttctagaggtttcttaaacttaagatgaccagccaggcacagcagcccacgcctataatcccagcactttgggcggccgaggcaagtggatcacctgaggtcaggagtttgagaccagcctagtccacatagtgaaaccctgtctctatgaaaaaatacaaaaaaaaagtcaggcatggtggtggctgcctgtagtcccagcttcttgggaggctgaggcatgagaatcacttgaacctgggaggcagaggttgcagtgaaccaagatcacgccactgcactccagcccgggcaacatagcaagattctgtcttgctgtgatcatcccagatcatcccttcagtcggcattcatctggtagccttctgctggcactcagagctaccaggccattagacaatttgttctgcccaggaaatgagagatctggactaaatccaagcttttccaactggtgtttggacacagtcctttgttcagatggaatcgaatgcagttgcctcagagatgctgcgctggctgaaggagaacagtttggagacaactgcgttagaggctgctggcatggggggtggcacaccagccctacaccagcccactgtctcttcctgacccgctcaggggaccctcctgactccccgggatctcaggatcaggtggggggcttatctccctggtgttgtattttctgggttttgtttttttggagccggagtctccctcagtcacccggcctggagtgcaatggtgtgatcttggctcactgcaacctcaacctcccgggttcaagtgattctcctgcctcatcctctcatgtagctgggatataggcacgcaccaccacgcccatctaatttttgtatttttagtagagacagggtttcaccatgtttgtcaggccggtctcgaactcctggcctcaagtgatccaccgccaccttggcctcttaaagtgctgggattacaggtatgagccaccacacccaaccttgttttgctttttgagacaggatctcactctatcaccgaggctggaatgcagtggcacaatcacagctcactgcagccttgacttctccagctccagtgatcctcccacctcagcctccccaggagctgggaccataggtgtacaccaccatccctggttaattttttttttaattttttgtagagatggggtcttgccatgttgcccaagctggtcatgaactcctgggctcaagcagcccttccaccttggctcccaaagtgctgggattacaggtgtgagccaccgcacctggcctcccctgctgttataatgggggcagtctggcagcccgagggccccacagtgaccctggcctctccctgttgccccttcaaaggtctggtgctccgtccgcacacctgagagctcccacgaaggcctcatcaccgatccccacagcccctctcgcttccgggtcatcggctccctctccaattccaaggagttctcagaacacttccgctgcccacctggctcacccatgaacccgcctcacaagtgcgaagtctggtaaggacgaagcggagagagccaagacggaggaggggaaggggctgaggacgagacccccatccagcctccagggcattgctcagcccgcttggccacccggggccctgcttcctcacactggcgggttttcagccggaaccgagcccatggtgttggctctcaacgtgacccgcagtctgatcccctgtgaagagccggacatcccaggcacacgtgtgcgccaccttcagcaggcattcgggtgctgggctggtggctcatcaggcctgggccccacactgacaagcgccagatacgccacaaataccactgtgtcaaatgctttcaagatatatttttggggaaactattttttaaacactgtggaatacactggaaatcttcagggaaaaacacatttaaacacttttttttttaaggaaagaattggtatatttattatgttctgtttttctaaataacctgtggacaagggaagccccactgatttactccctctcttccccactccctgtgaggctgggctgaggcacggatccctgggccacagagcaagtctccaaatcagacagctgcctcagcccctgggatgtgtgatttcagctcctgtcacctcatgcaagggcgtggagaccagtagaggtgtggaggccaggcagagagaggagcctgctctgcggggggcccagctcatgggcactgccccttcagctagcctgcctccgtcccctgagtccaacagtgggagccctagctgggaagttctgatccccaaagccacagcaggggactgatggctatagcagaatgaggtcgggtcaggaccctcaaacaccatctgggaacaccaagcaccctgaatcgagactgcaggagccctgcggggtgagactgtgtcagagatacactgctggccacaagtgtcccctctcagtcccaccttttcgggctgtcccatgtctatctcaggggcccgttacctctctgcagcagtcccccatcccagccacaccagggtctgtccggccaaccctcttccccagggaaaggagaaaagagaaaacaggctgggcccggtggctcactcctgtaatcccagcactttgggaggttgaggtgggcggatcacctgaggtcaggagtttgagaccagcctggccaacgtggtgaaaccccatctctactaaaaaaaattacaaaaattagccgggagtggtggtgggcacctgtaatcccagttactcgggaggctgaggcaagagaatctcttgagctcaggaggcagaggttgcagtgagctgagattgcgccactgcactccagcctgggtgacagagggagactccgtcccaaaaaaaagaaaagagaaacagctgtcacctcccgcaggacccaaatcctctctctgagcaccgtcatccaccacatggctgggcctggctcccaggaccagtccagtcctctagtgccttatctgaggctgcagccgccagtctccaccccaaggagacagcccctgctcctagatgcccttggcctccgcagtgcagcccccaggtgtcctgactgaagcacaggccatagccccatttccccggtgcctgcagggctaacctccacgggagcccaggagctctggccggcaggtccatggcacagggcatcggaagactgcaaaactgctggacttaccctgggctgcagtccattgtcggcccctgggttgaatcaagatagtacttgcagctagatggatgcttttagccaggggacattgtgaggggaagattcctccacccagtctggcctgtggtgtctgtctcctccctgagaccacagcttctccagtagcagactcatgggcgccaccaagtggaagcacctggagcggcctctgccatccagtggggaagccaggccccgagacggaggtgggggcagcacgtgccctccacagccaccgctttcccgcctcagcagcccaggcctcctggcccagccctgcctggacagtgctctcccctcacccgggaagctggaatcctcctgcccgagaggaagcagacggcacagggacacccctgccaccttgggatctgcctccaagctggtgcagggtatcgagagtggattccagatggaggtcctggtcccagcacgcagcagtcctggtagctctgcagaggagacaggaacccgagaagtagctgaagcagaagccagccgcagtccccttgccacatagaggcgggcttctcccagccatggtgtcccctctgcctcccctcccccgaccctcctgccttccgcgtggagggtggtggtcctgtagtgtcagcaccagcaccatgggcttggaccccctccctggacacaggcaggtgtcctagggctgggggtgcagcccgagggaatggagaccacactcatggctcaggtctgccggggccggcagggggttggggaagaagagggctcaggcccagcaggggtggaagcccctgccactgccactacccgctccagagctttaaggaaaatgaagtgagacccctccccttaggcctggggagccatagggctggcttctctgtgggtgcgtggacgtggggttgggagctgggaatctattttttgtattatgttttgagctactgtagttttggcgtggcactattgtaatggaaataaaatacttgtacggagggccatgtgtctgggtgtctgtcctcccaaggtgctgtgtgtcctttgaggccggcacagggctgtccaccctagcttctccagggctgggcgcatctgtccc

SEQ ID NO: 4433 - DNA, 6000 bp, Homo sapiens
gccttgacctcccaggctcaagcgattctcccacctcagcctcccaagtagctgggaccacaggcatggccaccatgcccagctaattttttatgttttgtagagacagggtctcgccatattgtcaaggctggtcttgaactcctaggttcaagtggtctcctgtcttggcctcccaaagtgttgggagtacaggcgtgagccaccatgcttagctggtatatttactattttggcttattatgctttcagtgctcaacgattagttttatttatattttggatccacaagggctattttgtaataggtgctcaataagtatttgtagaaagattgaatagaaatgttaacagggtaaaagtatacattgttttgcttttccagcacacttagaatgcagaaaattactattttgttttaaacaaaacattttggctaggaaaaaaactcaagatttatctcaacatttaacaccacttttatttgggtggtgagattagtttctttaatatttttgatatttttgcatttttcaagagaacatttaatagactattgtttcatgagacataacctgaaaaattatgtaacttttacctactcaaattagtttttttatttctttaggtccacaaggcgattacaatttccagtcccctaaccacagacctgactgcagagctgtctggtgggccaaagaatgtatcagtgcaacctgaaatatcagagggtcttgctactacgcccagcactcaacaagtaaaaagttctgagaaaacccagattgctgtcccccagccagtggctccctcctacagttatgctacccctaccccccaggcctctttccagagcacctcagcaccatacccaggtaaggacctttgctcttggagatagaaggaaaaagtagaacatttgatcaaagtattcccttttagaggaaagaaggaagggaggcataacttgaatactgtgtgttagagaaaaaataactctgtcattgcccctgcagtcatggactgggggctctagagcctttcctcagcaggcctccagcttatggaaatttacgaggctaattttcacagatccagattccactgtgacttaaaggcacatgattcaattaagtataatgttcaagtgatcaatcagagcctactgggaagaaagatttggatcagtgtatttgcttaccttctgaaagtctggttgtaggtctctcatttttatagcatctttattttaatttttatttatttttaaaacttttaatttttgtggatatatagtagttgtatacatttatggcatacatgagatactttgatgcagacatgcaatgtgtaataatcacatcatgtaaaatagagtatccatcccttcaagcctttatcctttgtgttacaaacaatccagttatattattttagttattttaaaatgtgcaattaaaatattattgactatagtcaccctgttgtgctatcaaatactaggtcttatttgttctttctagcttttttttttgtactcattaaccatccccccctccctcttacccccacactacccttcgcagcctctggtaaccatccatctatctaaccattactctctatctccatgagttcagttgttttgatttttagattccacaaataagtgagaacaagcagtgtttgtctgtgcctggcttattcacctaacataatgacctccagttccatccatgttgttggaaatgacaaaatttcattcttttttatggctgagtagtactccattgtatataagcaccacattttctttattcattcatctgttgatggacacttaggttgcttccaaagtttggctgttgtgaacagtgctgcaaacatgggagtgcagatacctcttcgatacactgatttcctttcttttgggtatagacccagcagtgggattattgagtcacatggtaactctatttttatttttttgaggaacctccaaactgttctccatagtggttgtactaatttacattcccaccaatagtgtacgagggttccccttttctccacatcctcaccagcatttgttattgcctgtcttttgtataaaaaccattttaactggggtgagatgatatctcactgtaggttttttttttttttttttttttgagacagagtctcactctgttgcccaggctggagtgcagtggcgcaatctcggctcactgcaagctgcgcctcctgggttcatgccattctcctgcctcagcctcccgagtagctgggactacaggcgcccaccaccacgcccagctaattttttgtatttttagtagagatgcggtttcaccgtgttagccaggatggtctcgatctcctgaccttgtgatccgtccgccttggcctcccaaagtgctgggattacaggcgtgagccaccgcgcccggccatctcattgtagtttttatttgcatttctctgatgatcagtgatgtcgagaaccttttcatatgcctgtttgccatttgtaggtcttcttttgagaaatccctgttcaaatattttgcccatttttaaatgggattattaaattttttcctgtggagttgtttgaactctttatatattctggttattaatcccttgtcaaatggggagtttgcagatattttctcccattctgtgggttgtctcttcactttgttgattgtttcctttgctgtgcagtagctttttaatttgatgttatcccgtttgtccattttcgctttggttgcctgtccttgtggggtattactcaagaattttttttttgctcagaccagtgtcctggagaagcatctttatttttaaagccattcataagaagtagatttatacatagtgtataaataaatctgtgcttcacaggtgctgttctaaggtattaggaagaattggttaatcaagaaactaagttggtctttatcccctgaaaaagtcaagagggtaaaagcaaagtcagtgataatgaatttttgccaatttttaatttttcagggtgtcctttggtagtaatagaacatgaaattttaggggttcaatcatgaggcaccaaagtaatttttgtatccagtcaagatgcctgtaatttttggtgtaattgtgaagggtttgggttgaactgttttgaatagccattttttggttcattatactttctctgagtatcatgtttctttcttttctttttttgaaagtcacttcagagagttcttattccatctcctggggcatccaaatgctgaagcttccattaaggatggtttcatttctcctcaagtgcaatgttcccatgcagaggcggataaatctcaagtttcatatttgtctaggaagcccttctcgcctcccaggcttgaaatatgagtggactagcctattgtttgctttaagctctcctagttttgaagtctcatagcaaatgaacatttattgtcagagaaataagatttatataatcggtggctttcagtggtctgcaaacatttttagttgggggaggggagtgatgctactgacgtctggtgagtatgggtcagtgatactgttaaacaccttacagtgctcaggacatttccctccatgacaaagaattacctggtccaaaatatcaggagtgctgagcttgagaaactctgacatatgtgaaatagctggtgaatagtataaagacagtatatagctctttgctgacttgagtgttccaaaaatgctagcatacttcaagattagatcagtttgaactgaaatggtctgggaagatttcttggagaggagacagactttaagctagaaacaaaatgctgtatttagaataaagcaaggcaaacaccgcagttgaaagaaataactttagcaaagtccctgagagtagaccgtggctttgtggaacacaagagggaaaatcaatgtaactagaggcaaaattagataggaaggataagacagtgagatcagatgatggttctctaatggcaggttggaagtttgtccttaaatatgatatgggagcaggagtcttaaatagaagagtaacatagtgggtgagtattttggaaagactaatggtgttggttgttttaggaagacagaatagattggagtagagagagctagcagagggaagataaaataagattcttgggataagcaagctgggcgtggtggtgcatgcctgtagtcccagctacttgggaggttgaggtgggaagatcgcttgagcccaggaatttgaggctgcagtgagctatgattacacaactgcactctatcctgagcaacagagtgaggccctgactcaaaaagaaaaaaaaaattcttggaataatctagtgtgaacaatgaatcttgtagcaattggaatggaaagaaagtaaggcagatttgtaaccatttgccttcccttctagaaactttatatatgtatcttattagaaagttatttgttagcataaaggtgatacttgaaacaggatttgaactctgtggaatgtagtatatagggagggcttagggacagactgtagtaaaaatacagtggaggaaaagagagaaaggaggaaaaatagaataatatggtgtcatgatatccaagagttttaagatggaggcagttagcaatagtagaagccactgagatgtgagatgaagaatgagggtattagggtacagctgttagatttactaagaagtagttttgaaagatccttttcaatggaaaagtggggacagaatcaaatttcaagcaattagagagtagaaaaaagttagtaattgatggcagtagctgaatattgatcatgaaaggagtttgatcacaaaagaaagagagaaataagacagtctggatctatttcttatctctggtatatttactttgtttccagttataaaggaactggtggtatctgctggagagagtgtccagataaccctgcctaagaatgaagttcaattaaatgcatatgttctccaagaaccacctaaaggtaaacatccccttacatttggataaccgttttttgtttttgaaagagatggagtcttgctgtgttgtccaggctggtctcaaactcctgggctcaggagatcctcccaccttagtcttcctagtagctggaactactggcatacactaccactcctggcccttatctttttccctcctctgacttcctgtcaggaaaaaatgtattttttttaagttacaaatttatattagcagtcatcttgaataacttctttctaagttctacatctgctatttactggttgtttgaccaaaataaacagattaatctgagtctcagtttctttctcttaaaatggatttaaatacaacctaataaatatgttctatattaataagcatcagctatatgctaggcactaaactggtaacttatctactatctcattttgcccttaaagtaatcttatgaggtaggaattattatccccattttattgagaaagaaatggaaattaagagaagtcatttacttagattcacacagataatgagtggctcagctgagatttgaacccaagcgtgacatcaaagcctgtgatctcaaaccctacattatatagtacctctcatattccataaatatttgtgcatacccgggttatatcctatcctcacaggaccgttgtaaggaccatcgtttcccatagtgagaaccctgtccctgggggaaaaaaaagctaagcctaatgtgatatacaaaattcaagtttataaaatatataaagtatggatgattaattcattatttaagaaaacttttgtaatatgaacattactttcacctttgaagtatgtgttaatataccaaagtttgacttacaaacacatatgggttctcttaacactatttaggacttgagtggtacatactttgatggaaattgagccagttgggtttatgttatcattaaaaggttagt

SEQ ID NO: 4434 - DNA, 6000 bp, Homo sapiens
tttggcaagttatacaatgtggccagggccatctggcatccgagcgttgggggagaggtcctgaatcttaacacctcatccatggcttcctgggagagggagggctcttgtgggtcgtgagacccccagcggtgggatagggagggtgaggggtggggacatgagaaatgcttctctgtgctggaccctgagcccagttgctggccaagctgggaggccatgactctcctaggagagtcaggatttgaactcagtctgcctgacttcagaggtccttccttgacagccctgtgggcttggagtggagggttttgtggggtgctgtatttacctctcagagctctgatgttccagcactcgtcaggggtttgataaatggctaaggatgaacactggtctggcacaacagatactcacagagccagctttgcccaaaagccaaattgaaaagtggcaggtttctttgtttggcaattagcatgtgctgttccctactctcgtcactctggctgcagacacggtatgacccaggttccattccttttttttatctcactctgttgccgaggctggagtgaagtggcatgatcttggctcactgcaacttctgcctcccaggctcaggtgatacagatgtgtgccaccatatccagctgtttttttttttttttttttttttttgtgtgtgtgtgtgtgtaattttagtagagacctggtttcaccatattgcccaggcaggtcttgaactcctgagctcaaatgatccgcccaccttggcctcccaaagttctgggatcaccgcgtcctgcccctggttctattcttaaggagttcccaaactgagtggcagatgggtaataagctagagactgcagaggacatagcaagagcaaaggcctggaagagaatggaatgttctagaaagtagtctcatccccagggagtgctgatgggctgctggggatcccagactctgggctgtacattgctccccaccagtaaaaaaggctcccacaagaaaatcacaagctctatggggctagtacccttctctaagtcatcaccaactgttcatcagcttgacaccagaataaataaatacacgttgagtgaatggacttcattgccatgttccagttctagccactggctggtgggggcagatggtgctgaggctgcccgatcgagggtagcttgctattcttcaccgatccagcaaacacttgtggagggaattctgccaggcttcatgatggatactgatagaaaacgtaacagcaaccctttaaggaaggaactttcatccccgttttctaggtgaggaaaccaaggcccagagcagggctgccttgtatccaactccaaggtgaaaggaggcagcttgctgcatttaaacgtgggtctgcttccaagcccagcaatgatcaagccggctatagtgggcgcagcagagtggcagcatgaatctgagattggtcgcagtgtcttgtgcctactgaggagcaggggccatgtccctccccctacacctagcactgagccacactgagcacgctgtttcttaatctgactggtccccatttcttctccttgcacatactgttctgtccacctggaatgtagccttgccactgctttcccacttggcagactctctgtgtgtccttcacagcccagctccaatgtcacctcctgggaactcatctttttttgtacccaggcaaaactggaaatctttccctccagggttctcacagtgcctcataccagccccctgttgaagcccagaccacactagcctctcatcttcatctgcctccccactgcccccaccccactgtactggaaactccttccttggtgtcaggactgggtccagtttcatccggggccccagctctacttagcatgagacctagagcatgggtcactggtattttagtcagtcctagtgcagcagctgcctgggtggatgtggatatgacccagggagtgggtaggcaggttttctaaagtcgagtttgacctcgacctgctgatgacaaggtccagcggaggggtatgtccttggcctccagcagcccccattgacagaggctacagtcgagcagctgctcagtggggccccagggatgacttcagaggctccagacccctggaacatcagatgcagacctcagtaaaacagggcctgtgataatagcacttacctcacatagccagtgtcattcactcatgctctaccaacataatttttgccagatccatggatcatttgtattattttccacttaatgtttttatttaaattgctttgttctaagtaatatgaaatcacagggcttgtaaaaattattttgaataggtgattccattcacaccattcagaattcaaaaaagtgccaaaggctataaaatgaaatctccctttcaccctgtccccagtcacccaggcccccccggggttagaatgttacctttcttgtacattcttgttttttgttttttgtttttttttttttttgagacagagtctgctctgtcgcccaggctggagtgcagtggcgccatctcggctcacttcatctcccagataaagtgattcttgtccctcagcctcccaagtagttgggactacaggcacgcaccaccatgcccagctaatttttgtatttttagtagagacagggttttgccatgttggccaggctggtctcgaactcctggcctcaagctgagattatagatgtgagccaccgtgcctagcctcttgtgcattcttttaaatagatgtgtatattctccccctacccccagccaatttttttttttaacccaaaaggtagcatacaatatacacactgctctgtttttggtttcgcttttgttttttgggacagagtctcactctgtcacccaggctggagtgccatggggtgatcacagctcactgcggcctcgaactcccaggttatgtattccattatatcactatgccacgttttcttaaatgatagattgatgtcactgcattgcttgttttttaatctattctaatgtgttccagaaaaatacagtatatactttgcatcccatgagcaaatgcaggtaataccgcaggcagaaagcccagcacgtggcgggcctagcagtcgctgtttagtgagccctcctggtgatgcttagtgccttgccacagcctctgaattagtgtccaccctatgaattaggcttgacctggtgtgtcgctggggtcccccagaaatttgtcagctgctcactacccactcggaacaacagctctgggcctgaaggctccccagagaattgagagaagggagattctgggggcagtgccaggacatacggggggtgggggctgtctttctagttgggcaatgcagaggatttagagggaatggagtccctgtggtatgagggaagccccagcatgtggaataaatgtccagaggcaggctaaggggtcaggtagacagactaatgggaaggaaggatgcagcgcacacacagagggggctctgagctgcacactcctcctgggccgaagccttcttcctctttcgcagcctctgatgtgagagccttggcttttgcagtcgttgccctgactgacgctttcagagaatgaaaagaccatactgggaatatgcctggtaacagctatgcccagggctatctgtgatgatcttgaagtaaaggctgcttctgggttctgtggaaaccaaggcccagagacccacagccaggccatggccagctccacccacttccagggcccagcttggtatagtgtgcgtagtgaatgccagtcgtttctttggcatgcctcccgcagccctgttctcccacaatcagttaaaggcctgcctaatgtcacatttcctgacttcctcatttttatagctgaaaagagcacttttcttcagcagggctgacaccctgctggcctctcagtcacctgtggctaagcagggctcttcacctgctggcctctgcccttcctgctgccttaggtcctcggcttccaatggacagaagcaaactgctctttttctctcccatccctttgcccattggaaacaccttagccccacactcttactcaccttgtgcacttttccaaagtgcattcccgcctagcatgtcgtctatgtccatataaccttgggaggcttatggtttggggattattgccgtgaggagcactgggtaaggagtccggagccctgagctctgctgcaggctcctgagtgatctggaacttgcctcaccctctcagggctcagtttcctgccctgtgaacagcaggaagggtagggcaaggtgggatcacatctccaatgtgacaaacgaagctgttgccattttgctgacaagcaaatggaggataggggagaggtggtacatgggggacttagcctgctggaattcacagagcaaacaggcagatgggctggaatcagaagccagcggcttcagctccaaatccagggtgcttctcctatctatatctgtgctattcctaccaagtaatttgggccccctcgcataggagggctggttcctgggcctcccagtcagagagtctagaaccaccagaccctaggcatggctccaccagggaaatgagacccccaagaatccaaagcctctccctctctgagacctggctacagagagagaagatcatacttcccctctctccccaggaaatggcccggccagcccagtatcttgaagtcagctaggctggtttgggcacctaaggtcaggaattggccaagtttcctgggagaaagactggtgtggtgccaagagtcaggcaagatatctgaacacagaaacttgccagtccaggccctgccctgtagtaacctgctcccagacacgcctataacagtgtggtttgtttctccgcagaagctgacgggtcgcctcatgctggccgtgggaggagcagtgcttggctccctgcagtttggctacaacactggagtcatcaatgccccccagaaggtgagtactgtgccatcgttggcttatggacaccagcctgctctgttgcacatcacacatgcccacagtctcacgccaccacctgaattagagtcatttatatgaacgcactgtactgtctgcctctccagccagttttctggccctgatcatgtcagagactcttctcttgctttggaatcagggtggcagaattctagaatctcaggtcccacagaatcctggggtcttgtataggccctcttgaccaaccccccacccaactcagtcatttaataatatgtttgatgatataataaactcaaagcaaagctcaatacaataatgctgcatttccgtggcattctggggctgcagagggttttcatgggcttgtctcacttgatgctcactgcagcactgtcaggaggcagcaggcaccactcccagcctgcaggtgtgggaaacggccagagagaggaaacccgcccaatatcacccagctaagtcagagacagagctggtatccaacacctgcctgccaggtggtccttgagcctgcactcatacccatccacaggcagcacacttcctttatttgtaggttgaaaccgcgtcctctccctgaaggccctgtggcagtcaaagcagaaatggcgtcttgccctagggagccacagggggtgaaggtctgtgctggcttcctcctccctgccgtgcatcctagatctgtcctcacttgtttacttgaatgtcaggatgggaagggacctagaccatctcctccagcccagcctacttgcattaaggaggagagaagaggaaaagggggtagggggtaggaggcagggacaggaaaggaaactgagcccttcctctgtaccaggcattttgcttgtgtttatgagattgggtggtgatttccattttgtagacccggaaactgaggcccaggcagatgaaatggccgacaggcccaaggtc

SEQ ID NO: 4435 - DNA, 6000 bp, Homo sapiens; identical to SEQ ID NO: 1518

SEQ ID NO: 4436 - DNA, 6000 bp, Homo sapiens
caaagctagcacaacggagctcagatgcaggctaggactcggtccatgcctcaggaaccagggaaagccatcctcacactccctggatccagggaacccacgcccagggccccccagcttgttccctcagtgcccagctcttggctatttctttcacttcattccatcgcccagacaccattaccacatacacattccatccatacccccaggtctcagcctgccctaccttcccaggctccagtccctgttcctcagcatcccccaccacatcctgagtaagctttgtccccagataacctcttcagcatgatccttaaatctccctaagcctcagtttctcccctgtggaatgggggtaagaatctctttctctgaatgcccctgtgttaggaaataatttagaatacttcggaaacaaaaagctctgttcacacctaagcaatcagggcagtggccctggccttgccaggaacttaggcttttatctggatcctctttccaggcctctcaattaattccccaggtccttaacctttgggaaattagaaattaggaagagtgtcccacttctgacactgtgttccctcttggaacctgaccgtcaatgctagaagaacccttggaaaacatgctggcccagccctctagttttacaaataagggagtgcacagccctgagaggttacatggcctgcccaagatcacgcagtcaatggcagagtaaagagcatagcctaggcctccccactcctctagtaatgctctttcatcttctccaacctggctctaagccttgtccatcctgagccccatatctagcccaacctagtccctgaaaacaagaagtggcccttagaaatctctctccagtcccactatcagaggccaactgctgtcttccagtctccttcagcctgtgctcctctccctccctgactgacaggcagaaggtaccgtgcctctggatatccccacagtgccctgagctgcatctcttgccgactgctttaatacatcacagtgacattgtgtgtgtctctgccaccagactattgctccttgatgctctgggtcacctgcatctagcatggcatatatctagtgctcaataaatgtgtattgtacggaattgactgaacttctctcactggcagccccctctatccaaatcacccacctctttttgaaggtgggtgatgatcttgtgtggtactgaggtgacctctccatgactggtccaaagggcaggcagggttcctgatactgagagaaaagtataccaaccaggaccttagctgcctatccatacgtagttgcaacacattcctgcctatctcctgcttctcctcttgtacacacccttcctcacccccaagggatactgggtacctgaagggctctgccaggggttgctgatcttgtgctatatggtgcacaagaaacttttaagaaaaaagaaactttcaagacacactttccaaccacgaattctatctctgctccttttcatagcaataggttttctttttcttccctccacacttaaacatccattctcttatcacccacccccatcagactccttcccctgtgtttcttcagccactgctctgaccaaaatttgagtgaccaaaagtggtgtcagacccagtgaccatttctctgcctgcatttcacttgaccttgaagcagcaattaatctccataatcagcatcttcttgaatttttccctttgaggacattgctcttctactttgtgctctggttatcctttacaaacttttacacctctcctgaactggttaacagtagagggccccaagggtctcacgtaagccttctttgtttttgttttttttcttttcttttattttttatatatttttttgagacggagtcttgctctgttgcccgggctggagtgcagttgcacgatctcggctcactgcaagctctgcctcccaggttcatgctattctcctgcctcagcctcccgagtagctgggactacaggtgcctgccaccatgcctggctaattttctgtatttttaacagagacagggtatcaccatgttagccaggatggtctcgatctcctgacctcgtgatctgcccacctcagcctcccaaaatgctgggattacaggcgtgagccactgctcccagccgtcatttttattttattttatttatttttttgagatggagtcttgctcttttgccaggctggagtgcatggtgcgatctcggctcattgcaacccccgcctcccaggttcaagcgattctcctgcctcagcctcctgagtggctgggactacaggtgcctgtcaccatgcctggctaattttctgtatttttagttgagacaggttttcaccttgttagccaggatggtctcgatctgctgacctcgtgatctgcctgcgtcggcctcccaaagtgctgggattacaggcatgagccactgcacccggccatcaattttttttttttttaaatggagtcttgctctgtcacccaggttggagtgtaacagtgcaatcttggctcattgcaacctccgcctcttgggttcaagcgattctcctgcctcagcctcctgagtagctgggactacaggtgcatgccaccacacccggctagtttttgtatttttagtagagacggggtttcaccatgttgtccaggatggtctcaaactcctgacctcaaatgatgtgcctgccttgaccttccaaagtgctgggattagaggcgtgaaccacattgcccaccgtaagccctcttttctacttccactctttctgtaggtggccctactactaacgtccatggctttaagtaccatctttctatgtgttaatgcataagtccagccttgacctctcttgagcgccatccaactcagcatatctggttggatgtctaatgagtatttcaaattcaacatggccacaactgaactaactgaactcttttttttttttaggcagagttttgctcttgttgcccaggctggagtgcaatggcgagatcttggctcactgcaacctctgcctccagggttcaagcgattctcctgcctcagcctcccgagtagatgggattataggccccgctacccggctaatgtttttgtatttttagtagagacagggtgttgccatattgaccaggctggtctgcaaatcctgacctcaggtgatccccctgcctcggcctcccaaagtgctggaattacaggcgtgagtcactgcgcccggccacacaactgagctcttcattcccaccccagcaccggttatttttccactgttcccatctcaatggcacctccattacccatttgcacattccaaaagcccaggaaccatggtgacttcttttcccatatccaacacaaccaatcctatcttgaattcatccacgtcccaccacctccccagctacctagttccagccaccctctctccacaacctctgaatcaatctttcacttttcccagcaatccattctccactcagcaaaatgatgataaagcacgtcacatcaaggctctgcctcaatttaatggcttcccattgtatttagaatcatctccaagctctcagagactatggtcagctacaatctggcccaccttctgttccagccaaatttcctcacagcacaaggacgtttgcacctgctattttccaagcacgaaaccctcgggcagatatatctggtgctgtcacctaatttcaggttttaactccactctcaccatttcagtgaggacctaatccccatcgcagtcattctatcacatagctttattttattttattttatttttttttgagatacagtctggctctctcacccaggctggagtgcagtggtgtgatctgggctcactgcaaacttccatctcctgcgttcaagcgattctcctgcctcagcttcccgagtagctgggattacaggtgtctgccatcacgcctgactaagttttgtattttcagtagagacggggttttgccatgttagccaggctggtctcgaactccttgacctcaagtgatccacctgcctcagcctcccacaatgttggatttacaggcgtgagccactgctcccggccacatagccatgttttaagcatgtatcactatctaaaattattttttgtttatacgtttgtgtcgtcctgtagaatgtaaggtcacaagatcagggacttgctcattgcactgggtctaacacacagtgcttcctcaacaaacactcgttaagatactaacgtggcagagtggggccttgtaaacagtttcaggaccctgtgcttgtaagagcaacgtggtgccctcccaaggaagacagggaggatgcaggagcactgcccagagatggcgtcaggctgcaagacatcttgaataattcaccatcgtaacaacccagcctcaggaagagatggggcaaggccagaacgaaacattaggtaagaggcggtggacaatgggattcccacagggcagcttttgggcactggacgttccctaacctgaggctctctgaagaggaaggttaggaatcctctcagcttcggtgggctggactcactgtgggaattcaatcgcccccccccacccactaagggtgtgctggcgggaaagcgctgagacgcatgcgtagttctcgcgtctggcacccgctccctttccaatacgcttgcgccccgtctgtgctacggatggtcagggagagttgtccgtcttcaaatggaccaatgagacttgtggaggggctctgagtcccgcctctggatgagtgaccgtctcttttccaagtgaggccccgccccgcctccccagggctgcttttctcgcggcacgggtggtggggctgcttcttgacttccgcgcctagtgcgcagggccccattctccagtcccgcccacgcgcctttggaggctgcggtgggatttccttttgccttcggttggggctgctgtttctcttcgccgacggtaggcattataaatatttcgccctttgaattttagctctcccctcccggcgttcgcacttagcctttttcatcattatcattatttttaatggtaaggatggtcaaattttactaatgaagcgattataaaatcttcaagtctttgtatccacttgctttttgagggctggagtgggaagaaaggtatataattcattcattcttcggacatgtgacaaacgttcacggagcgcggcaacgagcgccggtgtcgcgatgcgcactggggctgcacatgggagccaggatggactggactggtccctgccctgcccgctgacgattggcaggccactgcctttgatgagctgggcgctataactgccattaagccatttgtacaattaatcacaacagtgataagagcgacaaaggagctattcgggtggctgaggcgggaggatcttttgagcctaggagttcgagaccagcctggggaatagagcgagatcctgtctcaaaaaaagggggagaaaaagtgacaaagaagttgtgagggctatgagtttgcgttagaggaggtgtgtgaggtggggaggcggcagggggcgcggttgttcttagagaaagtgacatccgggctaattttgaaagaataagtgttaactaggctaagcggtgggaaagagtagtgtgtgctgaaggaagggaagaggaacctggcaagttcatggcaggctgtaattggatgctggtctccctccacacttgactcctacagtctgatttctacacagcacccaaagtgatctcttaaaaatacacatgtgatcttgtcacttcccagcaccaaactctacagtgaatttccatcttagaacaaaattcagactccttaccatggccaccaagaccctacacaatctggcctcccaatttccttttccaaggtcaccttttaccactatccatctcactcacactgctccagcactctct

SEQ ID NO: 4437 - DNA, 6000 bp, Homo sapiens
tttcagtatggttaacttttattagctctcttttctctcccccactctcattctctctccctgcctctctttctcctttaccttttttcccttttttaaaacaatcattctcatcaaatgtgtatatttttgtatgtttggtatttatttaactactcattctatttgttcaataattacagggctattcttcttcgttgttgttgttgttgaagacagagtcttgctctgtctcccaggctggagtacagtggtacaatcttggctcactgcagcctcgcctcccaggttcaagagattctcctgcctccaccttccgagtagctgggattacaagggtgtgccaccacaccctgctaattttcatatttttagtagagacagggtttcactgtgttggccaggctggtcttgaaactcctgacctcaaatgatccacccacctcagcctcccaaattgctgggattacaggcatgagccaccgtgcccggcctcttcttttgtttttattctggagttacttttagtatgttacagctttgtaggggattacctatttcatttatgttttcaaatttattggcacaaagttgttcatagtattgccttattatttctgattctgtagaattgtctttataattttataatcagactatagtgtaatgtgtttaaaaatcaaagaaacaatacaattagcataataacataaactatgaagatggaatatgaccaaatacatctgcctggacacccagcgaaaagacataccttaaatatggtgacttggaacagctgaaaatcaaagaataagtgaaagcattaggcaagtgcaaacaaattaaagctactgttgtggcttaatattgaacacagatgtatttggggcaaaagccattaggattaaaaacattttataatgccaaagactaaaattcacaatgaaaatataagctatgaatatcaatgcattaagtcacgtagcaaaacttatatggaaaaaaagaaattttatttaaaaaatagaaacacagtagtggtagaaaatgtgactcacttttcttagttcatgacccatcaagtgatcaaaaattagataagcatatagaagaaataaataacataatgtaacttcaatatatactacagaatatatacacacatgcacaaacacatatacatatagaaaatgaaaaaaaccttttcaggtgcccatgggatatgaagaaacactgattatatattaggcaattaaaaaggagctcactttcatagttcttacaaactacaatagtagttcaatttctagtaatgacatgctaggtgtttacaaccaattttccccagtgagggcagctaaagaaaactgggtaaaatacaaagaaaggggctaggcgcagtggctcatgcctgtaatcccagcactttgggaggccgaggcaggtggatcacctgaggtcaggagtttgagaccagcctggccaacatggtgaaaccccatctctactaaaaatacaaaaattagctgggcgtagtggtgcatgcctgtgatcccagctactcgggaggctgaggcaggggaatcgcttgaacccaggaggcggaggttgcagtgagccaagatcgcaccactgcactccagcctgggcgacagagtaagactctgtctcaaaaaaaacaaaaacaaatacaaaacaataacaacaaaaataaatataaagaaaaaaaccaacaaaactttctttaaactcaaagttgttggttgctcaaaaccttcaaagtactgaaaattcagatcaaaatccagtagaaggaaagcacccagcactcataaccatttttattcaagaccatctgccaaacctgaaaaaagaaacagccaaactgagctgtttgtggtcttggagggcaaatgtatgaaaagtcaaaacccaggcccagtaaggctggaggtcacctgaaggcgctgatccgaggcagtgctcaccctgatgggtgtacagcagtatgtcctcaggaaatgtctcgtgccaaatcattctgagctgcgtggtgacagcagagtgccattgactttgcaagagctaatacgattgttagtagcagcagcaattaagggcagaaaaacaaacctagctgtaccttgtgcatataatcaattttaaaggagacagtacccctgtatttaaactctggctgccttttcattgtccagatttctttaaggttggtctgcctatgaatagaattacagtctatttttaactctgtcttggatttgctatatgaacagacccccaccaaacttctcactccggccagcagtatttcctcaccaaaaaataagacaacttttaccatagactgtgtgtactgacaaaggggaatttgaagcattatcaatatagaaaattacttttaaattatttaagttgttcagatgaaactgagagagaaggtgcttgacttagagagactggccatggggtggaaaggccaagtttgaagggaagaagccagctctgctctctgcattttgtattaacataaaagaggggtgcttctcagtaagtccgcttctctggagagtcctgttatacgactcttgttctgtagtgctcaggacagcattagccagcaatgcacagtgactttgtcaggcaagtgctaggaagaccatgcatgcagacgcatgcctaatgtgtaccaggattgcatgttcccactgagattggggagtgagctataagccctgtttcctctttgagctacagagctgatgttcatttgattggacagttaaggcagaaatccaattactgagctaattagcacctttgaggggtaagcaccaaatttacaggaggaaagcactggagaaaactcaaattacccagtgtggctgacagtccaccctcttagagaatgtgtggagagccagaggtcctgggggtacacaggcagcttaacttagttattgctcatcagaatttagactgtgttctataggcttctgaaaagatagctttccagtgaacatagttttagaaggtgttttagttccctaaggagtttagtaaatgattttcttttgtcttaatcctcctttaaaagttgtttattctgctgcttgaaaattccatttgtggtaggtcttaaggtgaaattaaaattccatttagggactaactatgcagacgtgggacttcagccttcattaaaaagaattttgttggttgctggattttctgctaccctgagatctttcatttttcaaagctgctatgagagtatttgtaaggaaaactaaagctgtaatagaacagcatacttgggttcacagcctttctgaaatgtaacacagtatttcttctctccaatccatccgtagcatcacagaactcaacaggatcttgcctagatggttcccaaatgtctaagacatacatgaaaagaaagaatactttttttttctgaagacaagccttttcatttattcaaattatagttccaaccaaatatctttttatctgtttttattcccaaaagacaagttcacaaaagaaggctgcattcttaggtttcttcttaagcaccatttctgacaagtgcttttcatttattaaattatacagaatatgtcaatgatcatgtttaaacataagccacatatgcagcattgactggcagctagtcttgtttcttcttagcaaatattataaggacaagaacttcagaagtagccttatctttgaccattcaataatttattctgcaaatatttattgagtgactactatgtgccagttgtgagcaacaaacttactctcatggtacttagggactgatgtaagagtcagatatcatcagataattacacaaagagatgtatgatgtggtgtaaagtaaaggctcctaagccagcctccctaggtcatattctggctgtgccacctgttagatctgtgaccttgagcactctatttaatttctctgtgcctctgcctcatccgccgtgagaatgggtataatgagtacctacctcagagggtagttttgaggcaataataagccaatacatataaagtacttagaacaggcacatgacacaagcaagtgctacataaatgttagctgccattgttatgattgatgttagccttgacaggtgctccaaaagagaggtacaggtacaacatgtgaaagagaacatgacaaaggaatctcaagcagcacaggagtcaaggcagcttccctgagaaggtgatacttgagctgagacttgaaggatgagaggagtcaatgaggaaaaatgagtgggaatggaaagggatccctaagtagagggaacatttgcaaaggatactggagaggaaggaatgacaggactaagaggtctgggcatgctgaaggggtggaaaaggaaaaccaacaggcttggagcaaagaaagcaaagggtggagtgatagaaaaggcaggagctggccaggcgctgtgactcacacctgtaatcccagcactttgggaggccaaggcaggtggatcatgaggtcgagagagcgagaccatcctggtcaacatggtaaaaccccgtctctactaagaatacaaaaattagctgggcatgtggcgcatgtctgtaatcccagctactgggaaggctgaggcaggacaatcgcttgaacccaggaggcggaggttgccatgagccgagattgcactgctgcactccatcctggtgacagagcgagactccatctcaaaaaaaaaaaaaaaaaaagaaaagaaaagaaaaagaaaaagcaggagccagatgtgttcaagaccaggctttctacaattgtcagtgggaccttcattatgcccaaatccttaagtaaaccctatgtgtgatgctgatatatttgtggaagccctttcttaatggcgaatatatcagatttaaccatatgaaattgccattttgtaggtgataataaacagttgactatcgtcaatttcataggcctgatgtcaatttcatatttcattctttaaagaccgccactcattgttggaaataaaaggacaaaggtaggctggcatagcctctccaagagagcagatcgctgcacttacaaagggttttggggatgtgtggagttcaaggactggtgaggttttggaggcatacatgggttgatggcatctgtataggtggttacttgaaaagcctgttattcatcagttgcccctcaagtctgcagtgagtcggctaactctcagaagccaggggttgtcatggactggctgccttacaaaagctgtgcactgaggggtgtttacatgatggaataggttcaaagctggttctagtggccacttgttaccatggctgcagatgatccgagagctttcattctcatggttcaacctaagaaaggtctataagagtataccccactcttgaaagcaggtggtggagacgttgactactcaccaccatttcctgaaatcaatttgaagagaaagatacctttgtggacactgttctcaagttctgaaagtgggtagcattacattggcagtttaaacacttgcttttttttttttgagtcttgctctgtcacccaggttggagtgcagtggtgcaatctcggctcactgcgacctcggcctcctggattcaagttcagcctcccaagtagctgagattataggagtgtgccaccacacatggctaatctttttgtatttttagtagagatggagtttcacactgtttgccagactggtaccaagctcctgacttcaaatgatctgcctgcctcagcctccctaagtgttgggattacaggcatgagccaccgtgctcagcctaaatacttgctttgattttgcagatctggtgctccaaattgattaagacacaagaccgttctctccaaatcagagagctactcatctctcccttccatgtgtttcttgtactgctccctctatctcttatcatgagact

SEQ ID NO: 4438 - DNA, 6000 bp, Homo sapiens
tgtcaactttaacacagctgacaaagttatgacaccaagaatgcttagactttgcagttttccccgaactccggctgatcctgttaaaatgtctctccttacagagagctgatttgtgcccccaaattttctcatctcagcaggcagggtctctttgccagaaaaaagaaaaatctgttgtcatccagatactctgatttagcattatctgagaggaaggcatgtttcctatctggtttgttgctgattttccagttggtttccgtgggacggagccatggagaaggatgcaggaggatagctggagacacttgcatttttaagctcctctcctccaatgcaaagccttaaaatgcgtgggattttccctcttgttaaggctgcagtcttcatgcctcttctcagttggagagtgataaagtttgaacaaatccctttatttatgttggaagtatctgagtgtgaaaatccttttctgcccttaaaattactcgatccgtttttttctcttttttaaatgatcagtttaatacatgcccattatagtgaaattagaaattacaaacaagaaccagaaggaaaagttgctgaagttccactaccgtgtatccctgcagatgcgttcccatacagatgaacagatataaatctgtattttgaaaaaaaggaagaaaggaaagagaagatatgtatttctgcatacacagaatcatttgataaatgccgtcttgtgacctgcagtttcacttttcagtattttgggatcttctgaagctgtcagatggtaaacacctgaagtgtcatagtcgatggctgtccagtattctatcacatggatggactgttgttatatagtctattatattgcatttactggacatttaggttatttctgattttgggccaatctaagcactggtgagatgagtgtcttaatttgggtcactaatctttacacatttgccttagtgttgtcttaggataagtttttagaacaggactagctaacattttcaagcatttaccacgtgccactctgctaagggctttaagtatattatcagtcaggcatggtggctcacgcctgtaataccaacactttaggaggccaaggcaggaggatcatttgaggccaggagacctggaaagtctacgacttagggagaccctgtctctacaagaaatttaaaaattggctgggtatggtggcacatgccagtagtcctaggtattcaagaggctaaggtggaaggatcacttgagcccaggagtttgaggctgcagtgaactatgattgcatcactgcactccagcctcggtgacagagcaagaccctatgtcagataaataaataaataaataatctattgaatcttacacatgattctatacagaaatatccacattttacagataaggaaactgagtcatggagaggttgggtaccttgtttggggtcacacagctggcaaactgcagagccagtattggaacccaagctctctgaccccagaagcttctgatgcaaaaggttaggtctgtttagccttgctgcatggtataaggatgcctgtcccttgcttcctctcttccagctctttaccctgtggtctcctggagtcctctcacacccacacttgcataacaggaacagggaaggaagaatcggcagtgtttgtgccatgcctgaaggatcacaaagcattgtcccacatgacccagatgtgcatctagcaccccttcctggattctcagtccctgggaggtaccttctagggaaccatccagagacgggaacatgtggccactggagacctgccttaggggagttgtgggcgtgttggtcggggctcagccaagttgtgctgggagagtctgtgctctccctagaccaggttctttacagagactggactctggcgggggggaatccttgcaggccattctagggagagttggacatgcgcagggcagcctgggagtctgagtcctcagcagagagtgttctgggaaaagaagaatgctgagtgagatacaatgctagacaggggatgtgggtgatttacttggtgagaatgcccctagactgggcaaatctaaggccagggccctgaagcgggccacctgttttgcacagactactcacctgcaagcacttaagacaggcttgtggcccagaggtaagagcagagccctcctctcatgaccctactaggcctggctgtttgtcagtggctctgtcctttggggataatcagagttccagctgcctgtgccatggggaacagggtgtggctggttccagtacacaggcagaatagggcataccatctccaagcagcaggggctgtaggattcccaccttagttgccttgcagggaatgtcttggtccagcagaagagacagaatggggagggcttgccctccacttggcccagttatctcttcccgatttatccatagattgagcttgatgatccagactcatattcattcaactaatcacatgagttatttctgcaatttgggtcttcaaataagtacacttggttgctgaatatgtgatcagccacagatttcttattctttaaaactcagggagcggaaatgccaacgtataaagccatcagcacgaggcagagatttccaaagcactaaaatcacaccattcaaagtgctggcccctggacttaccgtcaagctgccacttggcccatcagtgctctgtgcagagcccaggtaggggggctttatctgtaaaacccagggaggaaggcaatcaatacgtaatcttttcacattctttttacttaacaagagaattggtttgcctctgaagtaacttgatctggaggagaaaatgcatttgagggcttttaaagggtgcagaccaactgggaaaggctacttcaggccttgaggttgggaaggtcagcttctgttctgctctgagctttgctgtaaccttgaacaacttcgcctcttcctccttatcatcagggtccctggtacaatgaaccagccactggacaggacttaccattcattcatttgttcattcagtgagccactgttgaaccgctacagaaatccaagtagtggattaggccctggagatttcagagataaacccgacctggatctgcatttacattgcttgtaattgtcaaatggaagacagctgcaaacagttaagatgcaggcgtgggaaacaaatattgggagtagaaaggaagggcctgtagcctctgtttagtcactctatgaggaactgcctggggcaaggattgtggcttctgttcctatctgggggaggctgggatggacccccaggatggaccctgtcagaagtcatgaactggctgtaggagagcagctgtttgctccttttgttcccagaaaggggtcccaatccagatcccatgagaaagttcattggaccttacacaagaaagaatttggggcgagtccataaagtgaaagtaagtttattgagaaagtaaaggaataaagaatggctactccataggcagaacagcagcctgggctgcttgactgaatatacttacagttatttcttgaccatatgctaaacaagggatggattattcatgagttttccagggaaggggtgggcaattccctgaactgagggttcctcccttttttagaccatatatggtaacttcctgatgttgccatggcatttataaatagtcatggcgctggtgggagtgccttttagcatgctaatatattataattagtgcctaatgagcaatgaggacaatgggaggtcactttcatcaccatcttggtttttgtgggctttggccagcttctttaccatagcctgttttatcagcaaggtctttgtgacctgtatcttcagctacccccgcccatctcatcctgtgactaagaatgcctaacctcctgggaatgcagcccagtaggtctcagcttcattttacccagtccctattcaagatggagttgcagccaggcacagtggctcatgcctgtaatcccagcactttgggaggccgaggcaggcggatcacctgaggtcaggagtttgagaccagcctgggcaacgtggagaaatcctgtctctactgaaaatacaaaaattagttgggcagttgctgcgctcctgtaatcccagctacttgggagactgaggcaggagaatcacttgaacctgggaggtggaggttgcagtgagctgagattgcaccactgcactccagcctgggcaacaagagcgaaacgctgtcaaaagaagaaaaaaaaaagccactggcttggaaagtatctgagaaagtccctggtaaatttcattccactccaactggggtcttggcacttgcattttcctgagcccagccccagggaccgcaggaatccatacatctgcagggatgagacacagccgatgcccaccgccatgcagaagcctaacacctactaggctgaaagtcaccccagggcactaagccagggagggttgaagggggtggaagatcatcagggagagagtaggttttcctatttgagaagtgaaaggcggtatagacggctgtcctccatgccttggattgtaggtggcatttactgctcaaggagaagggacactcagagacctgatgcagaacacggaggaggcagtaagaccggctaagctaggtgagtttaggaaagtccagcagggccacctacttattttgcagtcataaaaacagcagctccaggccctcaatgctggcatgtagtaggtactcaataaatgtctgcagaagcaatgaatgagtcctgtcaaaagtaacagtactgaatcaaaccagtgttctgggaggcaggcacgcagatgtttcttgtccaccctaactctccagctccaaagcccatgctcttacccagggctctgtgagccctattcagttgtgttaatcagatgtggctgcattgcctccccgccgtcttggttacagtaaatgtcctttaagttgcaagggcctggggtggcaggggtagaggaatgcatgaagattcctcaccaatgcctgatactgtcagtcttcgtaacgttagcctttctagcagaaggaaactctatctatctatctatctatctatatttatttattttatttttttgagatggagtctcactcttgtcgcccagactggagtgcagtggcatagtctcggctcactgcaacttctgcctcccgggttcaagcgattctcctgcctcagcctcccgagtagctaggattacaggcgcccgcaaccacgcccagctaatttttgtatttttagtagagacagggtttcactgtgttggccaggctggtctcgaactcctgacctcaggcgatctgcctgccttggcctcccaaagtgctgggattacaggcatgagccactgagcccagctggaaacactatattcttgttgagcccctggaagtttatttatatactcattctgcatttttgttcaatccatactctgctaagcactggagaaaacagaggtgagtaatcattgctgttctcccactggcatgggtcagacagctggggtgggaatcctgctctgccacttcctagatttattgaccttgggtaaattaatctcactgagcctctgtttccacatctgtaagatggggttggtacctcaaacaagtgttgagaagatgaactgcaatgtcatatgtaaaagcctggcctgcccaggcattcagtaaatgttcactgtgcttgttgttgttcattcatcttgcctgctggctgacaaatggtaacaggcaccaaaggtttaagaaagctgtgtcagaacagaccttaataataatagttgctaacatttattgaacatgtactgtgtgccaagtgctattctaagtaccttttatagattactattaatattaaaaatcctattgatttctgtaattttttacagagtggggaaaggctactatggt

SEQ ID NO: 4439 - DNA, 6000 bp, Homo sapiens
ttcccacccacagatggtgtcggggtgactctgagcatccccaggctgcccatctaggaaggggatttgttagagaaggaggtgatttaaagacaagactcctggccaggcgcagtcgctcacgcctgtaatcccagcactttgggaggccgaggcgggtggatcacctgaggtcgagagtttgagaccagcctggccaccgtggcgaaactgcatctctactataaatacaaaaattagccagctgtggtggcacatgcctgtagtcccagctatttgtgagggctgaggcaggagaatcgtttgaacccgggaggcggaggttgcgttgagccaaggtcatgccattgcgctccagcctgggtgacagagtgagactccctctcaaaaaatataaaataaaaaaaactcttaaaaaagagtatttttacttaaaaaagagagagagagacctcctcctcttccacctcctccaagcagcagcctgtgcttgtcgttctgccttgtccacagctgtttcctcagcacctggcactggcctcagtagatggttggtggacaggcaattgaggggttggctgagcctaacctgtgagtttgcgccccttctgatgtccaccctcagctgtgtttgggggatgcatcctagggctcaaagattgcctttcccaagggctgtgggccaggtttctgaagagaaagctgggcttggcaggcaaatggatgagtatgtctgcggcacagcaaccgtgctgcctctgcctatagggcccccctggggccctgctccacacaaggctgggctttgggtcacggagcccgtaaggtgggctccctgcctcccatggcctccacccacactcatctgtaccatgtcctacacctgcccttccttccagcgcagccctgcttccccatctgggctcgtggggcctctgttcacagtagtccccttccatcttctacctgcttccctcctctgatcagagctttccttacaagaccctcctcctccaggaagccttctcaggctccccaaggctgccgtgggctctccctcagccaggaccccatagctctgttgtcttttttttttttttttttttttttttttttcttttttggaagtctcgctccgtcatccaggctggagtgcagtggcgtgatctcggctcagtgcaagctctgcctcctgggttcacgccattctcctgcctcagcctcccgagtagctgggactacaggtgcccgctaccacacccggctaattttttttatttttagtagagatggggtttcaccgtgttagccaggatggtctcgatctcctgacctcgtgatccgcccaccttggcctcccaagtgctgggattacaggcgtgagccactgcaccaggcctgctctgttgtctttaacgttcagtcagtcattgatcacacattttccatgtgccagtccccgtgctggggatgtggagacacatgccctcagggaacccagtcgtggggagcatgtgcagacagataatcagcattgaatatgtgactctgacagcatgccctggtgttgaatagtaccgacaggcgtgcaaaaggtgggctgacagcaccagagcagcctgaggtgtggggtgtgctgcggggtctcacggaagcagtgacgcggtcctgtggagagtaatgaggctggggacaacatatggaggacattgcgtgctatgctgagaacttcagatagtatccatctggaaaatgtgaagataataatggaacctatctcgtatgagaatttgaggagggaatacatgcaaagtgctcacagcggtgccaggcacactgtgggtcctcactaacgcttcgctattatcattattgctctccgaggtgaagaagagccacagaaggcctttaagcaggaaattgatattcacatctgcattttggaaggattattctggctgtggggctgagtgggtcagagtgggacaagaggaaagaggcaggaagaggctgagcctcaattggggtggcctggcccagggcagtggcagcaggttggagagagctgagggggtgggggagcaccagaacctggtgactggcagggcggggttggtggaggccggaggaattttgagcttgacttctaggttctggcctggcactgaggggtgagggtgcctttcgctaaggtgtagtcccagcagcagcgccaggtttggaggggaagctgatgaactcagctttgaaaggactgcggttgaaggacctcccggtggaggtgtcagagaggctgctgggtactcggggaagagctctgtgctgctgctgaggttatgggcagctccagcatgtggtgtaagaatcaggtgagcaaatgaggtcacccaggaaaggttgtagagagagaagagggcctagaaggaaccctggaggagctctgcgtcctgcccacgggaagggcaggggagagagaggaaacagagaaggagcagctgaaaggaagagagccgagcagggagggatcctggactacctgagaggggccaccatcccttccatctgtcctggctcatttcattaggtgaatgcagggcttcgggagggactctgggtgttcagagccctcagcagtttcgggactgcctgagagggggccaccacctgtcctagctcatttcattaggtgagtgcagggcttcgagagacccttcacctgccccatcccagctcagaccactctaccaggcaaggggatttggtaccatggtcagaggagtccccagtccatcacttttctgataggtgatgtggcaacctgtgagctccatggctggcaccacgagatagagggcctggctgtggcctgtggagtgaaggcaggatgtgagcatcaccgggaaggctgggtcccctgcaggagaagcaggtcaaccttggctcttaccccaccccacccgctttctccattctctgcagtccatcgaccctggacagcagttcacgtgggagaattcaaacctggaggtgaacaagcccaagaaccgctatgcgaatgtcatcgcctacgaccactctcgagtcatccttacctctatcgatggtgagccaagggggtgcccctcccatccccttgctctcccccttgctagctagggcaacatgtcattctacagaggatgtccacgagtctcaggggtgcactgaggcatggtgggctgggctggggaccctgtagtaatgccctcccacctcctttcttatccataggcgtccccgggagtgactacatcaatgccaactacatcgatggctaccgcaagcagaatgcctacatcgccacgcagggccccctgcccgagaccatgggtgatttctggaggatggtgtgggaacagcgcacggccactgtggtcatgatgacacggctggaggagaagtcccgggtgaggctgcagggccctgccaggaggcgggtgggaaatgcccagccacaaggtgatacagggcaccttcttctgtgccgctttcttctgtggaggaagtcgctcaagtgatccccagatgctattgttactgggggtattatgctccccaaatactgggtgtttctgggatacagcatgttccccacatgctagtgggttccttaagatgttaatatgtttcaccaaatgctgtcattttcggagaatgttaatgtgttccccagttgctggcgtgttcccggggtattcatgtgttccccagatgctggagtgttcctggggcattaacacatctcctaagttaattagtggaaagagctgctgttatctgtttttggactgcaaagcattgactggaacgtaaaatttacagagcttgaaaatggcacataaacgttatgggtaaatttggcagaaaatgtgcctggtgcgatctggcgttgaataaataattttcaattatgacccttattccactagctagggcagggcggtgacatagcttgaggacctgatgtggcttgtggaggacagggggcaatggatctgagagctcagggctggggggctttgtagccagaaaggctacagccagggagttgaccagcctccaccctgcttctgcccgtctgagcctgtgggcttccttcagcctgccctgctcatcctcctgcaggtaaaatgtgatcagtactggccagcccgtggcaccgagacctgtggccttattcaggtgaccctgttggacacagtggagctggccacatacactgtgcgcaccttcgcactccacaaggtatagcctttccccagtgcatatctcttacccagacactgtaaggacagtggcctgggtgtggtgtgctgggtcggggggaagctggagcctgggtgttggagggtcggaggctcaggtgtgtgagtgatgtgatgatccatgttatgggaacagtgctaggagcttcaggctactctgtgtggcttctgagtcccatggggaagtggcgggtatggcctcagcatcaggtcattcagtcctgagtctatggcaggtaggctcctagtcgccagtatgtccccactttgtcccccagagtggctccagtgagaagcgcgagctgcgtcagtttcagttcatggcctggccagaccatggagttcctgagtacccaactcccatcctggccttcctacgacgggtcaaggcctgcaaccccctagacgcagggcccatggtggtgcactgcaggtgagagggtacagtgccacccagaggggtgggtggggtgggaggtgggggcgcctgtgcctcaagctgagcccgtgtcctgcagcgcgggcgtgggccgcaccggctgcttcatcgtgattgatgccatgttggagcggatgaagcacgagaagacggtggacatctatggccacgtgacctgcatgcgatcacagaggaactacatggtgcagacggaggaccagtacgtgttcatccatgaggcgctgctggaggctgccacgtgcggccacacagaggtgcctgcccgcaacctgtatgcccacatccagaagctgggccaagtgcctccaggggagagtgtgaccgccatggagctcgagttcaaggtggggctcgggtgggcctgcttggctccagggcctagactgggtcatgcagatgacccccacccccacaggaagcctggcctgaccaatccctgcctctcaatagttgctggccagctccaaggcccacacgtcccgcttcatcagcgccaacctgccctgcaacaagttcaagaaccggctggtgaacatcatgccctacgaattgacccgtgtgtgtctgcagcccatccgtggtgtggagggctctgactacatcaatgccagcttcctggatggttataggtcagcatgcatgtcactgccccaccatgccctacaggggcctaggcctgtgcctggctggtgggggtgggcagcagagtagggccagcctagaagaccagagagggctgggtagagcagtgaggacttcctggaggaggggtgatctgagcagggccccaaggggctaggcagcctaaggggagactctaggggcagcagcacctccagcatgtccagtcttatgtccaccccagacagcagaaggcctacatagctacacaggggcctctggcagagagcaccgaggacttctggcgcatgctatgggagcacaattccaccatcatcgtcatgctgaccaagcttcgggagatgggcagggtgagcccaccctttcccccagggcccctgtcatacctgggagaacaccagccacccttgggggagctgccgcctatgttactgtctcctttgacaccccagctgcttgtcagcatggcctcaggcgcccgttattactacctgaggcatctgtcccagaatcctgtgaagcctggcacccctcccctattccttctcacctgattatgggggcccgaccctctgtccacaggagaaatgccac

SEQ ID NO: 4440 - DNA, 6000 bp, Homo sapiens
tcttctatttcctgggatcaaagcctgtcctgagtacaaggtgcttgaaaactaccattgacacttcaacagctgcaaaataacactggttgcaagaatccaacaatgtctctgctgtgtggtcctttaactgtttatttttatgctgggacctggcttagagtgttcattcttgcatagatccaggttgctttgtggtagcaattcaggttaataaaatgctcctctgcccaataccatctgtagatgttaataaatgttctcaaggaatttttaggatgctgaagatgatgatcaagatctcaaaatcatttcattgattaagtacctactatgtgtcaggcattggatacataggacaaagaaggaagtgggcatagtgcatatcttcattgaattggtaatccaatgggagatcagacaagtaaatacagtgtgataagggctgtgatgggcggaggtacagagtattgtgggaacacatggaagaaacacctcacccatactaggagatcagggaaggctttctggaaaaggctgcagaaacctgatagcctagtgaagaggagtagggaggaagtaatcaaggcagaggaaacaaagtgttggagaggctgaacacaagggagagaatggcttgttagagaaactggcagaagttactggcctggaacagagagagcctgaagagtttttaccaagggacccatggcaagatggaaaagggattaaaggaggtaaagactggcagcagaaagaccagttgtaataatcatggtgtaaaagacaaataaccaatgtcctcagtacactgactttcaaaattcacttatctctcaatctgccaagccagacatcctggcctccctagaaccagatacaattacagtcacatgtctcttcatggggataccttctgagaaatgtattgttaggcaatttcattgttgtgtaaatatcagagtgtacttacacaaagctagatggtgtgtgtgtgtatatgcatgtatgtatgtattcatatggaaaaccaaattcccaacatcattactgaatatcagtcctttcccctacttcaggagtccccgggccccaggctgcagactggtacctgtcgagagctgttaggaactgggcttcacggcagtaggtgagcggcgggagagtgagcattactgcctgagctccgttttgtgtcagatcagcagcagcattagattctcatagtagcatgaatcctatcatgaactgctcatgtgagggatctaggttgtgcacaccttgtgagaatctaatgcctgatgatccaaccaagatgaaacagtttcatcccaaaaccatctctccccccaacccccatttctggaaaaattgtcttctacaaaacttgtctgtggtgccaaaaaggttgaggaccgctgccctacttgatctgtaatgccagtgattagtgctctgtatcaggtttctatgtacttcattataaaatggagtctcactctgtcacccaggctggagtgcagtggtgtgatcttggctcactgcaacctcctcctcctgggttcaagcaatttttctgcctcagcctcccaagtagctgggattaaagcgtgaaccactatgcctggctaatttttgtatttttagtagagatggggtttcaccatattcgccaggctggtctcaaactccgcctcaaatgatccacccacctcggcctcccaaagtgctgggattataggcatgagccaccatctcgtatcttatgggaccaccatcatatatgcagtccattgttgaccaaaacaccattatgcagttcatgactctttttaaaaagtaaagaaaaatcctatttgaaagaactattacatgcaaaaaaatctattgttcctattactcatgcagatggccctttaaagccatggtccccaggtatgactgttacgttccttgccagaaataaacctgtgcaaggtgtactctctagtctctgtatgtgaagtaagagtcattctgtgcttgatgctgtgttttgtgcattctagataggaactgaagagctcaaaatgacatgaggttgagctgtttctcatttaggttagcttgctgtgattccagtagcttttcttcctgcttatccaagccattcatgaaagcaaaacccacacaagatacaggagctcagaataaaaggagttcaagtgggcgtgttatctcccacttcccctactaaggtacaaagttatttttctttttttcacttccttggtaattttttttttttttttttttttttacaaagactggttaccaggcatttcatacttaagccctgaagtctgggaatgtgatttctaacaattttatgtttggagttcttagacttgtgtttacctgcttacataagagataattttgcttacaaaactaactacagatgtgatcattgctgtagtattcattgtattttattaaaaaatattatgaacctactctgtgcagtactaggtatgtggaagggtttcggaaaaaaaaaaaaaaaaaaaaagacctggtccctgccttcagaaacttaatttaaaacagagcagaatcaaagtactaatgccacctttcttcattgtgtcatccaaggaagacacaagtaatcagtcacagcactgtttcctactgaaaccagaatcagcctcagaatcctcctcaacacagcattccagacaacccatgaatagataattcatcttcctggttgggtgtggtggctcacacctgtaatcccagcactttgggaggccaaggtgggcagatcacaaggtcaggagttcgagaccagcctggccaatatggtgaaaccctgtctctactaaaaatacaaaaattaggtgggtgtggtggtggatgcctgtagtcccagctactcgggaggctgaggcaggagaatcgcttgaaccaaggaggcagaggttgcagtgagctgagatcgcgccactgcactctagcctgggtgacagagtgaggctctgtctcaaaaataaataaataaataaaaatattaaaaattcatcttccatccttaatttaaaaaaatacatgcattcccaaaactcttgggtacttgccttgatttttattgcttggtcttttgctagtttttaaagaaataacatgatttctttctttaaaaaagacaaagcaatataaatatggaaacccaagaacctctcaagaaatgaaaatatggtcatgtggtttttcaagaagttgaaacattcagttcatgcacataattagagaagcccattcccattacttgccactagaaacactgtttttcttggttacttccaggatgattgtccttgtcctttattatttgtataaactagttccgtgctataaagctgtcagctgatagtgaataataaccacattttcaagtttcctggcaccggggcttcattcatggctgctcgggtcacctgctttggtagagatcgtatgtcttcctggtgctgacttattcagcatcaccatcattgattatttcatggccacctgagtcttgagctgtcttctcaatccacatgctttccataggactgcatcaaaggccagagtttcagctatatatattgataaatcccaagtgtgtatagtaagactcctcctaaacgctagacccttagtttcaactgttcatggacacttccaccagagtgattggagctaacgtaaacagctaacaaacacttgtggccagaggatgtgctaagagcgttacaatcattacttaatttaacctttccaacaacccttagaagttttcatccctattatacagatgggaaatacacaaggcttaaggaatcaaccattagtaagtgttagaactaagtctggaacataagactatccaaagtttaacggtatttaatggtatacacagacctttcaattttggcttatacaaaataagagtcatcccactccttgacctccaaatttcagtcttaacctttaatgagtccacaacaaatgccatcctgctgtcataccctccttcaaggtccactaagtaaccactatggacttggtgcagtctgtcataatttcttacctagaatgcaattcttactcattctttccctcttcccttgcactaggagagaaaagctgtatattccccttttagtttattttctactacatttatattggataaaaagataggacctgaatgagaaaactttagttaggagcaggcatagggtttttctcatttactcttttcatttgcatctctagaataatgtcttttgtcttcttgttttctaggaatgtttacccttgcggaagttgcatcacttaatgacattcagccaacttaccgaatcctgaaaccatggtgggatgtgtttatggattacctagctgttgttatgttaatggtagccatctttgcaggaaccatgcaacttaccaaagatcaggtggtctgtttgccagtattgccatctcctgtaaattcaaaggcacatacaccaccaggaaatgccgaggtcaccaccaacatcccaaagatggaagcagccaccaaccaagaccaagatgggcggacaacaaacgacatttcctttgggacatctgctgtgacacctgacatacctctcagagccacatatcctcgcacagatttcgcacttccaaatcaggaggcaaagaaagagaagaaagatccaacaggtcgaaaaacaaacttggattttcagcaatatgtatttattaatcaaatgtgttaccatctggcccttccgtggtattctaagtactttccatacctagctcttatacatactattattctcatggtcagtagcaacttttggttcaaatatcccaaaacatgctcaaaagtagaacattttgtttcaatattaggaaagtgctttgaatccccttggacgacaaaagcgttgtctgagacagcatgcgaagactcagaggaaaacaagcagagaataacaggtgcccagactctaccaaagcatgtttctaccagcagtgatgaagggagccccagtgccagtacaccaatgatcaataaaactggctttaaattttcagctgagaagcctgtgattgaagttcccagcatgacaatcctggataaaaaggatggagagcaggccaaagccctgtttgagaaagtgaggaagttccgtgcccatgtggaagatagtgacttgatctataaactctatgtggtccaaacagttatcaaaacagccaagttcatttttattctctgctatacagcgaactttgtcaacgcaatcagctttgaacacgtctgcaagcccaaagttgagcatctgattggttatgaggtatttgagtgcacccacaatatggcttacatgttgaaaaagcttctcatcagttacatatccattatttgtgtttatggctttatctgcctctacactctcttctggttattcaggatacctttgaaggaatattctttcgaaaaagtcagagaagagagcagttttagtgacattccagatgtcaaaaacgattttgcgttccttcttcacatggtagaccagtatgaccagctatattccaagcgttttggtgtgttcttgtcagaagttagtgaaaataaacttagggaaattagtttgaaccatgagtggacatttgaaaaactcaggcagcacatttcacgcaacgcccaggacaagcaggagttgcatctgttcatgctgtcgggggtgcccgatgctgtctttgacctcacagacctggatgtgctaaagcttgaactaattccagaagctaaaattcctgctaagatttctcaaatgactaacctccaagagctccacctctgccactgccctgcaaaagttgaacagactgcttttagctttcttcgcgatcacttgagatgccttcacgtgaagttcactgatgtggctgaaattcctg

SEQ ID NO: 4441 - DNA, 6000 bp, Homo sapiens
taacctttgttgctgtggacatgacttataagcctaattaaagttaattaattcttagtgtgtctaagttagacatactatttcctgactgccttggaatgggtgtgaatttacatgagcacttatgtgctcagcttagaaactagactaacggtaaacttttagtctaagatgctacctatttttttctaccctgacagctactgaggctgagaagttcactttacccattgtctaatgtatttgggaaagtggcatttataatactttgtaggttgacagatactacattcattatttatataatgcttcctattcttcttaacttgggtaaatctaactcatggtatctttcgtatgtgtctatccaaccgaaggattgctatcttctctttaagtgtttttcacttccctacttccaccaccccaaagtggaagcagtctctcttcttttgagtccacatggcacgttaaagatcattgtaacgtcatacaacattgaaaagaatgtcttacattatcttgattcttgtatttactatactagatgataaaccccctgggcagaatgcatctgatctgtacttatcctcaaaagtagctagcatgatgtcccacattggtgctcagtaatatgtttcagttaaatgaacaagagagcagaggtatggccttgatgtttccagagaaggcagctgaggcagataattccatgatttgccaaatccaaataacttaatgtcatcatcagtgggcaagtctagaaccctaatatcctggtgctcaaaattagtgttatcaattcagtcttctccacattaaacaatttccaattcctttgaggcctggtgtgatggattctgtctttcaaatgctttttttctttcagtgactctatcgttcataaatgttaaataaaaccctcactctgttataaaaatatagactttaaaaattttccaaagtaaacactccagagaaaggtaggcgggctgaataggctgctgttgtccttcttactgcccagcgtcactgaaattttcaaaggctcctgtcctcctcgcaggtttctgccacctctttctgccagatgaacagtttcctgaagggttccagtttgacactgacgatgtgaatttccctatcgataatctgtgctttgttgggctcatctccatgattgaccctccacgggcggccgttcctgatgccgtgggcaaatgtcgaagtgctggaattaaggtagtgcccaggcgcctccttggcttcatctcttagtgccttgggacaccctactcagtgaatgttgccttttgaggtccagatggccagctgttctatctcacctggagtattaatttctcatctccaaagctttacttccacccagaaaagaccagatagtattaaaatatgatggtgtaaacacacgaggaattaaaaattttttggaaagcaattgtgtaaaaaagaaatgtaagcaaagtaaaaacagcaaaagacttgaagttttaaaatacttgcattattctaagttaatgtaccttatgcaatgaatggcatatcttctgtgttttcagttaactgtttgttaatgagtgtttggtgtcctctgtgtatctgtctttttttaagtagctgaatattactcaagtgcactaatatcctgttgctgggtatttggtttctgttttttactctcaggattttattttatttattttttgagacagagtcttgctctattgcccaggctggaatgtcatagcacgatctcggctcactgcaacctccgcctcccaggttcaagcaattctcctgccccagcctcccaagtagctggaattacaggcacccgctaccacgcccagctaatttttgtatttttaagtaaagatagggtttcgccacgttggccaggctggtctcaaactcctgacctcaggtgatctgcccacctcagcctcccaaagtgctggggttacaagcgtgagccaccacacccggcctactctcaggattaatactgccctgaaaagctttgtagaagttatttcctcaccattccgactgcttctttttaaagtatattctaagtataatcactgcatcaaaaaataacaattttgaattcttgtcacatgttgcttttcctccaagttgtgccaatttgagaatgctagccagtagcatgtggtgtcttcacagtcccaccagcatcagatttttatcctttttttttttttttttttttgctggttttagtaattttcaagtatttttatgtaactctgtagaaggaaaaatagacattgtgtatgctagtgattgtataccaagataaaacctgagtattgcctttgtgtttcctttctgtggatatatatgtttatatttttggctaatcgatgtttattagttttatatttgcattcctttccttttgatagtctaagccgaatcatccttagtatttactcttgcctactggatataagactttaaggtcatttacttggcagttgcattcaacacattgtcttgtttattacaggtcatcatggtcacaggagaccatccaatcacagctaaagctattgccaaaggtgtgggcatcatctcagaaggcaatgagaccgtggaagacattgctgcccgcctcaacatcccagtcagccaggtgaaccccaggtaaggcaggaagctcaaatcacagtctgctgtgaacaagcaaatagtgatggtttaaaatcttcagcgtggttctataatggtttgcatctaggcttgctctgagtaggaaatgtacctgcactgccagaaagcaaccttgtcattcctaagaagggttttaagtaagagcaagtcataataattagcacttagatggtatttactgttctaagagcttgatatggtgacctattatttgcagagcagggaaggtaaggattcaagaggcttttgaagtacctcagaactggtgaaatcatgcagtaaattcagcagtctagcttctgatttcatgctgttaaccactgagctctactgcctagcacctagcatcttgacactttccaggtccacactaacaaaataaaataaggaagggacaattacttaggccattcaggcaaacacaggagacatttggcaatgaagtaaaacagataatagcaaattggttttgttttaaggtttagggccctttcaccctatgttacggttagaggagggtttggtcttgtatcagctctgccactttctaaaacttggttatatttctttttttctttgatggagtctcgctctgtcatcccggttggagtgcagtgtcatgatcttggctcactgcaacctccacctcctgagttcaagtgattctcctgcctcagcctcccaagtagctgggattacaggccccaaccaccatgcccggctaatttttgaatttttagaccaccattttggcaagctggtctcgaactcctgacctcaagtgatccactcacctcagcctcccaaagtgctgggattacaggcatgagccacacacccagctaaaacttggttatatttcagcatgtctaataaagatagggaaaggaagaatacagacaggcctgccttagagatcatcatgagcctcaaatgagataaaatatatgaaaatgctctgtaacctgtaaagtactgaacacttaatagcttttatgtgctggggaaaattccttctttgttttgtttacaaagtgatctgcataagaatatcccctcttgaggtgatggacacatgctggtgatgtgatgcgtgactttttttttttttttgtcctaattctagggatgccaaggcctgcgtagtacacggcagtgatctaaaggacatgacctccgagcagctggatgacattttgaagtaccacactgagatagtgtttgccaggacctcccctcagcagaagctcatcattgtggaaggctgccaaagacaggtcagccagcacaaggatcaggctgctttgggcactattggctttagggattggagttccagtggaaacagagcaacggtgatggatggatgcatacctcgctgtattagactcagtataaataggccagtaggaagctcataggcatagagagggtgacttgttaatggtttagcagtgacagaagcactttaaagtccaggtgtccactgtgtcccagagcctgaccgctccgtggagtcatctgatatggggtcctagtatttgcaatagagatgtgagtggtcagactacagggcgtgcatacaggaatggcattttctggagtgccacccaccagagtcattactttgagtagctcttgttaatgctgggggctatgtttgttgtcacttctcagttctgttatttggtgtagggcctgtgtgaatacttgcctgtgacggttctcaggcttcataaatagtctcaataggaaaggagcagtgtctgtaatgagtgctcagtgggggcatgcatcgcactatttccatcgctaggaaaagtgattggtattaacccgttttcccttttctggggtagggtgctatcgtggctgtgactggtgacggtgtgaatgactctccagctttgaagaaagcagacattggggttgctatggggattgctggctcagatgtgtccaagcaagctgctgacatgattcttctggatgacaactttgcctcaattgtgactggagtagaggaaggtgagagctatttaaggtgtacaccaagatcttattcagatactgcccattagcatccatttctgtatacttcttggatatgttcagtttccagtgtgcttgtctcataagctaacagtaaaaaatcttggttttcataggtcgtctgatctttgataacttgaagaaatccattgcttataccttaaccagtaacattcccgagatcaccccgttcctgatatttattattgcaaacattccactaccactggggactgtcaccatcctctgcattgacttgggcactgacatggtgagtgtcacaacagtcacagatcgatagtagtgaggtgtgagctgtgtcttcattcactggcactatgctcccagcatccatgaggctggcgttgggaaaagaaattctcaggaccagtatccagtgtgtgtcccaatcccggcttcacagaatcagtattaccactcttcaaggcagcagttaacatttgtttatcagatgggaatctttatttttgtatacttcacctaaaagatttttaaatgggagggcaagaattttataacaaaaggttcacaatattagcttccttatttttagtaactaaattccttctccccaccccttcccaggttcctgccatctccctggcttatgagcaggctgagagtgacatcatgaagagacagcccagaaatcccaaaacagacaaacttgtgaatgagcggctgatcagcatggcctatgggcagattggtaagctgcagcctggagtgggaagctggcacatctaaggcatctgaggtgatggtgtccacctcaggttgaggttgatttcagagactgcaaatccaggcgactttcaggtctaggatgagccctaacggagtgagcctgtggagtttctctgaactctcttccatgtgagaatacatctgttgctgtttgcccagttaccttttgtggaaactggttttctatactgagcaccttggaactgggctcaactctgcctgagaaatgaggatgtccttcctcactgagccttgcggaacaggaggcatggttctaaggaattgtgtgtactgacgcacaggctgctttccctggagatacacacttatctgtcactcacttggatggagttaggcattggagaaagtatatgtgtttgagagtttggctggtaggtcaccaccaaagggtgatcctccatccacctcacactggacttctgcccccacagtgcagcatga

SEQ ID NO: 4442 - DNA, 6000 bp, Homo sapiens
gctctgggctttgagtggtgactgggctggatgaaggtggagccacaatggagaggaggctgagagggctggaagcaaaggtgtggagatgggagcctgggaatggcctatggaaatagttggccagggtcttgggccaagagcaagagctggaaacatagcttgctcctgattgtggaggcttttgaatatttgcctgtggactttgtatttactaaccattaaaagttattgaaaagactgggcacggtggctcacacctgtaatcccagcactttgggaagccaaggtgggcggataacgaggtcaggaattcgagaccagcctggccaacatgttgaaaccccgtctctactaaaaatacaaaaattagccaggtgtggtggtggttgcctgtaatcccagctacttgggaggctaaggtaggagaatcgcttgaaaccggaaggtggaggtagcagtgagccaagatcacgccactgcactctagcctgggcaacgagcgaaactgtgtctcaaaaaacaacgaaacaaacaaacaaacaaaaaagtttttgaagaaagtcaaaagaatgtattctgtattctaaaaatgcattctaagtgttacagctcttttagaatttgtctagcaggttttccagttttcactggaacccctcccccacaaaaagaaaaaaatgcattctaaaaaaaaactaaagaatgctttaggaagtattgactggcagtagtgtacagcatgaataggatcaaggcaacatgtaggatgtttgaggtaaagagaatgttagcagggacaggccagtgagaatgaaggggaggatcggaggaagacgaggcaggaggaatggccaggggaaaggaactttcttgcttagtgccttgcacttgagataagggaacctgtgacatttttaaggaaatgttttatggaggtgctgaaaacttgtcctgtctcccatcttttgttcatacagattccccaaatagccctcaactctctcccagcccccaatcttactgctggtgataataaatagaagatacagcatttctgtgctgagagaatatagtttaggcttttccagggtgtgaagaggagagttgggaggttctgggtttagtcctgcctcctcactggccatgtgacctcaggaaaatccacggtcactcagggcctcacttgatcttagttttcccacgtgaaacaggaacaggagtacttgtctcaccttttaataggatgtcttgatataagatattggcttagaagatacattttaaacttaagtgactgtacagttactgggtggtagcctgctcattgtgactgttgccactcccttctgcattactatttaaatgcctttgtgcttacaacctaattttgttttcccacctatgggctttgctatctgtgttttgtatctcagttcacttgaagcccttgggagcagctaaagcagttttctttctgagtctcatcaggtcacagtgtgtatgtttcgggaggctaagagggggttgaagagctgtgtgaggaaaaggccctttggaatgtgaagacattcccatttgcctggtaatgggatcctgataggtgccttagtcaggtgggaagcagggctctcgatagggccccattgctcggctgcactggacctaaacatggccctttctggaaatgctaacagtgcatatgattagcaaagaagaggatacgaacagacctggagatgttaaaggcactataggggccaggcatggtggctgtcgcctgtaatcccagcactttgggcggtggaggcgggaggatctcttgagttcaggaattcaagaccagtgtgggcaacacagcgagatcccatctctacaaaaaatgaaaattagccaggtgtggtggtgtgcacctgtagtcccagctactagggaggctgaggtgggaggattgcttgagcccaggagtttgaggctacagtgagctatgattacactactgcactccagcttgggtgacagagaccctagctcaaaaaacaaacaagcaaacaacaaccaccacaatgcgctgtgccattgtgaagtggtggtgttctgcagatgcccagggccctctccctctggagtcagcacctcagccctgcccggtgttcagaatcaggaatgtagtgccccaagcccagggtggaaggagcgcacccagcctgtggtgggacagtgacgagtgggcttcaagccttctccatttcccctccccggtgccacccctctttgaggtggcgtctgtgttgctgtggcatgcacagcaccctcattatttctctctctcttttctctcccctccctctggcactttctcttgtttttctctgcatggtttctgtattattagtcctgaggtaagaactggccgagtgccttgtctacagccccttttcctcctttgctgtctgtcctgcccacccaggccctttgcaccttcttgtctggagagcatcaggagggtcgggtcggggcgttcctctgctggctgtgtgcagccggctccaccttcaggctctccttgccctttcccacccaggtttctgtgcccaggtgtcttctccgttcttgtctctccccaggcggagggcctgcagcgaaggcccatgtgggtggggcacctcctcttcttcccgacccaagcctcacctcttgtcccctgtgcagtgtggaggtcatccgtctgggccacagctacttcatcaactgggataagaagatgttctgcatgaagaagcggacgcctgcagaagcccgcaccaccaccctaaacgaggagctgggccaggtggagtacatcttctccgacaagacgggcaccctcacccagaacatcatggttttcaacaagtgctccatcaatggccacagctatggtatggtggcaccactggggactgggggcttgcacctcgcctggaaggacagtggaactggggccccacagtttccttaacattggttttttcttccttcctagttgggtctgaggggcctagaagaaagggtccatcctggccaggcacggtggctcatgcctatagtcatagcactttgggaggctgaggtgggaggattgctcgagcccaggaatgcgagaccagcctgggcaacatagtgagaccacatccctacaaaaaatttaaaaattagccaggtatggtggcatgcacctgtggtctcagctggccagtgactcaggaggctgagatgggaggatcacttgagcctgggaggtcaaggctgcagtgagccatgatcttccactgcactccagcctgggcgacagaatgaggccctgtctctcgagaaaaatccacacacaaagaagaggtccattctgtgtcccatgtcaagaagcagatcctggctgggcgcagtggatcacctgaggtcaagtgttcgagaccagcttggccaacatggtgaaactccgtctctactaaaaatacaaaaaatagctgggcgtggtggcaggtgcctgttttcccagctactcggggggctgaggcaggagaattgcttgaatccaggaggtggaggttacagtgagccgagtttgcgccattgtactccagcctgggcgacaagagtgaaagtctatcaaaaaaaaaaaaaaaattagattctgagagtcctccccttgtcctctcctgatgccctgaccctggtctcagctccaggaattaggggagctccttggctgtttgaagtgagacactggcctctgggcatcctggccaggcggaaccctgctagactctcccctgttgctgctcagggtccttgtgagtctgtggaatgtggctgtggttggacttcccagtgtggcccgtggctgtgctgctgggatggcctggggcagcatgtggggctgacttttatgcagagtgtggacccctcttgtgactgctttctgtactgactgatgcctttcggtcagtgtctgagccttgtctgctgctcaggtctaatgggtgcaaggaggcctgggaggtgtggaattggagctgccctgaggggggtgccgcctagggtagagacagggatggtgagcagtgggtgccggggctctttcatggccaggccttggggttctggaatctagggtgcctgatgcctcctatcccgcgagtcagcaatgtgactgagtgactcacactgtgacagctgctcagcgattagggttgaggggctcagtgcctacggggattctgcattggagatgtttttccatgctctggagctctctggctctgacattgcttctttttctgccctggctgtatgtaggtgatgtgtttgacgtcctgggacacaaagctgaattgggagaggtaagattcagtctccctaattctatgtgccagtgaaacagggtgcctggccagtaacagtgtagtcaggagtgatgtgttgtctggataggaaatggaagctgcttggagaaatgggtgttttaaggcagaactggtgatgacggaagtggaaattttgaggtccaccgtggacaggagcctactgagagttgggagggcagggatgaacccttccccgggatgcagcctggcactctagcctttcctaagagccttcttatgtgtttcagaggcctgaacctgttgacttctccttcaatcctctggctgacaagaagttcttattttgggaccccagcctgctggaggctgtcaagatcggggacccccacacgcatgagttcttccgcctcctttccctgtgtcatactgtcatgtcagaagaaaagaacgaaggtgggccgaggagccggctcgcactctcctgacctgactctgcccttgggctctgctctgctctgcaatgcggctgggctggggcttcctgggcggggcacgtggctgagggaagccacttatatcacgtgtattcttcctccccacccaggagagctgtactacaaagctcagtccccagatgagggggccctggtcaccgcagccaggaactttggttttgttttccgctctcgcacccccaaaacaatcaccgtccatgagatgggcacagccatcacctaccagctgctggccatcctggacttcaacaacatccgcaagcggatgtcggtcataggtgaggccaggcctggggtgctggggcgtttggggacagcattcaggcctggaatgggtgaagtgtgccgggtgactcttgatgtgtttatgttgggggtctttgcctgtctgaatttttctggcactttcttcacctgccccattcatagtgcggaatccagaggggaagatccgactctactgcaaaggggctgacactatcctactggacagactgcaccactccactcaagagctgctcaacaccaccatggaccaccttaatgtgggtgtgaggagaggaggggccagcctggggggttctactcttagtgtgggggaggcgacttaagtttgttttattgtgtaaatttaaggtctacaacgtgatgttttgatgtgtatatatagtgaagtgattactacagtcagacaacttaacacatcagccagctcccatagttacctctttttatgtatgtggtgacagtccctaactgtggaatgtggcacacacccagtctacagtgcaggattattcattgtcgccctcacgctgtccattagctctccagacttacccaggtgtgcctttccactctgcctccaggagtacgcaggggaagggctgaggaccctggtgctggcctacaaggatctggatgaagagtactacgaggagtgggctgagcgacgcctccaggccagcctggcccaggacagccgggaggacaggctggctagcatctatgaggaggttgagaacaacatgatggtacgggctgcgggacgggccaaggatgggcacggagggctcatgcctgcaattcttgtgccaggaatccttgtggtattttca

SEQ ID NO: 4443 - DNA, 6000 bp, Homo sapiens
cttgggagggcaccacgttgctcttacaagcacagggtcctgaaactgtttacaaggccccactctgccacgttagtatcttaacgagtgtttgttgaggaagcactgtgtgttagacccagtgcaatgagcaagtccctgatcttgtgaccttacattctacaggacgacacaaacgtataaacaaaaaataattttagatagtgatacatgcttaaaacatggctatgtggccgggagcagtggctcacgcctgtaaatccaacattgtgggaggctgaggcaggtggatcacttgaggtcaaggagttcgagaccagcctggctaacatggcaaaaccccgtctctactgaaaatacaaaacttagtcaggcgtgatggcagacacctgtaatcccagctactcgggaagctgaggcaggagaatcgcttgaacgcaggagatggaagtttgcagtgagcccagatcacaccactgcactccagcctgggtgagagagccagactgtatctcaaaaaaaaataaaataaaataaaataaagctatgtgatagaatgactgcgatggggattaggtcctcactgaaatggtgagagtggagttaaaacctgaaattaggtgacagcaccagatatatctgcccgagggtttcgtgcttggaaaatagcaggtgcaaacgtccttgtgctgtgaggaaatttggctggaacagaaggtgggccagattgtagctgaccatagtctctgagagcttggagatgattctaaatacaatgggaagccattaaattgaggcagagccttgatgtgacgtgctttatcatcattttgctgagtggagaatggattgctgggaaaagtgaaagattgattcagaggttgtggagagagggtggctggaactaggtagctggggaggtggtgggacgtggatgaattcaagataggattggttgtgttggatatgggaaaagaagtcaccatggttcctgggcttttggaatgtgcaaatgggtaatggaggtgccattgagatgggaacagtggaaaaataaccggtgctggggtgggaatgaagagctcagttgtgtggccgggcgcagtgactcacgcctgtaattccagcactttgggaggccgaggcagggggatcacctgaggtcaggatttgcagaccagcctggtcaatatggcaacaccctgtctctactaaaaatacaaaaacattagccgggtagcggggcctataatcccatctactcgggaggctgaggcaggagaatcgcttgaaccctggaggcagaggttgcagtgagccaagatctcgccattgcactccagcctgggcaacaagagcaaaactctgcctaaaaaaaaaaaagagttcagttagttcagttgtggccatgttgaatttgaaatactcattagacatccaaccagatatgctgagttggatggcgctcaagagaggtcaaggctggacttatgcattaacacatagaaagatggtacttaaagccatggacgttagtagtagggccacctacagaaagagtggaagtagaaaagagggcttacggtgggcaatgtggttcacgcctctaatcccagcactttggaaggtcaaggcaggcacatcatttgaggtcaggagtttgagaccatcctggacaacatggtgaaaccccgtctctactaaaaatacaaaaactagccgggtgtggtggcatgcacctgtagtcccagctactcaggaggctgaggcaggagaatcgcttgaacccaagaggcggaggttgcaatgagccaagattgcactgttacactccaacctgggtgacagagcaagactccatttaaaaaaaaaaaaaattgatggccgggtgcagtggctcatgcctgtaatcccagcactttgggaggccgacgcaggcagatcacgaggtcagcagatcgagaccatcctggctaacaaggtgaaaacctgtctcaactaaaaatacagaaaattagccaggcatggtgacaggcacctgtagtcccagccactcaggaggctgaggcaggagaatcgcttgaacctgggaggcgggggttgcaatgagccgagatcgcaccatgcactccagcctggcaaaagagcaagactccatctcaaaaaaataaataaaataaaataaaaatgacggctgggagcagtggctcacgcctgtaatcccagcattttgggaggctgaggtgggcagatcacgaggtcaggagatcgagaccatcctggctaacatggtgataccctgtctctgttaaaaatacagaaaattagccaggcatggtggcaggcacctgtagtcccagctactcgggaggctgaggcaggagaatagcatgaacctgggaggcagagcttgcagtgagccgagatcgtgcaactgcactccagcccgggcaacagagcaagactccgtctcaaaaaaatatataaaaaataaaagaaaagaaaaaaaacaaaaacaaagaaggcttacgtgagacccttggggccctctactgttaaccagttcaggagaggtgtaaaagtttgtaaaggataaccagagcacaaagtagaagagcaatgtcctcaaagggaaaaattcaagaagatgctgattatggagattaattgctgcttcaaggtcaagtgaaatgcaggcagagaaatggtcactgggtctgacaccacttttggtcactcaaattttggtcagagcagtggctgaagaaacacaggggaaggagtctgatgggggtgggtgataagagaatggatgtttaagtgtggagggaagaaaaagaaaacctattgctatgaaaaggagcagagatagaattcgtggttggaaagtgtgtcttgaaagtttcttttttcttaaaagtttcttgtgcaccatatagcacaagatcagcaacccctggcagagcccttcaggtacccagtatcccttgggggtgaggaagggtgtgtacaagaggagaagcaggagataggcaggaatgtgttgcaactacgtatggataggcagctaaggtcctggttggtatacttttctctcagtatcaggaaccctgcctgccctttggaccagtcatggagaggtcacctcagtaccacacaagatcatcacccaccttcaaaaagaggtgggtgatttggatagagggggctgccagtgagagaagttcagtcaattccgtacaatacacatttattgagcactagatatatgccatgctagatgcaggtgacccagagcatcaaggagcaatagtctggtggcagagacacacacaatgtcactgtgatgtattaaagcagtcggcaagagatgcagctcagggcactgtggggatatccagaggcacggtaccttctgcctgtcagtcagggagggagaggagcacaggctgaaggagactggaagacagcagttggcctctgatagtgggactggagagagatttctaagggccacttcttgttttcagggactaggttgggctagatatggggctcaggatggacaaggcttagagccaggttggagaagatgaaagagcattactagaggagtggggaggcctaggctatgctctttactctgccattgactgcgtgatcttgggcaggccatgtaacctctcagggctgtgcactcccttatttgtaaaactagagggctgggccagcatgttttccaagggttcttctagcattgacggtcaggttccaagagggaacacagtgtcagaagtgggacactcttcctaatttctaatttcccaaaggttaaggacctggggaattaattgagaggcctggaaagaggatccagataaaagcctaagttcctggcaaggccagggccactgccctgattgcttaggtgtgaacagagctttttgtttccgaagtattctaaattatttcctaacacaggggcattcagagaaagagattcttacccccattccacaggggagaaactgaggcttagggagatttaaggatcatgctgaagaggttatctggggacaaagcttactcaggatgtggtgggggatgctgaggaacagggactggagcctgggaaggtagggcaggctgagacctgggggtatggatggaatgtgtatgtggtaatggtgtctgggcgatggaatgaagtgaaagaaatagccaagagctgggcactgagggaacaagctggggggccctgggcgtgggttccctggatccagggagtgtgaggatggctttccctggttcctgaggcatggaccgagtcctagcctgcatctgagctccgttgtgctagctttgtggtgtctgggtcgggaaagttactgttagaaagttgctgtcagcaggcattgttccagctttccatggaaattctgggagctgctcctagtttgcggcccaacctttcttccttcttctcaatgggcccaggaccttgacggccagcgggctccaaggcccaggctttttgccaacagcaacaggctactggctgggcccaggcaagggggccttggcaggaaaagttccttgctgtacctccactgcactcagaggccagtgaggggggtaccagacaggactccttcctccctggtgaagtgcccttgcagctccccagcgtccacgccatggatatttcctccacagaagtacaatgctgattatgatctgtcagctcagcaaggggcagacaccctggccttcatgtctctcctggaggagaagttgatcccggtgctggtgagtgtgcccagacctcccagcatccatggccagccggggaggggacgggaacacacagacccacacagagactcaggagagcatggaggtcagaagcccaccttgaatcagacaggtgcactggctcagacctgcctgtttcttcctgcccacccaatccaggtacatactttttggatagacaccaagaactacgtagaagtgacccggaagtggtatgcagaggctatgccctttcccctcaacttcttcctgcctggccgcatgcagcggcagtacatggaacggctacagctgctgactggggagcacaggcctgaggacgaggaagagctggagaaggaggtagctctgagaccgggggctattgtatgagatgagccccaaggatgctggccaggaatgggagtgcttaggtgcggaggtggcactgttcccgcagctgcaagcctacctgtgtcgcccctacagctgtaccgagaggctcgggagtgtctgaccctgctctctcagcgcctgggctctcaaaagttcttctttggagatgcgtgagtctgactccaagagggtaatgggtggcttggaagaagatacaggttcagatggagcagctggagctggggctggggctggggctggctcaggctctggataggaggtccctgagacagatactggccctggtgacagtggggctgtgcgtggggccagagccttctcagaggtacaaaagggtagggtgggagggcagccaggcacaggaagggcctgaagagctgtggggcactgagtgtgccctttatgcagccctgggatagagccctattcagggccaggctggcgccacctggggatctctccccataccaggtctagaactgtgtgtcctgtccttccctggtggccgcctgctgcccagagcccacctcccaaggctgactcttcctccagctccatctttaccccttctaccccagtggttctcctccatcccacccttctctctctgctccagccctgcctccttggacgccttcgtcttcagctacttggccctgctgctgcaggcaaagctgcccagtgggaagctgcaggtccacctgcgtgggctgcacaacctctgtgcctattgtacccacattctcagtctctacttcccctgggatggaggtaaggggcagatgggag

SEQ ID NO: 4444 - DNA, 6000 bp, Homo sapiens
tctgccacagccctagttccagtcccaatcatttcttctgtagcacgttgctacagaacaacgaagtctgcttttttgagatggagtctcactctgtcgcccaggctggagtgcagtggcgtgatcaaggttcacctcaacctccacctccttggttcaagcgattctcctgcctcagcctcctgagtagctggggttacaggcgcccgccaccacacccggctaatttttctatttctttttttttttttttttcctgagacggagtcttgctctgttgcccaagctggagtgcagtgactacaatctcggctcactgcaagctctgcctcccgggttcacgccattctcctgcctcagcctcctaagtagctgggactacaggcacccgccaccatgcttggctaatttttttgtatttttagtagagacagggtttcaccttgttagccaggatggtctcaatctcctgacctcgtgatccgcccacctcagcctcccaaattgctgggattacaggtgtgagccactgcgcccggcctaatttttctatttctagtagagatgaggtttcaccatgttggccaggctggtctcgaactcctgacctcaggtgatccacctgccttgacctctcaaagtgctgggaatagagtcgtgagccactgcgcccagccacagcagcttctttttgacagggtctcactctgtcaccaaggctgaagtgcagtggctcaaacacagctcactgcagcttcgatctccggggctcaatcagtcctcccaagtagctggctctataggcacacgccactgcgcccagctaattttttttttttttttttgagacagagtctcgctctgttgcccaggccggagtgcagtggcgcaatctcggctcactgcaagctccgcctcccgggttcacgccattctcctgccgcagcctccccagttgctgggactacaggcgccagtcaccacgcccggctaatttttttgtatttttttagtagataccaggtttcaccgtgttagccaggatggtctcgatctcctgaactcgtgatccgcctgcctcggcctcccaaagtgctaggattacaggcatgagccactgctcccggctatagcggcctcttaactgagctttctgatgttggtcttcctcgactttagctcattttccacctttctctgaaataataataattttaataaaatgatgacaactggccaggcatggtggcttacacctgcaatcccagcagtttgggaggccaaggtgggcggattgcttgaccccaggaatttgagatcagcctgggcaacatagtgagaccctgtctttacaaaaaatacaaaatgtagcctggcatgttggtgcacacctgtagtcccagctacctgggatgctgaggtgggaggatctcctgagcccaggaggtggaggttgcagaaagccgagatctcaccactgtccttcagcctgggcaacagagtgagaccctgactcaaaaaaatgacagctttgccactcctatactcaccaacctcctcttgtatgggtgctgctgactctgctctttggtagtgtcccaacagccctttactctagccttgcccacctttccaggttcctgacctacccctcctatcagccacccccacttcaggcatattcacctctcaaccattctctgaacacagcttaccttttcaggcccaactcctttgtaccagccatttctgtcaatctgcctgatatgatcatccctctgcccattgcttcatggttttgtacccccatcaactcagtccaggcatcagctggtaaagccttccctgaatctccatggccgggcgcggtggctcacgcctgtaatcccagcactttgggaggccgagacgggcggatcatgaggtcaggagatcaagaccatcctggctaacatggtgaagccccgtctctactaaaaatacaaaaaaaattagccgggcgtggtggcgggcgcctgtagtcccagctactcaggaggatgaggcaggagaatggcatgaacctgggaggcggaggttgcagtgagccgaggtctcgccactacactccagcctgggtgacagagcgagagactctgtctcaaaaaataaaattaaaaaataaataaataaattaattaattaattaattaaaaaagcctcccctgaatctcccagctctaggtgcccagagcacttagacaggcttctcatttctctgacaagtcccgcacaggtttatttacttctctgactcttctactaagtggtaagctccttgggagcaacaactgagtcccatcagctctggatcctcaaaacctggcatgcagtgcctatgaaaatgttctttaaaatgttcttggaggggccaggcacggtggctcacgcttgtaatcccagcactttgggaggccgaggtagacagatcacttgaggtcaggagttcgagaccagcctggccaacatggtgaaatcctgtctttactaagaatacaaaaattagccgggcatggtggcgggcacctgtaatcccagctactctggaggctgagacaggagaatcacttgaacctgggaggcagaggttgcagtgagccgagatcacgccactgcactccagcctgggcgacaagagcgagcctctgtctcaaaaaaaaagttattggaggactagaggttttttcaagctcaaaatggagcctagcatcacatttaaagatggagaaacaaagatcagggtgctggggaggaagctgacttggctggagaagatacactggagtgcacattggggtgggcagagcaggtgtggatattcaccctgtgaaatgcagggacaggttcagggacttgcccaaggacatgtggtgagtaagtggcaaggttaagattcaaacccagttctcctacctcccactgtacagtcttcagaactttttaaaggataagaaccaaatgagaggatgcacttctatagtgcgcactatgtgctgggcaccattgcagtttacaaattttaacttatttaatccttctgataatgctatgtggtaggtacaacctttcacccacattttataggtgaggaaactgaagtacagagatgttgagtaacttgtccaaggtcacagataagaaatagcaactgggcatggtggcttatgcctgtaatcccagcattttgggaggctgaggcgggaggatcacttgagaccaggaattcaagaccagcctgggctacacagtgagactctgtgtatagaaaaaagaaaaattagccagatgtggtggcacacacctgtagtcctagctactcaggaggctgaggtgggaggattgctagagtccaggagatggaggctgcagtgagccaagatcacgtcactgaattccaatctgggcaacagagtgagaacctgtctcaaaaaaaaagagaaatagtcaggatttgaatccaggctaatctggctccagaggtcatgctcataaatccaaggctatgtgggctctccatgcaaattatttaatatcagaattatggttataatgtttcctttctccctccttgttaaataaaatcataacacctttccaggggatgagcatctttccaaaaaacttatcatccctgcacttgtcctcccccagactcttcccactgctctgcacactttttgtgctctgccctgcaccctctgccaggattctcacctgccattttttcctcacagaagtgcatcagcagaggggagctccaggtgtctctgtcatatcagcctgtggcacagagaatgacagtggtggtcctcaaagccagacacttgccgaagatggatatcaccggtctctcaggtagcagctatttacttcaacctatttcttactgtctgaaccatccccgactccttgcctgtggcccagatagacctccacacttcaagatccttgcctctttcacttttaatctgctcctctttctgtagacattctcttcctgatgagtatctacgtccaatagatttccctggctaggaagattcttcagttgaacaaatggggtctttacatttggcaaggtatcctaaataatattcatgccaggtgctaagagagacttctcaaaaaggctgcaggcatttgtctctgtgccctttaatatacttcttggtatcatgggatttcttcagacctaacctgagaaagttgttctgttctattcctgcttggtttccttggcccctcatccaggcaggcagactcacatatagtcagtgtgtgtttattgtgcaatcactaaagaacacatgggatggccatcaaagatacgaacaacagagccccccctttcccaacatgaaattaccattacataggagaggactgtgtcataggtctgtctccctttttcttatctctttgggggccccagatccttatgtcaaggtgaacgtctactacggcagaaagcgcattgccaagaagaaaacccatgtgaagaagtgcactttgaaccccatcttcaatgaatctttcatctacgacatccccactgacctcctgcctgatatcagcatcgagttcctcgttatcgacttcgatcgcaccaccaagaatgaggtggtggggaggctgatcctgggggcacacagtgtcacagccagtggtgctgaacactggagagaggtctgcgagagcccccgcaagcctgtggccaagtggcacagtctgagcgagtactaatcctgttcttctctcctctaatccccgggggccaagctggggagggatgtggaggggaaaaagatgacagagaagtggactccaaacctcattttagttgtagaagaaaatttcttacaaaacaaattccacaaagaacaccctatatgaccacagctgcagatcagttcttagcaatgatgtttttttttctgctttgcaaggcgctagaatcttttattttactttattttttttgaggtggagtttcgctcttgttgcccgggctggagtgcaatggtgagatctcaactcactgcaacctctgccctccaggttcaagtgattctcctccctcagcctcccaagtagctgggattacaggcacccacgagcatgcccggctaattttttgtattttcagtagagatgggtttcaccatgttggccaggctggtctcgaattccagacctcaggtgatccacccgcctcggcctcccaaagtgctgggattacaggtgcgagccaccgtgcccggcctctggttttgttttgttttttttttttaatgggggacaaaagagagggaaagacccctataaatctatatataacaatgtaaccatatacttgcatgtctaatacaaactgaagaaattagcctaactgccaatatcaagttgcagattttaatccatggaaattgtgttttgtgctgaattgtatttgctgattacctgaaattggcttctttttattgggcttctctggagaatttctcccactccccacctctgcagaagaaaattttgctcttataaaacctcatgttttcatcattcccatcttttctttttattgcctcttatatctctgctctttgacctcaaggtctagaggtctgcagtaagccaagaaacaaaggtggggtggatgaggcaaggtttgcaggagaaagaggaattgagaaatggggtatttttgctatcagctcttctgctatgaagtagtaaaaggcagtctataattaactgacagacctaactgaagcacagagaatacatcagacttatgcatccaagacatcagaacttggattttatcaaacttgatgacttctctaaaaggagctttggaaacttcaaattcagctataggatagtaccaatgaacacatccagctgatcccaaaagctgttttcaggtataaggacaaggagaggagacaagtgacgaca

SEQ ID NO: 4445 - DNA, 6000 bp, Homo sapiens
gatcctggcagagaacggtttcctgccatcacggctactgggaatccgcctcgactgggatgaccggaccatgaatgatctggaggacagctatggacaggagtgggtgagtggtgctgtgtaaacacagcgcacatgtgtgaaggtacgggaagctgaatgcctggcaggagtggccagtggtggccaactgggactggggctaggggtggatcaggagaaaccatgctaccttctggtcctaccctttcctccgacactctcatctgtctctgcccaccctccctccagacctatgagcagcggaaggtggtggagttcacgtgccacacggcattctttgccagcatcgtggtggtgcagtgggctgacctcatcatctgcaagacccgccgcaactcagtcttccagcagggcatgaagtgagtgcccacccccatggcacctacccacccaggctctgggcacactcaccaacccacacaggccaagcttccaactcagccctggaccagagctgtaaggagggcatcagattttaatcttccatctgtatatccatagataggtttcatatagaagagagaagccatgcttcaggctcctaattttgcattttgttattgtctctctccacctttcttctctccttctctccctcccttctttcccccatctcctacttgagtgccacctgctcctatcctttgcccagccctaaatccagtgtcttctgtgcccacccctcccctggccttccgcaggcagtctagtttatagcacttgcactgtggttctggaggccacgtgctgccgagggtcgggttcagcgcttcttgcagtgtgagttccagcgtgccaggcactgtgctaagtgcctaacacattgtttagccccacgatagctctatgaggtgggtattactgtttacatttcatggataagaggccccaaacaggttaaatgatgtgcccaaggtcaccaagatggtaagggttcaccagatctgtctctaaaacccagccctggctactacccaacatttctgtgctcacaccatctggcactgtttggaactcagtaatgactgtgattctattatgggtggtggttgagcgctgaaggtttcatgctggttccttttattttctcctaccataaacaatggccacaattcctcacatgaggttgttacagtttcttagtttggggctggggagggtggggagaagatgccaaagtgaagttaataacacttaagatccaagggagaataaagtgaaaagcctgttagataaataaaggtaacatgaaggaaggagattccagtaagctaaaaatactaatggaaaaaaaatgcaatttgaagagaacaaggagcagagagtctaagaaattgggtataattctggggcctgggacttgctatgcactgcagggatgacacacgaaggtgggaacatggccatagtggctgcatccagcccatcttagaggcaaatgggaaaaatggcaaatgaaaatcaggctgggtacagaggaagagtactaataccaccacaggcctcaccttaggtccctgggccactggggatcctcagagatgctatttgccttattttgaaaagctttatgaaaataaagcactcacctatgcgaaggcaaccaggcttactaatgtgtcattcttaggcaaaagccaagagcgcatatcatgacgtggtgatcggatgctgattcacagttctgtctggaagccatggatagttctaattaattttaaatggggaaatgtattcaatacttattcacaaatgtagcttgagagacaaacaattaaatgtggcctttacagaagaaaataaggaggtccttagtgagtgaaaatttggaaatcactggcttgaaccaaaaagaggtaccttgtgtaagaatacaaaagatggagtagccggggacagtggttcacacctgtaatcccagcactttgggaggctgagacaggagaatcaattgagcccaagagtttggtactagcctgggcacatggtgaaactctatctctacaaaaaatataaaaattagcagggcgtggtggcacacacctgtaattccagctactggagaggctgaggcaagagggtcacttgagcccaagaggtggaggttacagtgagctgtgatcgtccagcctgggcaacagagtgagactctgtctcagaaaaaaaaagtggagtaataatgtgactgaacattttccaggtctgtcactgaacatttcagtgacagaacattgcagagcttttcacgtgttatctcccttaattttcccagcaaccctatgataaaaaggtaaaatctccatttgatagagaaggaacgtgaggctcagagaaattcaacattgcctgcaacccaaagctagtcaatggcagaactgggaatagacaccacctgtctgactgcagaaactgccctgagaacctccttattctatcctgcttttcaattctgataaagtgaacatatattaaccacttattatgcagtgatcccctttacattctctgaattaaatatctataatgaaaccaccaccaggaactgtgggagatgctgagacggtagaagacatacatgggccctgcactgaaggagctttcaagcatcttgctggggagacacactttcatgggccctgtgcctggagcaataacaagatcatgagacaggccccatgttgaccaccgtgtctccagtacagaacacgtcacccaacacctagaaacaattatttaatgaatgaatatacgtgcaatagacaacattcggacgtaaactcagtaagcagaaaaacaaataacatcttcctttggttacataaagcatgagaagaggctgttggaagaagacatgcgactatgtcgtttagaattctctctcctctttcccttgcaccccaggggtatcccaggatctctgcctccatgatcccccttcacctgccacctcctttctttgcctttcaggaacaagatcctgatttttgggctcctggaggagacggcgttggctgcctttctctcttactgcccaggcatgggtgtagccctccgcatgtacccgctcaagtgagtgtctctttcgggcggcctgagtagtcatacggggggccttcagccccctccaggatccaagttctgatcgctttgaatgctcctttatgtgacagccaccaagccaacctctgatgctgctgacactctcctccattgctttcagagtcacctggtggttctgcgccttcccctacagcctcctcatcttcatctatgatgaggtccgaaagctcatcctgcggcggtatcctggtggtaagcccctccacattccccccagcaaagtgcaagccccaccaccagctcctccctccaggaccacacgcagactccactcccactactggttcctgcttctgttcctcaacaccctcagatcctggggtcccaggtcccaggagccctgactctttcgaacctgttgtctctgccctcttcccatcagattctaaaccccgcctaactcacagttggtctccgaggccctccaccttccacctgaaaccacagaacatcagaattagaagggcctttccaggtcacctagtcccacgtccatattttacagatagaggaggctcagaggtgaatctgttcagggtcgtaaagcaaagaatagcaggactggtactagaacccaggcctcctgatccccactcatcaaccgacaagttattgtttttcctacaagcgttttttaatcacttagtagaggttaaaatatgatggcttacaaaccaaatactgtccaggaatactgtttggtttgacctgtgccatattttgtgtgtgtggggggaggagggtggattaattggtccgatatagaaaatttagggtctttcacataaaatctgaattcgacttctcctgaagatcagaagagctgttaatcccatgtccacatctctgcacagcaagaatggacagctgctcccttagactctcgttcgtcacctgaagaggccctgtgggcgtttgcattttcaccctcgacctattctgccccagcctccaatgtgctaaatacaagtctcccctaaaggcaggttcaccctcccttcctttaacctatggccccagctcactggacctccttctcctccctttcaccttctttttttttttttttttttttttttttttgagacggagtctcgctctgtcgcccaaccaggagtgcagtgcagtggcacgatctcggctcactgcaagctccgcctcctgggttcaagcaattctcttgcctcagcctccagagtagctgggattgcaggcgcatgccactatgcccgactaattttttgtatttttagtacagacagggtttcactgggttagccaggagtcttgatctccgcctgcctcagcctcccagtatgctgggattacaggcatgagccactgcacccagcctccttccaccttcctaagccacttcccccagtgcccttcaccaggcttctccttccacctggcttcagcgacccaagcccctaggaaattgatctcttgcctccttttaagctcatgctgcaatctccactcccaatctctctaacaggctgggtggagaaggagacatactactgaccccattggaagaagaaccaggcatggaaagatggggagctctggaggtgttgtggggatggtgatggagagggatggaaataacgggtggcattgggtggcaacatttggggagagataatgaggcaactcagcaggctaagttgcggggtatataaattggggtgatgaccccatagacctaactgtgaacaatcagattagacactatgtgttagagtccccccgaccagatccttttccatcccactccactatgttgtctattttttctgaggaattaagggttaccccaccctgcccactcccatcccttcaaccccacttcctactgtaatagatcagcatccaaaagcaggaacccatctaaaccagaaggaagccctctcagatcaccccagcctcactccatttcccacttccacccccgttagcttcctgcaggactctatccctggcttccccttcagaccttgcaatcacaaaaggttcttctggtgagtgcaagagcctgagactggaaaaggtggacttgtctcccagtcgaggctggtaagggaccttcagggagagctgggcagacaggtgggagatggaggtagggctggctggaggaaggaaacaacaaaggaagtgaggtagtgccaatgacaggacatttgacatgagtctccagatagatgtcgtggactccagctctacgtcccacattttagaataccccaccagcagaacaaactcagatctcatcagggtagcagcagaggcaggaccagaaggcaatcaagagcttccagaaatgccacacttgtgtgccacagagttccccgctgacccttggttaggggtcctcttagtccacaaggtccggatgtcactcatgtacttaataacacttcaccttctgtaatactaagtcctcagagctccatgctgttctgaaagggatggccacaagttctttcccagcctcttccattccctttcttttcatgcccatcccgatgaacctgcatcattccccgacactgccaagccaaccctggaaaaggagttcgctggccattggctagaatcagggtggagaagttccctgaaccttcctgtctcccagggacatgtatgcttccagggacaagcttaggtcatgaacatggtcagaacctttggacaagaggaaaaatactaagagatttgctttttctgggtgcggtggctcatgcctgtaatcccagcactttgggaggccgaggcaggtggatcatgaggtcaggagttcgaggcgag

SEQ ID NO: 4446 - DNA, 6000 bp, Homo sapiens
aggtgttctgtcagtagtcaatgagcacatggtaaaaatagatgttctttcttagtgattcgtgctaggcttttggggatgactcctctaacacctgaaggactagaatcaaattaaatagggctacaggctacagagactgtgaaaggtgtactacaggacacaacataatgactcctgagcagttaatttgtagttagaagcaggtctctttgcttttctagaatcctttcttcctggaccttctcccccaaccttcaccagttatggtttttttattggaataaataattaattttggtacaagtaaacttcagaggtaattttatctctagttgtaactaaaataataggcctatattaagcaatgtgtttcttgaaacattttcaatagctaaggcctattcatgcagaaagtagctgaaaacatactcagaccaatttttcactttattgttgtaattctttgtgtaaaagcaaagataaataaataaatgaaatggagggtggggagggtgagtaccaagagatagagtaaaacagctaggttaatgtaggttttgttgttgttttccttctttattatacccaaaagtgaatgtcttaacaatggtaggttcatttcaaagttgatcgtggttctgtggatcctcttgaagtcctgagcagcctcatttgccctcaaaatcgaggtgctgaggcatgttccatagagactcagggctccttccacctctaaatagcactcagaatcaaacttcatagaggtgttctagattgagctagatctgtcagcagaccccaatctcaacctacatctgcagtttctctgcatcctttctttcatccatcccttcatccagcacctgtgttctgccaagttctaggaagttaacaaagtccctgacttaagaccttattatattctaagggggaagaggaatgaggataacatcaggcagtggtaaacagtttgaagaataccaagtccatcagcaggaagggatttcttcagtgttttcccatttactttcatgagatagttgtattcttttgacatgaaagacagtactgtctcacatgaaagacctcattgatattttaacatttacagactaaaagataattctgtgttctttttcctctttactttctctgttctcattcttttctactcacataatatatcaattatctactgctacgtaacaaaccccccaaaatatagtggcttaaaacacgcactatttatttggctccccattctgtggattggtcgagcagattctggtctggatgagctcagctgatctctgctggctcacttgtgcatctgcagttggctagaaggttgactggtagctggacagtctacagtggtctcacttacagtctaaccattggcaggctgttggccaggcagacagaggacagctgggccatgcatctctcatcagccatcaggctgactttggcttcttcacatggtagtggtggctgtgtgggtcccaagatcagtgagagtggaagtggcaaggtctgttgaggtctgggtgtggaaactgcacagcatcactgctgcctcattctgttagtcagagctgatcacaagatcagcccagattcaaggggtagagaaacagatttctactcttgattggaaggacctacagcattatgttgcaaagagtaagatgcagagaaggaaagagtttgtagccatttgtgcagtcagtcacacattgtaaaccccttctcccatgaacataccctaaaactcttagtgagtttttaggaattatgatatggggttttattatctaagaatttatataatttaatgttgggagttccgtcctattcttggaaatagctgttaccagggaacagttagtttaattctgttcctagtagaaaacagtcttttttttgtttttttgagacggagtctcgctttgtcacccgggctgaagtgcagtggcgctatcttggctcactgtaagctccgcctcctgggttcacaccattctcctgcctcagcctcctgagtagctgggactccaggcgcccaccaccatgcccggcgaatttttttgtatttttagtagagacggggtttcaccgtgttagcaaggatggtctcgatctcctgacctcatgatccgcccgcctcggcctcccaaagtgctgggattacaggcgtgagccaccacacccggccgaaaacagtctttttaacttccttttgttttttggtggggttagcatttaacttgtagctttctgagatgaatatagagggtctgtatgattattaaccatgtgatctgttaatatttcctatgacagccattatagactaaagataaacacacagagtttgactatttaatttacttgaccagttacctcagtgcattttaaagtatgtttgtgtaacaagacgttcataataataactaacatgtattaagtactgtctgtgagacactgcctaagttataggtatcatcttatttaattttcataacaacaaaaaacaaaaatgtagatattattagtagtaccattttagagatgaagaaacttgtgcttagaaatttacaaatgtgcccagggccacgtgaccagtgctcttctctaaggttcaacaaagacgatatcataattcagactgcagatctgccaacattcaaatggctctagtcctcgagtgttattttctaactccgcttttagatgcaccattgtatagcccttacaactgggcctgtcccttctgtagatgtgggagtagctgaactccacagaaccccaggttacacactaaggacacaggttgttagggctcctggatgagggtaagtgtgtttattttaaaccacgtgcttttggctattgagcttatgatttcaaaggtgaaagcttaagcacgttattagacttctcaaggagagttcccctagattgggagaaaagttgacattgggtaatattaaatctttcttttaaaaccagggctattttgttgttgtttacaattttaagagtctagactgaaagagtcatgaaatgcagccacctatctgacctcttcccccaacagttagggaattcgctctgcccccaggccacccaaccttcccttgctctcctgaatgggaccctgacaattccctggaattgtaacctcttccttactgctgaggctgagaagaggatcttttctactttactccatttagggtttttctttatatctgtgtagattgtggctttttgttttttctttttaattttattttaaaacaggaagaacagttatctgatattaaaaatcaaggaagcaatatttgtattggtcacaatacgctcagactaaaagaattatgctgtaagtagttgtattgaagaatatttgaagtgcttttaaactatttgtttaaaactatacctatttgtataacgtgaccagatcaaattgattgtatctttgggtggcaccaaatatgttggtttcttgcatggattgattattctgaagctcatgatttctgtgggtctcaggtgcgtggaagttcccatcttagtccttaagactcttaccccaattgtaagagctgaggaattctgtgatagctattaagataagagatattcctaagaaggaatatattattacagaaattttcaaacatcaaaaaggtttgaaagaataatgtaacaaagccccatgtacttgctttaactattgtcaacgtatgtccaatcttgtttcaaagtcagtcctggatgtatcatccataagaagtcttcctgaagacattcaagagggaagtctttgctttggaaccctgatgtgatcacgttaatcattgcttctatgcctgtagctgaaggaaccgccagcgttttcagtcctctaatccttctgcttcccttttccagggcccagtcatatatgcacagttagaccactccggcggacatcacagtgacaagattaacaagtcagagtctgtggtgtatgcggatatccgaaagaattaagagaatacctagaacatatcctcagcaagaaacaaaaccaaactggactctcgtgcagaaaatgtagcccattaccacatgtagccttggagacccaggcaaggacaagtacacgtgtactcacagagggagagaaagatgtgtacaaaggatatgtataaatattctatttagtcatcctgatatgaggagccagtgttgcatgatgaaaagatggtatgattctacatatgtacccattgtcttgctgtttttgtactttcttttcaggtcatttacaattgggagatttcagaaacattcctttcaccatcatttagaaatggtttgccttaatggagacaatagcagatcctgtagtatttccagtagacatggccttttaatctaagggcttaagactgattagtcttagcatttactgtagttggaggatggagatgctatgatggaagcatacccagggtggcctttagcacagtatcagtaccatttatttgtctgccgcttttaaaaaatacccattggctatgccacttgaaaacaatttgagaagtttttttgaagtttttctcactaaaatatggggcaattgttagccttacatgttgtgtagacttactttaagtttgcacccttgaaatgtgtcatatcaatttctggattcataatagcaagattagcaaaggataaatgccgaaggtcacttcattctggacacagttggatcaatactgattaagtagaaaatccaagctttgcttgagaacttttgtaacgtggagagtaaaaagtatcggttttattctttgctgatgtcctttctgcttgaaataacagtcaccatacagctaaaggagaggagtttctttccttctaagtaggcagaaatggtatcattatgttgccgctctccaatctcccagagctcgctctctagagaatcaccttctttcgcttttttttttttttttgaggtagagtctcactatgttgcccagactagccttgaactcttgggctcaagtgattctccctcctcagcctcccgagtagctggaacgaactatagttgcaccactgcagctggcaagaatcaccttctttataaagcgtcagtcatgcttccagcaagaggcagcatcagtcatggctttataacagcttcatggtgcctcaaagactgttgaggttaatgagagcctagattagacagtttggctgtccttccctaaaacttgttttctcctattcactactccccaccgcacttaaaatctatgagtttttactttttactgggaatggaaagtgtggtgaagatcattcaacacttatgttgtcatttctcccattttctgaatttttttttaaatttccccccttttaaaattgttcgaaagcccacagttatggaaagaattactgtctagatggtctgcagaacgtgtttggggtgagtgggagtgaggggcaatgttactttttctccctgtagtttggagtccattatgagctgctgctttttcttctcatcttgtcatcttctggggatgtttgaaggctgagttccaacagaattcacaaagggaataaaacaggattgagattttgaggtgtgcacaaggtggtaagataaagggcatatgagcttcaaaactaatgctgttgcatacatgaagccttttgttttttgaggagctatttttgttattcttgtaacgctccaccttacatgccacatctgtgtgagtcaacagggatcaggtttggtcaccacacatgtctgaagctgggcagcgtctgctctgtgttctgtgtggaatggagaaaaaaacgcctgccctgctgccttccatgttcataggcccagcccaagagagtgacacacagtgctggccctgagacatttccacaaagtggtcaactctgccttgcatcctaaaactt

SEQ ID NO: 4447 - DNA, 6000 bp, Homo sapiens
ctctaagcccccagaatcctcgccacatctcactcaagtcaagtaggaaggcttcaaagtcaccatggctttgccctgatgctggcagctcgcagctccccacaaggagccctcactctgaaaaagtcagcctgcaacaacagtacagtagtctgcacctgcatgaaatgagaatgccatgttactttctgatatattcatcaggaaaaaacatttgaaagtcacagcaacacatgttcccttttctgcacattttaaccaagaccttgtccccacaaaaagcacaccatctaaaaccttcctatgcagagtgtggttcacacaccaccagcatggcattgccccagcacttgtcagaaaggcagagtcccaggccccaccccagcccaactgaatcagaacctgcattttaaccagcccccaggtgatgcatgttaaaatttgagaagcccagacctcagatacatacatccacctgcacaggagcacacctatacaagcacatgcacacttcaggtaggagctgggggagatttgtgccacctgcctccttaccttctttgtgaaaagcacagaaaggagctgtagcctctgcttcatctctggagcctcccattgagaagcatgatttctataaggcaatgtaccatgaatagaagcaatgtaccatgaaaggggcatttgcctctagagtcttccataggatgggaaaggaggagatgccaaggagagaaggtgtcgtgggagaaatgaggccttggagctttgctctgcagcagtgtttccaatccactcccttcctggcacctgtcttgccctcagcctctcctgttcactgttggctgaggagcccacttccctcagtggcatcagatggagggaaataccttcagggcctctttcaagcagcattgtcacttggggacatgtggacttcctggtgacactgtcctttgatcagagccagtctttctgcccaactctgtggttttggtcacccaggggaggcgtcaccttctccataaggcactcactgggtccgttccccaaccctgcttggttcttgcactgggctttgcagccaggaggagagagccctgtgctcagcgccctccccaggcacaccccgcccactccctgtgtgctggggcgtgaggatgcctgggcggttgtgtgcataacgatgttcttcttttctccctctccaatgctaacccgtcggaactaacagcaagcattcagaatgagcgtaagtgccctgtgtgcctctctgtgcctctgggagttgggagggaggaatgaggcatgaggtgatacctggggattagtggcctgctgggacttctgctggggcctcttcataccagagccctgtagtgaggtatcttactgcgggggaaggaaggaggcttgcctgcagcattctcttgctgggaaagacagaagggcacgtggtaagaagagggtcattggatcgaagctcatgtgcaccacagctgtttccccatcctccagtggctggcacaggaccccagggtagcacactggcacttgggacctagaaggggaggatctgggaagttcttggggactgaaggccctctctgctctagcctcaccatagtttggccgtttgttgagcctccagggctcagaaccaccatgacccctaagttctgaaaatctagctgctttttcttcctttattcattcaacagacatttatcaaaaactattgtgcactgtatgttgtgctaggcattgtaaggtaaggatgagtaaactaaaagtctggccttcagtttctcctcgggatgctatgggatttttttttttttttttttatggagtctcgctctatcgcccaggctggagtacagcagcacaatctgggttcactgcagcctcagcctcctggattcaagtgattctcctgcctcagcctcccgagtagctggggttataggtgctcaccaccatgcccggctaattttttttttttttttttttttacttttagtagagatggggttttaccatgttggccaggctggtcttgaactcctgacctcagaaaatccatccgcctcagcctctcaaagtgctgggattacaggtgtgagccaccatgcctggcctatgggattttttttttttttttaaaacagaatatcgctctgtcgcccaggctggagtgcggtggtgcgatctcggctcactgcaagctccgcttcctgggttcttgtcattctcctgcctcagcctcccgagtagctgggactacaggcaccctccaccacgcccggctaattttttgtattttttagtagagacggggtttcaccgtgttagccaggatggtctcgatctcctgacctcgtgatcggcctgcttctgcctcccaaagtgctaggattacaagcgtgagccaccacgcctggctgcctatgggatctttttaaagggattcttcttatgcttaatctttgacacccaccttctttcctgcggcaccatttaaggagctgggtctctagaatggggccctgttcaccgccccccacaccccacccacttgcctgcttgcatgtgtggcttctgaagctcttcatctcagctgttccccaagctggaccccagggaggtccctgcagccctgaccatgctccctgtgcactgttgcagtgacgcagccgccaaccatcaccaagcagtcagcgaaggatcacatcgtggacccccgtgataacatcctgattgagtgtgaagcaaaagggaaccctgcccccaggtgagtgaaggggaaaaagagtgcattgaaaccacccgcttgcctctgggcctgatgataactaaggcaaatgaggcagcaggaaaattggactcatccattccaaaaaatttccattaggcacctactaggtggaaggcataattgaggtaccaggaaattttgccggtaagcaaactggagaccagaaaacaagtggcttaagttcacaccaaaagccaggactggatgttcagttttctgactttccgtataacattctttcctccacgctgtgttcccatcatctgccccacgtttagcttataggaagttccttttccaagccaacttgagtctttcattctgagcttgcctctacctgtttatgtgctcattaagaccaagtaagatgtcaacagacatgaattaaaagcctgttgtgtgtgtgtccgggctctgtgttaggttctgttactcacgttttgttcgaccacctaacagtgctctggggaaggaccgatgtccttatgaagaggaggggaaaaggggtacaaaggtccaaggttacccagcttgaaaggggcagaacccagatttaaactcatgcatttctaccaaatgataagcatcggagacatgacagacgttattatctgcccccatccccatcctcaaagtagcatctacagactgagcctttcaggagcctcatgcaagattcagacccgtatgtgacaggaccacatctagggtgtgtctgtcagcaggagaaatgaggccaagcagaggcagccaggtatgcagcagctttattctggcctcctgggttcacacaagacagtctcaaacccagagctctgagcctgggaaccagcagggactctctcgctggccgtgggagtcaccctgaagggttagtcagggtaatggtaacctcacttgcttctgaggtttggtctttcccccatggttcctttgcagagacaataatcctgtggcactgagcagcccctgctgttccagctgctcctgctttccctgcttcttttacaagttagattgtgggcatctgaggatgtgaggccttggctgcagctcccaggaggagcagagggggccattctagtgctcttcaccagtggctcagttctactaggctgccatttctttaaaagctgccactgtttttttgtttgtttgtttgttttttctaattgagacggagtctcgctctatcccccagactggagtgcagtggtgcgatcttggctcactgcaagctccacttcccgggttcatgccattctcctgcctcagccctcccaagtagctgggactacaggcacccgccaccacacccggctaattttttgtatttttagtaggacggggtttcaccgagttagccaggatggtctcgatctcctgacctcgtgatccacccacctcagcctcccaaagtactgggattacaggcgtgagccaccgcgcccggccaaaagctgccactcttgggctacagggtgtggtcactgctatataatctgtactcactgagcagggcacaagtaacctaagccgtttcactttggctttaaaatggattgtaaaattaaggtggcaggaggagcagagccaactccctgaagtatttaggttgggtggaatatgaattcaagtttgcattcctagtagaaggttggaaatgtcctggggtggaagaagccacagattctagattctagaaatgaaaatctctcctcaataacgtgtttaacataacccccgagtagctacttcagtatctaacacttagagccacgagtcccagtcttaggtgggtagaaatactaacgtcaggcccctgccctggacagtcacttgggtgggacctgggactttgcattttattgagctctccagatggttcttctgctcagccaggctgagacctgttggtatggggtgccacgatgggactgagagagggaattttggtactgagccagggactagggatctgagatctgcctggagcccagagcccaccccattcgtcttggttgccactgctccccactctccacagcttccactggacacgaaacagcagattcttcaacatcgccaaggacccccgggtgtccatgaggaggaggtctgggaccctggtgattgacttccgcagtggcgggcggccggaggaatatgagggggaatatcagtgcttcgcccgcaacaaatttggcacggccctgtccaataggatccgcctgcaggtgtctagtgagtagcgtggggcagggctgaaatgccctgctcctgggtaaatggagagtggggggtgtggaaggccattccagaagggctgcccctgcccttggcctgcagttgccttggtgttctctatgcatcttccccacctcagaatgattccctggaaaggaagctcccaaagcttccttttgaagttgttgtctgcaacaatttcactggccactgcgggcacaggagacgggaaaggaggggagccttgaagatgcctcccttctcctgcctctcaagggcggccccttgagtaggctcacgtgccccgtccctctctcttgctccctccttctccaggtgccccttctgtttctcctccttgcatgcctgcctctgaccctgctccttgccccgggcccagccatcaccctcactttatcctctttgtccacttctctccagaatctcctctgtggcccaaggaaaacctagaccctgtcgtggtccaagagggcgctcctttgacgctccagtgcaaccccccgcctggacttccatccccggtcatcttctggatgagcagctgtgagtcttgggggcctggtgttgtgtttatatcttaaccttagggggtggggtgggtgtgttaagtggggaggggcttgcccaagctagaaggccttgatttgtgagaggcaggtgcaatgtggcaaccaggctgagaacacaggctctgcagagagaggctgcttgggcttattttctagcctggctgctgtgtgatcttgagcaagtgtgatcttgagcaaattgcttacatctctgggcctcagtttcctcttctggaaaaaaacagagctaatcatagtacttatctaataggattattataagaataaatgagtcaatacgtccaaagtgcttagaacagggccagacacacagtaagcacttggaaa

SEQ ID NO: 4448 - DNA, 6000 bp, Homo sapiens
actagtgatagcacaagttcattctagtagagtactctagatttgagtacaatagcttaggcaagccacagtgtggagataattccaaactctgcccttgcctctgcctttgaaagcatatttagcaggtcttcatgctatgattaccatgaaaatgggtttgcatttattaggcaaccttcagaagcttgcttagggccaggggactactttgcaatacaaataagcattttctgtcccttagcagaatgcccacggtagccccccaagttaatgaaatgaaatgggttccagcaggccattgctaggttgagcctgtgccaccagctccctccctgacccatgtcttgagcaccttccttgaactacgcaccaacagacagcagggactcacacccacatggccctgctgtctgggtgctcatgatctagtctccaggttctgaggcctaagactgggtcacagggaccaggatgagcaagagaggaacagaatgtgggggccggggcagccctgagatcctgggcttgactactaccccttgggtacccccgcctccttcagatccgctactggaaagctggggacaaagaagcagctgcggaccgagtgaggacagcagggctggacaccagtgcccgagtcagcggcctgcatcccaacaccaagtaccatgtgaccgtgagggcctacaaccgggctggcactgggcctgccagcccttctgccaacgccacgaccatgaagccccgtgagtctgtctgcctggggtgggggtagggcaatattttggagggtgggtgcctctgagatcattccttccccaatgataagacaaatgctctagcccaccagctctgggctgaacagaaattaggcagcgagcctaatggaaataagggaatggaattcatggcccctgaagcgtctcacacttctccaacctttggattttcatgggctttgtttcgtgggcatgacagaatgtgctgggtgtaactgctagaggcaaacatccagagaagggctggttaaaggtgagggggtgcggggtgccagggaaacgtttggacatctctccaattcttcctctctggcagctccgcggcgacctcctggcaacatctcctggactttctcaagctctagtcttagcattaagtgggaccctgtggtccctttccgaaatgagtctgcagtcaccggctataaggtgaggaagcaatcagctaggcccagaatgggaaggaacagctcctctgtgtttccagtgaacataagcagcagcaatttatagcaagaggcatctgagtgagacataagcaaagggtttgtgactgtgagaggaatgaaattcatgaactattctctcagtaacttgcagtagaaactataaaaacgggcagatggtatcactgcagaaaggcagagttcacaggggcagtgatggactatggggatggagtatgggggttcttctagcttaaggagtctacggaaacagttcagtggcctgcaagctttcctccaccaatgaggagctttgtcaatggggaggaggggtgaggaggctggacctcaagagcccagaaccatcgggtctcctcccagtacctaaagctggggatgactcaacgatcagccctggtgtcaggaaactccacctggaaacctccttcccacagatgctgtaccagaatgacttacacctgactcccacgctccacctcaccggcaagaactggatagaaatcccagtgcctgaagacattggccatgccctggtacaaattcggaccacagggcccggaggggatgggatccctgcagaagtccacatcgtgaggaatggaggtgctgctcctcccctacccttatcccctcgagagattcaggatccacccagatacctgagaggatcattcccacccaggccaactccaatctctacccgcaaaggaaagtggaaggcaggcaggaaccaagtgcaaagtagtcttagaactgcctcgccgccacctttctacccagcccccagaacatccccgagggccagggaagggcgcagggtgcagggggaggctgaggaccaaccagcaatagcaaacggcctacaaagcaccgtaggagtcggactgagaagaccacccagccgtccgctcccaggcctgcagctggccctgtgagtctccttaggaaaggtctcaatcttgccacaagggtggggctagggtagtcccaggcccagctgactcagcttgtgctggtttcaggcacaagcatgatggtggagaacatggcagtccgcccagcaccacaccctggcaccgtcatttcccactccgtggcgatgctgatcctcataggctccctggagctctgatcctggaacccctccctctgcgccgcagctggacgccacctccgacggacacagccagccccttcctgctgccaaggtggcctgacactgtgccagagagtggctggttttaaatacctactttaaacagtgccctttttgtaggaggtaggatattttatattctgccgcaggatagaacccacgcaaggattttctttaaattgagaggcaccaggcagtaacttccatgatgacactgacgcctatacctgagctctaggctgcctggagggaaggaacaggcccatgggaagaagggggttttaaaaacatgtcttcaactcagcagagatggccctctgggaccctatacggactccgccacttgagagcagtcctaggcccggcaggaacaccagacatgaacaggttgaagaactggagcgaagtgcacacctcaccatccttcagtctaaggaagaagggcaagccctgggaccaagagctctcccgccttctccctcgagcagcagcaaggaccctgacgctgtccccgataactccctaggggctcctgcctgcccaagcggctgagaaccagcgccccgatgcctgaggctgggagcctgagccccttcagctttgaggggggtgatactccaggctgtttggggtgggagccaaaaagagttgagaggccagggcccttggtggaaaggggcaccagccttggtctgagatagtcacaacccaggtgacgatgccctctcagccaacactgccaacctgaccctgtcatcccgattgacagcgccacttcaggtggctgggtgactaaagggcttgtcttggtggggtctcccacccctccaagacccattctgcacagtccctccagggtttgggcaggagatggccaatcatgcgcccacctctccagtgctgcctgcagtcagctcggcctccccgacctgcagccccagactctgctctcccagcactgactcactcctgcctgggaggggaatgcagcattcatgctgtgtgtcctggtattgggaggtttctgggaagggcagaggataaatgtggccctgcctgctcccaggtatacctaggaccacctggccagatccgctcccagacggccttggactgcttgcatttccccggagaaaaaggggttaataaatgggccatcctttcctgagctctgggtatactaccagtcacagaacgtcagagctggaagaagccttagagctcaacttcttcaagcccctcactttacagatgaggaaatggaggtggtccagagagggtctgggattcccaaggtcacacagcccagaagagatggggctgggttaagaactcgagtcttccacctttctgttcaaggctgtttgtctacccagaggaaggaggcactgctgaatggctatggcctggctaagaaggtgattagtcagtagggtgtgaaaattctacttcaaggggttcggattggtgatcatggggattggcatggctgggttcccgtccaaggtgtgggcagagcttctaccaaacttcaacatggagggctgacttgaagctccctgtccccctcactcttgccccaagaaaagaggccaaagcaagagcagattccctaggcaagagcagcagcacaactaggaaaccccaaagcccatgctccgacaggtggcccttcacagggggcagcgggacaggcatcttgaagggcatatgtcctcggaagctccgagcctgttttctgtagtttatagttagagctctattttgttatggttttttaaacttttaagtcctgctctattttcctgggcaggtttatgttgatgtttacccactacaattttttaaaaatataagctcacatgccttttccctgccacagccaaacccccactgcaccctacccacccacccctagcccaggtcagctttcctggagctggctaatgaaagcctcctcacctcttcccaacccttacaagcaagggtgctaggggctcagctatacgaccattctccctgacagggagtccaaacttggcctagcatccctcctggcccccctctggccacgacttggcctgtgcctggttctctatcagaaaggggatgctgaacaaaacctccttccaagttttatccaattcgttcctcattgcctcgggctgcgtcaggggaagcaggggacaggtgtccagttgctgggccgagggaggagctggtttggcataggacctaaccagtgaagctagaggctacagccactaaacttgcttcaggccaacgatagttactcacaagtaagtaccttaatgctaatgaggtccactaaaaaggggaggaaggcagacctcctgggagacccacgaagggtttttagccagggaaaactgagccccaggaaaacctaaccactgggcaggcagaatttgtttgagggatagaacgacaacaaaataaatgttcctgcagcctgagatttcaggtagagtactgactaaggtttaataagacaataggtgacctgaggacatgcaagcttgtaaaatgcaacagcctcctgctagagtgacttgtacatgagcttgcttgcagaagactagattagatgtttctcaggatcccctcctgcgcaggggttctctgattttcgtgttctctgcccagatgggctgggggagttgagagtgtgcttattttcactgcgatcatgagaccacagttctgggttatctcctctcatacatcaagccccagaggaggcggcaagaggaacagccacaaacaagtactttaccccacagcttagtggccagtaaacaccctggggactaggaaaaggaaccaactgtaggcacctctccagggcctagggagacaagtgtcctctcttctgcatacatttgggctccccttacagagccctttgccctggctctctggtccttgttgctctaacagtccagatgtacacccagcctcagggggaaggcagctctctccagacagagtctcagggcccagcaaggtcaggttatctgctttcattcagggcaacaaatgatacaaatggtgccagggagtggcaaggccatgggggtaggtgggggtgtctttttcttttcataaagtaacaacagacgagactgaggttaaacatcagaaaaaaacctctggaatgaccttcctcattccaggaggccctggaataaggaagaggcttctttctgagggagctttgaggaattttgacagctgttgacatgggatttgggaaaggtgaagctgtgactggaggggcaggagatggtccaagtgtccatccagagatgagactcttagaatcaaagtgttcagcccaggaagtcttggagatcccaccttctgtggccctgcaccttatgggaagccattaagggggctcatctaggaattctggttacagcccagtgctcatcccagcgtatgctgcctctttagggcagccccaagggccagccagcctgtactctgggcaagagcccaaaatggctaggaatgtttgactcccttaatctcttccccagctacagaggaatcttttctctgcctg

SEQ ID NO: 4449 - DNA, 6000 bp, Homo sapiens
atcagcagcagcagggtatgtccgaccatgactccccagatgagaaggagcgctctccggagatgcatcgcgtctcctacgccatgtccctgcacgacctgcccgcccggcccaccgccttcaaccgcgtgctgcagcagatccgctcccggccctccatcaagcggggcgccagcctgcacagcagcagtgggggcggcagcagcgggagcagcagccggcgcaccaagagtagctccctggagccccagcgtggcagccctcacctgctgcgcaaggccccccaggacagcagcctggccgccatcctgcaccagcaccagtgccgtccccgctcttcctccaccaccgacactgctctgctgctggccgacggcagcaacgtgtacctcctggctgaggaggccgaaggcatcggggacaaggtgagatgggccttctggggcagggggagactcagaggcaagggccatccgctgaggggccttgagacctggggagctgagccaggggccctccctggcagatactgacaccccaccgtctgcagagttatctaccttggttaaaggagtcgggtatgactaggccaaaaacaagagatgattcccaggatggctaatttttgtttccttagggctgtttttcaaaattgtgttttgctcatgctgatattaatgttgacttgttttccttaaatgggctatcaagaggcaataggtatagtagtttaaagcacagactggaagcaactctggttctgccacttactcagttaacctctttgtgcttgtttcaccaattgaaaatgaggataataatagtacagttgtaggactaaatgagttaatatatgtaaaatacttggaatagagcctggcatagtatcatctttactattggcaccaaccaaagaagataggggatccatgaagggtgatttgggaaggagaaaagctagtttagcacttcatgaatttatatattcgttcttttattcgtgtaacaagtatctattgaattcttatgttgtgctacaagaatgaacaagccagtgttgctgtccttgtggagctcactctagagggggtacaagtgggtgaatggacagagagatgggagctgctgtgggagcttcaagggagaggggacttgaggagagagcgaggagctggcaaagacctgtttgaggaaaccattgagctgaatcttgaataatttagccagggaagaactgggagaggggaagggggaagagagggcatagtatgtacaaaagcacacaagctggtgctaggggctactgggggttcattatggccagagcatctagcacttttggggattgacaggtaggcagaggccacatcacaaaaggccttgccatgttgattctgggagtagtgtgaagctatcaaagggtgctaggcaggaaactggcaggacgaggttcctctaggtctcaatataaagagtagattggggccaggcacatggctcacacctgtaatcccagaactctgggaggccgaggtgggtggatcacttgagggcaggagttcaagatcactctggcctacatggtgaaaccccgtccctactaaaagtacaaaaattagccaggcatggtggtgggcgactgtaatcccagctcctcaggaggctgaggcaggagaattgcttgaacctgggaggcggaggttgtagtgagccaagatcgagccactgcactccagcctgggagacagagcgagacttcgtctcaaaaaaaaagaaaaaaccaacaaaaaaaatcagtagattgggaagggagtgcaggacgggagtcaaggagactttggagctagtgcagtagtctaggctgcagcagtggggatggaaagaaggcgccaagtgcagaaaacatttggaagtgaaagtcagaagtagtaggtgagaaagtgaataggaggcaaaggaaagggaggcgtagaggatgattctaaggttatgggcttagtggctttaaaaatgggggaattctctagttgaggaatcacaggagaaggagcatgttttggggggaaggtgatgagttcagttttggacctgttgagttgcaagtgcctttgggagctgtccagctagggaggaccagctggcaattgggtctgtggggtaggggcctgggccagggccagtgctctgggagctggcgctgaggttgaaatcatgggtgtgggtgtgatcttcaaaggaggatgtgtcgaatgagaaggaggctgtggacagacccagctgacatgtaagtgacaggccaagcaccaggagcccgagagagagcagtcagatggatagaagtaaacttgcagcaaagcaaaaggaaaatgagcttgaaggaggaggaagtaatcagagtgaaatgcatagaaggggcaggtcacatctgggtttggaaatgtgcacaggcagtagcaagcagtggctgtcattgggaaccatggcctgaagccagtttctgtggattaaggagagggtggaagtgaaggcaggtgtgtagcttggctgggaagaaggagggtatcaggtggaggcagtctggttttgttggtttttttaagttgggaagcacctgagcccacctccatgctggctggagaggtccctattaggcagagatcgaagatagcagtgaggaaggggaattctcactggggtgaggtcagtgagtaggtgaaagggtgtgagatccagaagtcagcatcgtccttggtcacaaagagtcacctctgggaggcagaaatgaattcttactttgtttttattttctatgggggaagaaaccaaaggtgcaagtgtttattgagagcaggaggggaggtgggaagggctggcttgaggagggcagtaaagctttggcttggggcagagcaaggctctgagcaggaactcacgggtgacctgtctggtgttgtagaggctggtaatttgtgctggcagcaccctagtggttgcgatttgttttctctctagtggtcctagccagagggtaggaacagagctgaacgattatcaggctaatccagggttgggggttgctgggagggcatgtaagggtgacaaaggagttgggggtttgtttgggtcagagaatgctcaaaaggttggaccttgaaacctcggctagcagagaaggaggtggggataggagaaggctgatgaatgtggagaaaaggagatgggggtactgagggaatgagggagcaggtacattaagaataaagaggagtgagagagacaggagagggcattggagtttacaatttggggggtgggatagggaagacaaaggtcagagtatactcatagagcatgacagacaaggaatgaatggaaagataatttgcagtggcaagagctgagaggctaggttgtgggatgggctgtccacatgacatggagatgcccccttggacagtggtcaggaaggagggcagcaggtctctttgatgactggagggtgggggagaagagtgcaatggcagggacctcgaaggccaggctgaagcaacactgagtacagtagaatgctggtcccgtctccagagggcacaaaatgagggaggaagaggaagaaaaaatcactgcgattaatgagggctccggggcaagtggagctgcagtaagagcctgcaggggcccaagtgctagactatgggcaggaggcagcttgtttgttgtggaaggaggactctggaaggtccagtgggagggcggatgaaagagaagacagttcaagtggaagtgagaggagacatgatggaagaccaaacagttctacatttgggggatgtgaggccccgtggattttccagcgtcagagttccaagggaaactcagatataaagttgtttttaccttagatgatcaccagagcagatccatctccacgtacagttttaaattgtcctctcatcaacacagactgtttctcaagttcttgtgcatgtttacatttgaaaatgtttggatgttcattcattcaacaagcatttgtgtgtatgccgtgtgcctggcactgtatagcagctcaggtttggttttgcacttttctaacgtagaaagtgcttttgtagacatcatttcatgaattcattaaagcaatcctgtgagatagctaagccagctgaagatatcccaatttttttttttttttttgagagagtcttactttgtcatccatctcggctcactgcaacctccacctcctgggttcaagtgattctcctgcctcagcctcccgagtagctgggattacaggcactcaccacctcgcccggctaatttttgtatttttagtagagatggggtttcaccatgttggccaggctggtctcaaactcctgacctcaggtgatctggctttcctcagcctcccgaagtgctgtgaacggggcgtgagcagggcatctggttcagaagctgttgaactactctgggggtggggcggagtacctgtattctggattggtttcaaagatcaagccacaaaggtttctgatgattctatgtgggcatgacagaaagagagaagtcaaatgtggttcacagatttgcggcctggcagccagaaagaagaaatggtcaataactgagtcaaggaagatggcaaatagaatgagtacctggcaaggggtgtgaggtgggggcggggggtgggggcagaaatcagagctaggtttggggtaccttcagtttgaagtggctattaaacatccacgtggaaatgccaaataagcagtcagctgtacgagtctggagttctggggagagatccaagctagaggcataaatttgggagttgtcagcatatagatagtatttaaaatgatgggactgaaccatttgcaagcctagcctccactggggagaagtctgttctcagagtgaggagctctgcacgcgttggctaaaagggtggcgtggctttgtgaaattgagagctggaggagcccagcagaatgaaccaggttgttcagcccttaatgagcagacactctgcatgtagaggcagccaggcccacctctcatgggtgagtcaatgaatacattttaaaaatcaaattagaaaaatcctgtcaagcaggagtctctggtatgcagctattttatgaggagggaaaacgtgaaccttgctgtctttggttgcctagggctcccatgaagacctcctgagcagggggaagacgttggggtgggcagtgggcactgtcggaagctggtgaaggactgtggatgtttgcaggggcctgggggaagtggggcaggctcattagctggggagcttctctgtggggctctgccatgtggctcactgtgcccaagatatccagatgggagggaggaactctttttttgctgcttatggaagacgagacccagacactttgggtgacctgatgaggggacggttccctgggttcagggtgatcatgggggaaatggttgttcttgtgactattttatatccttctttagaaccctcagctttgttaggtgtatggcctggttgatctttataacatacctgtgaagttggcagagcaggtgttatctccattttacagatgagtagactaaggcctagaggaaaagagactgcttgcctatggcacccagctaggtcttggcagggagacaagggatcctagtctgtacccaagactcatctgagaggtgacgtcactgaacccggctggggaccattttatgcaaagtctatggagagcaggtttgcctcagcccgagtgggatgattttatctcttggttgccatttccccttcagttgcatagatttcctgacctggagctgtccttccaggaatgggcgtggccctgggggtcctgaggagagaaaggttgcttccctgtcacagaggaaaaaggtcttccagccatcggtaaaccctgctctgtcagctgactcccccagacccagaggccctgggctggtgtgaga

SEQ ID NO: 4450 - DNA, 6000 bp, Homo sapiens
ccagctgcttgactccctgcagaggctccagagtcctgcagagatgaccccttctcagtgctctccacaacagctctcataacaggtctggggtcgggagtgttgttgctcaggccaattctgccttcacagaaaagtccacgtggcacagacacacacactctgggagctccaaggattccgtcttttgccatcctgacaaatctgtccatccctctgtctgactatccattcatctaccagtgctctgagcacctctcatcttctcatctctctacttctcatcaccttgcatgtggggtgggtggtttggagccctagaatttacggaggaaatgggtcctggtgaatatccggcagaggaaggacattgatatgggtccttaggatcaagatactccttgctgaatatttcttttctcagaggctgtaggaagtggcaagcacatgctattttggtccaaattctaatcaaaagaagatattagatgtgactagaaatcatgacctttagaagaaagcttagttttctgaccagcccatcccttgaatgttagtctgcagctgggttggtaaacctcagtactgctgacagtttttttttttttttttttttttttgagacggagtctccctctgttgcccaggctggagtgcagtggtgtgatcttggctcactgcaacctctgcctcctgggttccagtgattctcccacatcagcttcctgagtagctaggattacaggcacctgcaaccacatccagctaattttttttatttttagtagagatggggtttcgccatattagccatgctggtctcaaactcccaacctcaggtgatccacctgcattggcctcccaaaatactgggattacaggtgtgggccaccatgcctggctgacattttattttgttgagatagggtctcgctctgtaacccaggctggagtgcagtggcacaatcttggctcactgcaacctccatctctcaggttcaaacaattctcttgcctcagtctcttgagtagctgggattataggcacacaccaccacgcctggccaatttttgtatttttaatagagatggggtttcaccacgttggctaggctggtctcaaactcctgacctcaagtgatccacctgcctcagcctctcaaagtgctggcattagaatcatgagccaccatgcctggccacattttattaaaaaaaatttttttttttgaagagatgtgatcctgctctgtcacccaggctggagtacagtggttgtaatcatagctcactggagacttgaactcctaggctcaaacgatccttctgcctcagcctcttgagtagctgggactacagacatgcaccaccatacctggctgatttttaatattttgtagagatggggtctcactatattacccaggctggtcttgaactcctagcctcagccttccaaagcactggggttacaggtgtgagctatgctgcctggccactactgacattctagattagatggctgttgtggtgagctgctctggacgttgtacaatgcttatcagagtccctggactctacctagtagatgctagcagcatttcctgccctaagccttaacaattttaaaaagtgggctgggtgtggtggctcactcctgtaatcccagcacttgggaaggctaagaccagcgatcattgaggtcaggagtagcctggccaacatgatgaaactccatgtctactaaaaatacaaaaattacagccaggtgtgtgcctgtaatcccagctactccagggactgagacacaagaattgcttgaacccgggaggtggaggttgtagtgagcagagatcgtgccactgcactctgcactccagcctgggtgtcagagtgagaccttgtctctaaaaataaaatcaaaaacaagaaacaatttaaaaagtctccatgcattgccaaatgcccccaggaggcaaaaatcatccccttttaagagcagctggtctatagcaatatttaagggctcttaaatgaccactcccttggtcatgccgatttgccattcttacctttactcatcctgttcctcttctggattggggctcacgccttccctgtccggcccttactcagacttcagatcatagctggctccctgtcacgaagcattgcctgaagctcaagctgagcttggtgctcatagttcctgacacttccctgcctctctctttacttccttccacaaatacagctttcaatgagagtgtctctgtgctcaagtccatatggagcgctggggacagtggtgagccagacagacaacattcctatgctagtttctcctactagggacaggctgaccgcaaacaaatgaacaatggccacagattgagctaaatgacatgaaggcagtaaacagggtgataggatagcactcttttgggtgaaatcgtgtaccctattatgacaaatttatttgtagaattttatttgatgttgtcctttctgacttagattgtgggtcccacaaaagcagggctgggatttaatcatttctgtatcttcaatgcctggagcagagtcagtgagtattttattgaatttaactgcaggaaagagtgaagggccaggttgcagcatggaggtgagaaatacattggtcctacgtgcctctagatagccatgtaggtaagtgggctaagtgggacagtgtgtagagtcagagtagggagacaccattctgggcacaaaaaatcacaaactgcttctgggagaagggggctgaccttcacctgagctccagagaatgagtaggatttggcaagatcatcagtagaggagatgctgttccagtggtgttgctatggttagaaaagggaagaatgtattagggaaatggtgagtcaaagtgaagcttcacttagggcagtgaaagggagctggacctgactgtagtcctccagtttttgatgatgttcaggtttggaggattacagccccaatcaagaatgcttttgatctttgtcatttctttgagggtaatgctgattgcacttgccaagacaacagaagtggtgtgggtgcttgcgtaggtgcggctgtcaagggctgttcagactccatatgctttggtttttgcatcctttttttgtaatgtttgctcttccaggctgtcagggtaaaagcccctcccccaccccccaccccctgcaggctccagtgtgctgtgctagaatggggtgaacccagccttgctgggttctggggtgatctgtcgttgtatttgccagtccctttttctttcttcttgctggtcttctctctagtgatgccagggagataggggaaatatttcagtgcccacattgcgtgctcgatgaagtaaacatgtttctagacagtagcatctgaaccaaactgatacaaatgaagttctatgtcaggtatattgtcattcatttttttccttttatttaggattcaagatcatagattcttggcataatggaaagagcacaggtttggagttggatgggcttaagttcaaatttggctttgctacatctgagaaaataatttgcctcctttttaaaaaaatgtatgtatttttttgagacaggctgaagtacagtggcatgatcttggctcaccataacctctgcctcccaggttcaagtgattctcttgcctcagcctcctgagtagctggggttgcaggcgtgtgccaccacactcagctagattttgtatttttagtagagatgcgtttcgccatgtcggccaggctggtcttgaactcctggcctcaagtgatccacctatctcagccttccaaagtgctgggattacaggcatgagccactgtgcctggcctcatttacctccttttagcctcagttttattacctgcaacatgggaatacaaggttatggagaaagaggtgatggacagaaaacacccagcatgcttgtacttagtacagaatagatacacaatacctgttactgtggttattgttacttttttcttccatggatgaataattccttcctttagcattaagaattactgattcttggtcgggcacagtggctcacgcctgtaatcccagcactttgggaggccgaggtgggcggatcacctgaggtcaggagtccacgaccagtctggccaacatggtgaaactccgtctctactaaaaatacaaaaattagctggatgtggtggcgggtgcctataatcccaactacttgggaggctgaggcaggagaatcgcttgaacccgggaggcggaggttgcagtgagccaagcctgcgccattgcactccagcctgggcaacaagagtgaaactctgtctcaaaaaaaagaaagaaaaaaaaaaagaattgctgattctccctctgtagcaaggaggtaacgttctacagagagacatttacatgtagagggggactgctgttgaaaggagctctcaaaatcctaatgcattatgaagagtgttacaagtaatcaattctgttctttcctgaggacacattttcccatgacaggtttctgaaattggggcagacctctaaataagctgttctttcagaagtaaaatcagagaggactttccattgcctgtgaggaggcttaggaagaagagacagaggcagacgggagcttgaatacgaatgactatgaacatagataaagaggtacttctataaagacacagttcttagctactcatgctttgcccatgaagatttttaagatttggcttatttataaatgcctctgcattttaatacttcaggaaaacaacattccattttgactcatttaacacatgagttaaatgcacacctgctgtgtaagcagcttccaggccacgtgccagggatgctgtgacattccaggctcagtctctgtcctaagtgggctctgaagtttgggggaaggtgatgatgtgacagtgagctggtggtgcaacagccactggggcttgtagagacagagggtgcagagaaccccagcggcagggactgaagggaggtgatggctgggagacgggaaaggtaggtgaagggtatagcatgcctgacgacctggatttgagtgaaataaatttggcttggctagaaggttgagttgtgaggagggcaaatgactcaagacagggaggggatagatcgtaaaggccatgaagtgccatatgcggagtctggactttatccagaaggcagtggtcagtcattgaagggtttcaggtgccatttgttctgtggactctttctggagccctctgactgattttcctgccttgccctgtctctctcttctttctcttctctctctgcatacacatatacacacacacactcttgatctgttagttttgcagagctaaacccttgattctaccttcaccttattttctcctagcttcttcaatgacttttttttttttttttttttttttttcctgaatgcagagtctcactgtgtcacccaggctggagtgcagtgcatgatcttggctcactgcaacctctgcctcctgggttcaagcgattctcctgcctcagcctcccaagtacctgggattacaggtgcccatcaccatgcctggctaatttttgtatttttagtagagatggagtttcactatgttggccaggctggtcttgaactcctgacctcatgatccacccatcttggcctctcaaattgctgggattacaggtgtgagccactgcatctggcctttaaggacctttttaatgaaacaaataatatttcccatgaactactagatagaagagagagagaacagagcagggtacctggtggctaaaaattaataagcaaatttgatgtttatccattcacattgcagatgctatttttttttttttttttttttggagacggagtctcactctgtcacccaggctggagtgcagtgacatgatcttggctcactgcaacctccgcctcccgggttca

SEQ ID NO: 4451 - DNA, 6000 bp, Homo sapiens
ccctcttatgaatattaacccactaactttgtttataaaattgggaatcagcccttaaacaggagaaactgtcatgctcttttatccttatttattctcctactttgtttctattttaaagtatattgatggaaattgtatgtaaccagacccttggttagaaatatctggaaatcagacatccatttgaactgtatggataacactgtacatttttgtttaatagaacttcagagatttgctttataacaattttctattagttggaattgtggaaggagtgcagtcttattttcatgtgaaatacattttgtggagtttcacatcgacatcaaaacatttatactgttctcccatggacaagaatggaaacatagatttttaactcctaattaagttgtgagccaatttagatgtagagaagttcccaggctggtgtctttttcaggtttgataggataaagtccgaaacaaaggcaagtctagccagtccctcccataatagaaactgtgtctgaatcgtagatgataaaatagctgttgaaatggatgcctgacgagtcggtatttctacctttctcattgagtagtttgttttgattccctaattttagccaggctcattgcacaggaagacttgtttcctttgatttttttttttgacagaatttctgtaattacggtgctgatcctatatctcacgcttcctcctctctcaacacataactgcgttttagcttctctctggtccaaatcaaactggctgccagccctcccaggagctggggcagcgctggtgttctcaggcctggctgtgtgctaatgagactccttttaccctcgagctatctaagtgctcctgtggaatgcctgtctatattttcttctctctctcttttgtattcctgcatgaatggatgcaaagtaaacaagttgcttggaaagccagaatctgcttcatcttactaaagcccgagaacttccccatgtttaaaacacagtgcccctgctttgtccacggaccctccaaacccctggctgccaaattgttgtcatttattttctttgggggtggagatggggggaggagggcaaggtgcagaagatctatgtggtaggaattcttacctgttctgctttgactccctaggtgagatttgtggatttaaaattcacgggcagaatgtcccctttgatgcagtggtagtggataaatccactggtgagggagtcattcgctccaaagagaaactggactgtgagctgcagaaagactattcattcaccatccaggcctatgattgtgggaagggacctgatggcaccaacgtgaaaaagtctcataagtaagtaagctggacaaagagtgaacataacccaccgagtaaacgtgtgtgcgcagaacgaaaatagtagtgactattgcctgctccccaagactgtttttgaaataggcagaagatagttctcaagtgtctacaattagattgtaaacacttggagggcaggaatcatgtctctctacccttgtatacagtttctagcaagagccttgctcacattaggcatattaggttttttggggttgtttttgtttgttttttgagatggagttttgctcttgttgcccaggctggagtgcaatggcatgatcttggctcgccgcaacctccgcctcctgggttcaagcgattctcctgcctcaacctcccacatagctgggattacaggcatgcgccaccacgctcagctaattttgtatttttagtagagatggggattctccatgttggtcaggctggtctcaaactcccgacctcaggtgatccgcctgcctgggcctcctaaagtgctgggattataggcgtgagccgtacctggcctttttgtgttttgtttttgagatggagtttcgctgtttcacccaagctggagtgtagtggcacgatcttggctcattggaacctccgccttccggtttcaagtgatttttctgcctcagcctcccgagtagctgggattacaggtgcctgccaccacgcctggctaatttttgtatttttagtagagacgggtttcaccatgttggccaggctggtatcaaactcctgaccccatcattcacctgcctcggcctcccaaagtgctaggattacaggcgtgagccaccacacccggcctaggtttttaataaatgaatgagtgaataattttatcacaccaaatactctattaaagaagtaaaggccctacattaaaaattgaaaaagtctgcttctcccttaggaaggttattttgttgtcatatttatcttttgctgtaattcctaagggcataaacttaatcattgttggccaggtgcagtggctcacacctataatcccagcactttgggaggctgaggtgggaagattgcttgagcctaggagtttgagagcagcctagacaatgtaggagatgccatctctacaaaacataaacagccaggtatggtggcacatgcctgtggtctcagctacttgggaggctaaggcgggaggattgcttgagcccgagaggttgaggctgcagtgagccatgattgtgccactgtactccagtctgagtgtcagaatgagaccctgtccctaaaaaacaataacaacaaaaattggccaggcacggtggctcacgcctgtaatcccagcactttgggaggccgaggcaggcagatcacctgaggtgattttcacctgaggtcaggagttcatgaccagcctggccaacatggagaaaccctgtctctactaaaaatacaaaattaaccaggcatggtggcacgcgcctgtagtccctgcttctcgggaggctgaggcaggagaatcacttgaacctgggaggtggaggttgcactgagccaagatcacatcattgcactccagcctgggcaaaaagaatgaaactccgtctcaaaaaaaaaaaaaaattagtcactgctggtggaagtaggctggctcgctgccacaatcctgagtgtgttgctgcacctcctgccagttaggaactgcagttgtagcagagagggctttggacaagacaacatagaacaggggtcgccatacctcaggacgtgggccagtactggtccgtggcctgttaggaaccaggccacacagcaggaggtcaacagcatgtgagcgagtgagcatttctgcccgagctccacctcctgtcacatcagcagcggtatcagattctcacaggagcgcgaaccctgttgtgaactgagcatgccagggatctaggttgtgcgctccttatgagaatcgactgcctgatgatctgaggtggggcattttcatcccaaaaccatcctcccacccccatctgtggagaaattgccttccatgaaatcagtccttggtgccaaaaaggctggggactgctggtgttctcaagtccagtgtcttctacaattagattgtaagctctagtcttttctagagctctagtcttttctccaccacttgctagccctttggcattgtgcaaatttaattttgttgagtctgtttctttttcttttgttttatttatttatttatttacttattttttgaggcagagtctcgctctgtcacccaggctggagtgcggtggcacaatctcggctcactgcaacctccacctccagggttcaagcgattctcgtgcctcagcctcccaagcagctgggattacaggcacgctccaccacacctggctaatttttgtatttttggtagagacggagtttcaccatgttggccaggatggtctttaactctgacctctggtgaccctcctgcctcagcctcccaaagtgctgggataggtgtgagccaccacacccggccctgagtctcagtttctacttagcacatctactaaagaagggtatgtgggcgagatggtgtcacataacccattgtgagggtcagaccgatggcactgggatgaggaggctcatggtgagcagaaggtgcagtgccccagtgagtctcttctctttttccacagtgtaatgttattgtttcccttgaaaaggtcagattttgaccaaagtccttgactgattcagaagcatgccctgaccattagcccttgaaacctacagttttttttatttgtagccaggtctgatgacaccctaattttcttgataactgagctggggtattggcaggtggcaacggcctgcctctcctgaactcttccatttgttgaatcaggaccaggtgatgccatggactccagcctattccctagaagtaggacagaattcgtttgaactctcagaatcaaaccatttcatgctttctctgtttcataccccttcttcccttggctctattttttttctggattttgctacaaaatatgtttcaactttataattggagagcaaacagacgtctggtattgtttatctcccttctgcctgtcttgtcccatattgtcaaaaaaaaacacccaagtctcttttattttagatgattggttttttgctttattcttaggatatggaagaatcgacccaaatccctcttttaactttctgttatctccacacttgaatgaaaagcagtgaatagcttgtttaatttttgacttcatcatatgaatttcatgaaacaaggtatcagaaacaggaaattttaaagtagggcagaattgggtaaacacacatacacactctctgtctctctctcacactgaaaacaagcagaaaaatatttttctccctccctttgtccagagcaactgttcatattcaggtgaacgacgtgaatgagtacgcgcccgtgttcaaggagaagtcctacaaagccacggtcatcgaggggaagcagtacgacagcattttgagggtggaggccgtggatgccgactgctcccctcagttcagccagatttgcagctacgaaatcatcactccagacgtgccctttactgttgacaaagatggtaagaatcgaggagccggcttttcagctaggtagacagtccctgctaaccccactgactttacaccccagcttctgtgcttcgtcagaacttcatggaactcacaagttggagacctaacctggtgtgtgtttgcttttaattgtaaaaacatttaagtttctactttgttccctgacaacttcttctctggaacctgtaagtcctgtgttctcttgtggggctcacctcttttttgctttcccaccaaaatcaaataaaaatcctcctacctgacatggctttgtttttttaatcttcttaactttcagtccacatgcatctgaatgagactgacctttacatttagtttgtctcattttctgttctccattaagttttttgtttttgtttttgtggtttttttttgagacagtttctcactctgttccccaggctggagtacagtggtgcgatctcagctcactgcaacctctgcctcccgggttcaagtgattctcctaccttagcctctcgagtagctgggattacaggtgcccaccaccacgcccagctaattttttgttgttgttgtttgtatttttagtagagatagggtttcaccatgttggccagactggtcttgaactcctgacctcaggtgatccgcccaccttggcctcccaaagtgctgggattacatgtgtgagccaccgcgcctggccatgttctccattaagttagaatctcctgtgacatcttttttttttttttttttgtttgagggaaggtcttgctctgtcgcccaggctggaatgtagtggtgcagtcactgctcactgtaacctcgaactcctgggctcacgggatcctcccgccacagcctcgctagtagctgggactgcaggcacacacctgtagtcccagctatttgggaggctgaagtgggagaatcgcttgaacccaggaggcagaggttgcagtgagccgagatcaggccactgcactccagcctgggcaagagaacgagaccc

SEQ ID NO: 4452 - DNA, 6000 bp, Homo sapiens
taatgtcagctattgaaaaggtgacgaatataaactggggcgaagtaatgaggaataacggggggtaaaaggaataatggggaggacgctggccacggcaggccttctctggggttatgacatttgcatagagacctaaatgatgaggaagagcctgggaaaagctggggaaaatggtctcagcaagaggaagagcaagtgcagaggccacgaactagacacaagcctggcacgtccaaggatgggaagaagggcagggcagagtgtagggaatgcggggaccagaccactccaggcttctgtcggctgcggctaaggaaggacctttggttttgtcctggttatgatagagagacacaatatagggttttaaaatagaggaatgacatgattcaacctaccctttaaaacaggggtcagccgggcgcagtggctcatgcctataatcccagcactttgggaggccgaggtgggcggatcatttgaggccaggagttcaagtccagcttggccaacatggtgaaacctcatctctactaaaaatataaaaatggctgggcacggtggctcatgcctgtaatcccagcaccttgggaggccttggtgggtggatcacgatgtcaggagttcaagaccagcctgcccaagatagtgaaaccccgtctctactaaaaatacaaagattagccaggcgtggtggcaggcgccagtaatcccagctactcgggaggccgaggcagggaattgcttgaacccggaaggtggaggttgcaatgagccaagttcgcgccactgcactccagcctgggcaacagagcaaggctccatctcagaaatatgtacatatttatatataaaaaatagccaagtgtggtgacgcatgcctgtaatcctagctacttgggaggctgaggcatgagaatcttttaaacccaggaggcagaggttgcagtgagccaagattgtgccactgcactccagtctgggtgacagagcgagactctgtttcaaaaaaataaataaataaaaataaaacaagagtcctctgggtgccgtggctcatgcttgtaatcccagcactttgggaggccagggtaggtggatcacaagctcgacttcaagaccagcctgggcaacgtggtgaaaccccgtctctaccaaaaatacaaaaaaattagctgggcatggtggcgtgcatctgtggttccagttactcaggaggctgaggtgggaggatcgcttgagcctaggaggtggaggttgcagagagccaagattgtgccagtgcactccagcctgggtgacagtaagaccctgtctccaaaaaaaacaaaaacaaaaacgagtcagcacacctacagcccatgggccgaatctagctgtgaggctgtttttgtaaatgaagtttcttggcgttgcagctggctccatttgtttccatgtctgtggcttttttttttttttttttttttttgagacagggtctcactctgtcacccaggctggagtgcagtggcgcaatctcggctcactgcaacctctgccttcctggttcaagtgattctcctgcctcagcctcctgagtagctgggattacagtcatgtgccaccgcacctcggctaatttttgtatttttagtagagatggggtttcaccatgttggccaggctggtctcaaactcctaacctcaggtgatccacctgcctgggccttccaaagtgctgggattacaggtgtcagtcatcgcacccggccatgtggctgctttcatgctgcaatagcagaattgagtcattgcagcggtgaccattagcccacaaatcccaatgtgctcactctctggccatccacagaaaaggtttgccagcacctgcttcctaaggttcactgaagttgctttgccaggaggggaatggaattgaatcagcctgagtcagaagactgattagaaagctgttgtgaggttgtccaggcaagagacagggtagagcaatgggaagggggagcggagcagtggtcagtgtttgatctgagagaaagagaagaattgaagaagcgttctgggtttggggcctgggatgatggatggtggtaccattgactatgatgggaaaagttgtgtgtatgtgtgtgtgtgtgcatgcacacacacgatgtggctctgtttataccatgttaagtttgagatgcatcttggctgtccagctggcacagttgaatatacacatcagggaagaggctggagcagaaggtgtaaatgtgagagccatcagtgcgtagaaggtattttaagccatagggctaaacgagtgcacatcaagaagagggctcccctaggctgagcccaggcccagatccccagaaactagtccttgccccaacacgggggagctccctgagacctccataccagtcccctccttcaccacctgccatgggaacccctgagctttggttttctctcctcccaggcttaccagaactgggtgaagaagaacggggctgagcactcgctccccaccctgggcctcaccaataaccagctcttcttcctgggctttgcacaggtgagtccattaggaaaacatgccacacatggtacattctgccatcttgatgtttcaagagcccagagagccgaaaggcaagttccccacagattgagaacttcccaagtcactggactgtgcacagcacatgtgccctgtcattagagagatgcacggaagggcccaaagtaccagtgaagggattcctggatctggtgaatgagaagacgaggtgatcacccagggcccttctggttctagggttctagaggtttcttaaacttaagatgaccagccaggcacagcagcccacgcctataatcccagcactttgggcggccgaggcaagtggatcacctgaggtcaggagtttgagaccagcctagtccacatagtgaaaccctgtctctatgaaaaaatacaaaaaaaaagtcaggcatggtggtggctgcctgtagtcccagcttcttgggaggctgaggcatgagaatcacttgaacctgggaggcagaggttgcagtgaaccaagatcacgccactgcactccagcccgggcaacatagcaagattctgtcttgctgtgatcatcccagatcatcccttcagtcggcattcatctggtagccttctgctggcactcagagctaccaggccattagacaatttgttctgcccaggaaatgagagatctggactaaatccaagcttttccaactggtgtttggacacagtcctttgttcagatggaatcgaatgcagttgcctcagagatgctgcgctggctgaaggagaacagtttggagacaactgcgttagaggctgctggcatggggggtggcacaccagccctacaccagcccactgtctcttcctgacccgctcaggggaccctcctgactccccgggatctcaggatcaggtggggggcttatctccctggtgttgtattttctgggttttgtttttttggagccggagtctccctcagtcacccggcctggagtgcaatggtgtgatcttggctcactgcaacctcaacctcccgggttcaagtgattctcctgcctcatcctctcatgtagctgggatataggcacgcaccaccacgcccatctaatttttgtatttttagtagagacagggtttcaccatgtttgtcaggccggtctcgaactcctggcctcaagtgatccaccgccaccttggcctcttaaagtgctgggattacaggtatgagccaccacacccaaccttgttttgctttttgagacaggatctcactctatcaccgaggctggaatgcagtggcacaatcacagctcactgcagccttgacttctccagctccagtgatcctcccacctcagcctccccaggagctgggaccataggtgtacaccaccatccctggttaattttttttttaattttttgtagagatggggtcttgccatgttgcccaagctggtcatgaactcctgggctcaagcagcccttccaccttggctcccaaagtgctgggattacaggtgtgagccaccgcacctggcctcccctgctgttataatgggggcagtctggcagcccgagggccccacagtgaccctggcctctccctgttgccccttcaaaggtctggtgctccgtccgcacacctgagagctcccacgaaggcctcatcaccgatccccacagcccctctcgcttccgggtcatcggctccctctccaattccaaggagttctcagaacacttccgctgcccacctggctcacccatgaacccgcctcacaagtgcgaagtctggtaaggacgaagcggagagagccaagacggaggaggggaaggggctgaggacgagacccccatccagcctccagggcattgctcagcccgcttggccacccggggccctgcttcctcacactggcgggttttcagccggaaccgagcccatggtgttggctctcaacgtgacccgcagtctgatcccctgtgaagagccggacatcccaggcacacgtgtgcgccaccttcagcaggcattcgggtgctgggctggtggctcatcaggcctgggccccacactgacaagcgccagatacgccacaaataccactgtgtcaaatgctttcaagatatatttttggggaaactattttttaaacactgtggaatacactggaaatcttcagggaaaaacacatttaaacacttttttttttaaggaaagaattggtatatttattatgttctgtttttctaaataacctgtggacaagggaagccccactgatttactccctctcttccccactccctgtgaggctgggctgaggcacggatccctgggccacagagcaagtctccaaatcagacagctgcctcagcccctgggatgtgtgatttcagctcctgtcacctcatgcaagggcgtggagaccagtagaggtgtggaggccaggcagagagaggagcctgctctgcggggggcccagctcatgggcactgccccttcagctagcctgcctccgtcccctgagtccaacagtgggagccctagctgggaagttctgatccccaaagccacagcaggggactgatggctatagcagaatgaggtcgggtcaggaccctcaaacaccatctgggaacaccaagcaccctgaatcgagactgcaggagccctgcggggtgagactgtgtcagagatacactgctggccacaagtgtcccctctcagtcccaccttttcgggctgtcccatgtctatctcaggggcccgttacctctctgcagcagtcccccatcccagccacaccagggtctgtccggccaaccctcttccccagggaaaggagaaaagagaaaacaggctgggcccggtggctcactcctgtaatcccagcactttgggaggttgaggtgggcggatcacctgaggtcaggagtttgagaccagcctggccaacgtggtgaaaccccatctctactaaaaaaaattacaaaaattagccgggagtggtggtgggcacctgtaatcccagttactcgggaggctgaggcaagagaatctcttgagctcaggaggcagaggttgcagtgagctgagattgcgccactgcactccagcctgggtgacagagggagactccgtcccaaaaaaaagaaaagagaaacagctgtcacctcccgcaggacccaaatcctctctctgagcaccgtcatccaccacatggctgggcctggctcccaggaccagtccagtcctctagtgccttatctgaggctgcagccgccagtctccaccccaaggagacagcccctgctcctagatgcccttggcctccgcagtgcagcccccaggtgtcctgactgaagcacaggccatagccccatttccccggtgcctgcagggctaacctccacgggagcccaggagctctggc

SEQ ID NO: 4453 - DNA, 6000 bp, Homo sapiens
agtagagatggggtttcaccatgttggccaggctggtctcaaacttccaacctcaggtgatccgcacgccttggcctcccaaagtgctgggattacaggtgtgtgccaacgcacctggcctctctgtctttctcctcatatatgtgaggagtaaaatgaggatgatactttatagaattgttgtgaggatttaatgagatataaagaacttggagcagtgcctagcacatcataaaacttcagtcagtgttagcttctagtagtactttctgcttctccaatagaagtgggtaagaataggtaaccttgccacattggtatttcttagccttaattttcagtcttctagtgtttattcctctttccttaaacccgtccctgatcacactcctctctctgccctgatagcttgactgtagtagactctgatggagctaccaactctactactgcaaacctgacagtgaacaaagctgtggattacccccctgtggccaacgcaggccccaaccaagtgatcaccctgccccaaaactccatcaccctctttgggaaccagagcactgatgatcatggcatcaccagctatgagtggtcactcagcccaagcagcaaagggaaagtggtggagatgcaggtaggagggaatggttcctattttttcttgcccaagagaagtagagctgctggactgcatttttagaaacctccaaacaaactgagaaagctttaggggcctttgattaacgtggtagcaaaaatctttatcttggccgggtatggtggctcacgcctgtaatcccagcactttgggaagctgaggcgggcggatcatgaggtcaggagttcgagaccagcctggccaacattgtgaaaccccgtctctactaaagataaaaaaattagccgggcgtagtggcgtgcgcctgtaatcccagctacttgggaggctgaggcaggagaatcccttgaacctaggaggcggaggttgcagtgagccgagatcacgccattgcactccagcctgggtgacagagcaagactccatctcaaaaaaaaaaaaaaaaaaaaaaaaattatcttaaatgtttagtattagaggaaaaggctgagaaatgttagttgttctggatgactccagagagtcaaactatttagaagctacaagggtgcaaatcttagtgagctctataacaagttagagtagattggctagatggtgagtatcttctctctagagatgcttaagaagagagactagatctgtcaccaggcaggtaacataaagaaagaaaactggatggtggctgtgctgaacttaagccctgactaaaggagtcatctactcttcaggtccagctggttgttgccacatggaaggatggtcctaacattgcttgataacccagcttttcaagagaagaaagaaattgagacctttatgtgaaaatttccaatatgagagacaccacaggccaaaaaaaatatttgcaagctggattcagcccatgggctactagtttttgcctactgctctacaggaagttcctgcattggaagtttgcccaaaattatttataatgtccctcaagattctatatttctcagttttaaggcctcccttaaagcctccattttacctgacttttgtttaaatgttatgttaggttgttgcagaacctgtacagacctgaaggagacagtatggtgttatacagcatcttgagctgctgccatgtttcactgagacagctttgttaggagcactgtgtagcttcagtaggaagaggatctttttaaacagtgtttttaaaactgggtcatttattgtttgttcacggtattctttctggtttgagtcatagagactggccttggtaatctctgcacatttcccaatactgccctctcttatgagagttctggctttatttgaaactgctgctgtgtcagagagggttgtttccttgaagggggaaacccttagcaaggtgcctcatgatatctgactccatattcactcacatgctgaactggtacgtaatagcccagtaccatcttaggtctttggtttagaaaactaaatcgtttttaccagagtcggaattattgtgtgatgtgattcctggagtccacttttccacttctgtatttgtatttgtagggtgttagaacaccaaccttacagctctctgcgatgcaagaaggagactacacttaccagctcacagtgactgacacaataggacagcaggccactgctcaagtgactgttattgtgcaacctggtaagctccagccttgtggttcaggctcttctattggtgggtccatttaaccttgggggaaaagagtgttgggttctgagctgtatgagggtagaagcagaaggcaccgatccatagagcctctggtgacttctattgttccttccccttgtgctttcttcatagctagagatgaaggatacttcccagcctcagcttgtgcccttcccttggcttgttgttggtaccttcaaagagacctaggaaatagagtttatgccatcccaaatcctaaaaagtaattgcggtttttgccattcctttcaatagcaattacttttgcaccaacccaataccacgtccttgaagggcctgcttaaaactgacttcctcaggacagccctgtcttgtcactcaaatcctttcatttgaactcccttagcattagagttcaagtttagtatggcattataacttcattatgttctatgtttctgtcagaattgcttgatatgtttcagccttatattctttattgtgtgctccctgacggtaaccacatctcccacagtatctgacagttctgtggcctgagaggcagagtccatggcttccagaacatgtgtcccaattggttcctctcctttcccacctggactggctgcttttgacctctaactctttgtcttccagaaaacaataagcctcctcaggcagatgcaggcccagataaagagctgacccttcctgtggatagcacaaccctggatggcagcaagagctcagatgatcagaaaattatctcatatctctgggaaaaaacacagtgagtattgacacaaaatccttatttttgcaaagcctccagaccttggaagagcaaggttttatttgctattatgagttgagttgctcttattggcttatccagtggggtgactgaggaagaaatgtttgcaattccaaacttcaactccaagaaaatgatattataatcataatttttgtaagaaaaaaagaatgcttgccatcaactagtccccaggtagtactgtgtgatcctggtgctttttcaggtacaatccatctgctgaaatgcagagtttaattacacttgagaggcaggatggaaggggtaatggagcagaaaaatactgttgctcagaattaactgggtaaggctggcacgggggatggggcagagcagctattaagagaaattgaaaatacatccataaaatgaaagcattactctgttattgttttcttgaagacaccatttaccaattaagttagccagaggccaaaggcggtaatcaaaataattctaattacatagaaattacctaactgaaccattcttagttcctgtagtttcttttagctcctttaaagcataactaatgcaactgaaattatatgcaggatcccacaagtagcaaaagaattctaagaagagttaaaagtattctctgtttccaaaggtagcaaccataggacagcctgggtttttttttgtattgtgtttgtttgtttgtttgtttgtttgtttgtttgacaaaggcattggagatgggtggaaaagaactttaatttgactatacaaatgacttgcttttgagattgctgagttggaatctagaaattatttccctcagctcttgtttttatcttttgtagaacataatcttacccagcccagggtgtttttaattataattgtttattgaagatatggctgatagaccttttagctgagttttattagtgtttacagcagagataatgcttagcatagcttcttgaaggagactgtgcttcaggaggagctaccaggatcagaggctgtaactttaaaaggcaaaacaaagtaaatcctggatgtctgcagatttctctggctttcctgtagttaaaagctctggggcattttgatccttgagcagagggctctctggctgtgtgcagcctgaatgttggcacagagctcccttggctgctgcaggcaagtctctgaggccacaagggggaagaagggttgtagggtgtcctaggtgcttgatggcccctgtccaggagctggagggaactttgcttatagagttgctacaaacaagatgattttgtcctgagagttcctctgcagtcttgccccatttccttttctttcatcaggaaggatttgggcacgtgattaagaaatgcattttgcttccttgctggcaagagccaaaccaactactgggccagaaatgctttttagaaacatcactcttaaatcattcttttgatcagagacttgctcagagaactttcttccttttacaaactagaatggtaaagcgttcaagtgttctagaagctcatataaaggataaggctagaggtgtttgaaagctatttgaattttctgaccagcaggcagcctgtattttgaggccaaatgacactttgtccaattgaaatatttttaaacatgtcttgtcaaggtctgggtaacagtagttcgtgtctttgctgagggagtcattgtctcctcctgctaagttagggacaggacagcagcagacaggtacaactctaccctctagtttctttttttgcaggggacctgatggggtgcagctcgagaatgctaacagcagtgttgctactgtgactgggctgcaagtggggacctatgtgttcaccttgactgtcaaagatgagaggaacctgcaaagccagagctctgtgaatgtcattgtcaaagaaggtacctctctgcctccagtttgtgtagcagcctcttagggtcagatagctgaagaatttatcctgtcatgtttgcctgcagaaattgattagagatagcaagaggtgggtaagagggttggggtgagggcaattgttattttcttttctaaaacagcctttaattggactgtaaggtgaattttaacttccctccctcctcctgcttacatcttcccttccctctcatccccttactttcttttcagtcctccctccttccctccttactttatttctcagttgaatagggaaagaattaagggttctattctttgcatttttattttgcccctctgcattgctgagacctgggccgtgactcctgttagctacagtgacacctgctgtcaggcttgagaatgacggccgcactacagctgactatgcttgccctgagcctttgagctgaggccagccagaggccttgctctagtttacaggcacagtgaccagtgagagctgtgggagagggccttaagttgagggccttaagttgatagcaggaaaaaccatcagatatgcagacctccagacataagataccaagctgagtaaatactgcacagacatctgaatatacagagcttcacgtggggctccgaataagagaggtagctctttgttttctcttgtgaagttccaaggaaggggtccaaaaagatattcagagaataacattttaagatattttgaaggagaatttgcaagatcagctaggtgaaacctaaactccaaggttttaagccagtttgggccgttatttctgatcatcacatacctccaaagcagagaaatggattccatttgggaaggctgctgggagaatatgagaggaaagcacactcgtcccctctgttgtacagtgttaggagaacatttctctgggtaggactggaacctcaggactgcagcgctggtagctttcatctacactgtt

SEQ ID NO: 4454 - DNA, 6000 bp, Homo sapiens; identical to SEQ ID NO: 1517

SEQ ID NO: 4455 - DNA, 6000 bp, Homo sapiens
aatttctctgtgcctctgcctcatccgccgtgagaatgggtataatgagtacctacctcagagggtagttttgaggcaataataagccaatacatataaagtacttagaacaggcacatgacacaagcaagtgctacataaatgttagctgccattgttatgattgatgttagccttgacaggtgctccaaaagagaggtacaggtacaacatgtgaaagagaacatgacaaaggaatctcaagcagcacaggagtcaaggcagcttccctgagaaggtgatacttgagctgagacttgaaggatgagaggagtcaatgaggaaaaatgagtgggaatggaaagggatccctaagtagagggaacatttgcaaaggatactggagaggaaggaatgacaggactaagaggtctgggcatgctgaaggggtggaaaaggaaaaccaacaggcttggagcaaagaaagcaaagggtggagtgatagaaaaggcaggagctggccaggcgctgtgactcacacctgtaatcccagcactttgggaggccaaggcaggtggatcatgaggtcgagagagcgagaccatcctggtcaacatggtaaaaccccgtctctactaagaatacaaaaattagctgggcatgtggcgcatgtctgtaatcccagctactgggaaggctgaggcaggacaatcgcttgaacccaggaggcggaggttgccatgagccgagattgcactgctgcactccatcctggtgacagagcgagactccatctcaaaaaaaaaaaaaaaaaaagaaaagaaaagaaaaagaaaaagcaggagccagatgtgttcaagaccaggctttctacaattgtcagtgggaccttcattatgcccaaatccttaagtaaaccctatgtgtgatgctgatatatttgtggaagccctttcttaatggcgaatatatcagatttaaccatatgaaattgccattttgtaggtgataataaacagttgactatcgtcaatttcataggcctgatgtcaatttcatatttcattctttaaagaccgccactcattgttggaaataaaaggacaaaggtaggctggcatagcctctccaagagagcagatcgctgcacttacaaagggttttggggatgtgtggagttcaaggactggtgaggttttggaggcatacatgggttgatggcatctgtataggtggttacttgaaaagcctgttattcatcagttgcccctcaagtctgcagtgagtcggctaactctcagaagccaggggttgtcatggactggctgccttacaaaagctgtgcactgaggggtgtttacatgatggaataggttcaaagctggttctagtggccacttgttaccatggctgcagatgatccgagagctttcattctcatggttcaacctaagaaaggtctataagagtataccccactcttgaaagcaggtggtggagacgttgactactcaccaccatttcctgaaatcaatttgaagagaaagatacctttgtggacactgttctcaagttctgaaagtgggtagcattacattggcagtttaaacacttgcttttttttttttgagtcttgctctgtcacccaggttggagtgcagtggtgcaatctcggctcactgcgacctcggcctcctggattcaagttcagcctcccaagtagctgagattataggagtgtgccaccacacatggctaatctttttgtatttttagtagagatggagtttcacactgtttgccagactggtaccaagctcctgacttcaaatgatctgcctgcctcagcctccctaagtgttgggattacaggcatgagccaccgtgctcagcctaaatacttgctttgattttgcagatctggtgctccaaattgattaagacacaagaccgttctctccaaatcagagagctactcatctctcccttccatgtgtttcttgtactgctccctctatctcttatcatgagactcctctcttcctgcagtgtggtaaaactacagcaatcgtcttaacctgtgagatctgtcacctttgcattttccactcatgcagctggttctataaaccaactcttctgcttggggggatctaatcatgaccttttacccttttgtggcctcttctagtacaaggcgagtggataattccaacacaagactggcagtccaaattgaaagagatccaggtaagaagatctcttctctctttttcaactatttattgttgtatggatggattctcaaaaggaagaattaaatactcactctgtactcattgtggagacaatgcacatcttagttaatctgctgaatgtggaataaaactgtgcaggtagagtgatcaagcaacctgatttggtttgacaatgcattgctccgctatttagaattgattaggaccttgctcagtattgcatacccctgttaatcaagacattttagttcgtgtgcagtaaacctcaaacacagactataaaccttgagattcgtcttttaggaaaaaaaaattctttggaaaaacatcagcatgataatatccttaaaggtaaagcattccatgatccaggatctagaaggtttcagaaactttggtcaacattaagctatgaaaggatgtacctgctagaaaattattttacttttttctttccataatcaatctccttttttaaccattctatttcttctttcctcatattagaatgcaaattttaactgttctctatttttgtcctcctcactcccttctttgtgacccaaaatctgtctaggaacaattgtatcgtgctcattatctatatttgaattgcatctacatgattaattcgaaatcaaaattcgaaatttgagatacctggagagagaagcttattttttgttgaactttatgtcagtacaatgagggaggagaggtactgatatctctgaggtgcagctgtgggactgtgatgttacaaggctattgatacaaggcagagggacagtttcccaagcacattgtgctgttagttaatcatagttgctgtctcattttaatctaattatgcaaatgtgtggtcaatgtgttctaaaaagatgccctgagttgaatctctacttttagtgatttcaattgttttgttttatttaaatattgaacagtttcaacaattaagcaaaggctaattctctcattcaggcctttcctttcaaagtgccagagactgaaaggtgtctttaattagtgtctcaggatgcgtgctgcttcattagagaaaatgaatacagtgcaggtcaaggaggcttcatctgcatagaagattaagcatactgatacattattagactacatggcatgagtcagcccacagaacagtttctttccattaatcataattaagttataaatgctctagttttgattcagctttcaactgtcatgagtggccagcaaagatactcataatttgatagtgttattctgtagatttcttagaggtggattggtgatcttccttatgtaagcgcacttggggcatcttcaccttcttgtaccactccctgccttccgcaccctgattttgccccagttcccatggatacaaagcagggatgcttcggtcagatctgcagtcttcatccctgtcctccccgaatgtctgtctccactcaaatagacgatccaggagggagcattgagttttgctttaggcgtttcctgtttaggacaactatgcctatggctttccagagccataatttcctctcccaaagaaaagctactcctagaataaaagtcatgaacgtgaacattttgcctaggcttctcccaatgcttactccacccacaggaccacagaccaggaagacttcccatgttatccaatcttctctttaaaaaatcttatatccctcatcttgagagatcccatgaaaggagggaaaagagtcagggctcagcagggaggatataggaaatgcactacgcactcctaatttcacccccactcaacacgcacccctggctgtccaccgggaagcaaggtattccatcattccatcttctttgctgcttcctccttcacccttccttggatgtcattatccacccaattaaaatggccaaagttaaacaaacaagcaacagtggacaattccaagtcctggcaaggatgcagaattagagctctcaatcactgctggggaaatgcaaatagggtacagccactttggagaacagcagtcctgctcctaagcatttactcaagagaaatggggagagtcatattcacacaaactcctgttcatgactcttggtagtggttttacccataatcaccaaaactggaaacaacccaagtgtccttcagcagctgaatggataaacaaactgtagcacatgcatacagagggatactactcaaaggtgaaacagaacacactcatatatacaacagatgaatgcattattctaagcgctggttatatgactatgtgcatttttcaagactcatagaatagtacactaaaatggatgaattttaccctacacaaattattcttcaataaacctgaatttttaatttatatatagtttaagaacaaatggtatccatttatatatagtataataacttatatgttatataatatgtcaaatatttatttgtatttaacaaataatactagcaatgattgtttgtattatatattatagcacatatatataaatcgatgctgcttatggcctataaattacacagagagaatattgagggaaaaaattggagggtctcatataatccactaaaatgtgggaagaacacatctttcctcttttatgtatataaagagtctgattttacccttaatcagatgacaactcactgtttcctaggtctggatacacagcaaggagtaggcattcactgatcatatttcttgtctgcctttagggaatgatgacaacaatctcaattccattttttatgaacacttgacaaggaccctccaggagtccctctgtggagacttagttcttggacgttggggcaactacagctctggcgattgctttattttggcttcagatgacctcaatgcctttgttcacctgattgaaattggaaatggtcttgtcacctttcaacttcgaggactggaattccgaggtaagaatttcttcattgtagaaactgttgaaagttggttgcttgagttaattatcaagcaaaactttaggaagaagtcactgttaaacaggaaaaacttaatgtcttcctactgaaagtgagcttgccaccactaccttgatataaataaactacagtcatctgaaggaataaaaacataaaacatagaatggcatgtaaacttgtggattagcaaaccaggacattggttttattagcaaatcaggatattgattttaatccttctgggaaaaactcagaagccacaggaggttgtggggaacatcatttggggttccaaatggagtcagcccgaccttgttctgtgggtcacaggtgttgggatctgttgcgtgcaaatcatttaaggtcttagagcttttctttcctatctgcaaaataataataatgagaatggctgccttataatgttgctgtgtggtttaaatgagatcatgtagaaggcacttcatgaatcctcattgctttatggttattgagtctgcctgaatcttgaaagtataactccagttttcccgcaaatgaggagctggagttatgcgggatgcagaaagtggcataagtgatgtacctgttgccttctcctatgttgtttattcctttactcattgcatgttttctgaacatctcctctgtatcaggcagtgtttcaatactggagatgcaatggacacgtgacataaaagagtcttatcaccatgaagcttacccccagtgagagacacctaaagtaaacaagtaaacagacaaacttattatagcttg

SEQ ID NO: 4456 - DNA, 6000 bp, Homo sapiens
aggattttgatattaaatgtgtaacaaatgttataaaagtaaatagtctagggatgtcttatttccagataatcactgaaatgtctgggaataacttgaatagcaagccaatatgtagcattttttcagtaaggcatcaagagacatgggtactgtggtattctgatatatattggtttttgtccacagttcctggttcataactcccatagcccttattacagtcgtttgttataatgttgggtgtgttagacctcagtggcaggcttcaagaaacaggatctctctcctgccctccttttcacctgtcgcaaggcaggactctaatcttgttccacttttctgattttccaggtagatagtgttggaattgaattggaggaaaccttggtggtggggagaaaccgccacacctttgctcacagaagtcatcttctgtgttgattgttggggtgtaagagtagagaagaggccgggtgcggtggctcatgcctgtaatctcagcactttgggaggctgagactggtggatcacctgaggtcaggagttcgacaccagcctgaccaacatggagaaaccccgtctctactaaaaatacaaaattagcctggcatggtggtgcatgcctgtaatcccagctactcgggaggctgaggcaggagaactgcttaaacctgggaggtggaggttgcagtgagccaaggttgtgccattgcactccagcctggacaacaagagtgaaactccatctcaaaaaaaaaaaaaaaaaaaaaaaaaaaaaaaggagagaagaacaaggttgagagcgtttttcttgacacaagcactttaagctccaagaggaggcctcgagtcagctcagaacaacatgccaacagtgactctgtgcttactttgtgccaggcagtctctagccacttcacatctcacttaagtttttattagagtcttaatgaagtgtgctctctccgacctatgcccattactcaaatgctgcgggtctatttctttacttataaaatgaggttaataatgcctaaaaaaggattgtcatgagaattaaacaagttaattaaagcactgaattcagttcctggcatgtagatagcactcaaatgtttggtaacatgagcacaaaacacagataaatagatactttagacaaaaatattttattttttttttgacttgttattttgagagtataaaagtgatcatattttcctctcttaatgagagcttatatgtaattgcctgctgtcagtgaatcttgggtttaaggcccattagaaaaatagcaggctttagtagagtggttttttccagtgagtacttttcagtcaacaggtttattgggaggtggctaaaatgcacatggaggtgagcccttccctgccagacaagcaaagaatcaagctgtatatttaaaacttggctgttaacccaaaggatttctacaggaagtttttttctcctttgatgtttgtagaggggttttttttcccctcccgacaaaatcaatacacagaaaacccaaagctcttaatttgcaaaactgaatggatttgtgaaaatagatacctttttggcagaaatgcaatttggcattaatcccttgatctaaaacttagaagaaaccaggctgaattcaaatttattgatggatcaatttaaagagttttaatctgggtgttatgagttccttgggcctattgtttgcctgaaccctgtggggactggctcatcagcagaattattcatggaggaatttgctaggttttaccttggctctctagcttgggacattttgtttcttccttaaatccttattgcaaccgtccagctaccaggtaggtatattgccttgtaagtgctggtacagtttgccttatttatattccactgcttctcagggattaacatctgctcgtgcagctgagatcctggcgcgagatggtcccaacgccctcactccccctcccactactcctgaatggatcaagttttgtcggcagctctttggggggttctcaatgttactgtggattggagcgattctttgtttcttggcttatagcatccaagctgctacagaagaggaacctcaaaacgataatgtgagttctgtaattcagcatatggatttgtagtacacatcagatatcttctccgtctttgtctcccacttcttctcaattaccactcattacttaatggttatgaactcattacttaatggttatgaacagctgttgccttcaaggctcatccattcttccttcgtttccatttcctctctctaccacccacgttgtagatgctcttacaagtgggatgcccacctgcatgtgctgctgtgagcaggcagctctgctcaggccccggccgccacccactggatggcagagcacagcgattcatgttggcacatccacctgtccagaaatgcttggtggccattcttcaaaatccacaagttggttgaaaaacaatctttgttttataaagcaggagaaactgatgcatctagaacctttccaaacgtccagttagtgatcaagtgttggtgtgcctgactccatttctgacccttcctgtgtggtctttagaaggataaataagaaaacatgagttctatatttctgaaatcttggtttctctattaaaaatctgttttttattcagtcaaaaaattaattgaatgtccctaattattgtgtagagccacgggccctaacttgtcttttcccttccagctgtacctgggtgtggtgctatcagccgttgtaatcataactggttgcttctcctactatcaagaagctaaaagttcaaagatcatggaatccttcaaaaacatggtccctcaggtaccagacgctttgtccttccccagtggatgacttgacagccccaagcatgtcagcctgtgaattagtgtgaagttaaggttttccaagtattacatgactcatcagagagatggatgtcttctaccccacccaaaaccaacctattttccttctatccaaaaagtggtagcctttcttttgaatgtaaactctgaatacaggcacaccatgtaacagcaatatctcttaaactggcgagcaagcttttgtaacttgtgtaaataaaaaagtgaataatatctttgttttgtattcaggtaattaggattatgactatttttattttcttgttttggacactaccttctctttgttggtatactaacggtgtaaattgtttcttttccaaagcaagcccttgtgattcgaaatggtgagaaaatgagcataaatgcggaggaagttgtggttggggatctggtggaagtaaaaggaggagaccgaattcctgctgacctcagaatcatatctgcaaatggctgcaaggtagctcttttattttaacaaacctcatagctagctctgctgttcgggcagcttgatttgaggggtacagtagcccatgataaggctggtgtattcacatgacatttttcttcttttcctcacatataggtggataactcctcgctcactggtgaatcagaaccccagactaggtctccagatttcacaaatgaaaaccccctggagacgaggaacattgccttcttttcaaccaattgtgttgaaggtaggccatttttgggcactttgagcatggcgtggtatttctcttgggcattaacaaaatcaaaaccataggcacaatctcttgttttattggctccatttctgagaacttgtgtcaagcacagagcagaggtgttttcctagctggcaggaaaccttgtggcagtttcccttccctccacctccaccctgcctcttctgtcaacaacaccagtctggcatgggtgttggagctgctgtcctgctactggagagaagtccctttgccaaacagcatgtacagccaaagagctggcccttaaaaagtgcttttatcaactctttttgtttttttagtcatcctatgtaattgtgtaaaatccgtggcttccttcaggttagatacaattaggtacagttctccctccccttctttttaaggcaccgcacgtggtattgttgtctacactggggatcgcactgtgatgggaagaattgccacacttgcttctgggctggaaggaggccagacccccattgctgcagaaattgaacattttatccacatcatcacgggtgtggctgtgttcctgggtgtgtctttcttcatcctttctctcatccttgagtacacctggcttgaggctgtcatcttcctcatcggtatcatcgtagccaatgtgccggaaggtttgctggccactgtcacggtaagaggcaggtgatggtcaccctgactcagatcagcttgcacgaatgttacactcttccgctatcctattctaaggtattgccaacttatgttttattctggatgtttgatatagttcttcttgagagccacatcacgtggtgaattttgacagtgagaaaacctcagcatttgtttatacgtaagataaccccaaagcatacattttgcttttaaattatcacgtggtcctgaacagtgcagtggagaaaggagaagaacttgggatcaagtagggggatagaatatggtagaatcctgttattatttttcttaatagattgcttttctggaaggaaggggaagcctcatgtatgggttccccttattatttcttcaaacttcagaagaaggttggagagatttaattttagacaaatttcttccacattaggatatagcaagaatctgtatagaattccagcctggttgagtgaagtaataatcttcctaatattttttaggtctgtctgacacttactgccaaacgcatggcaaggaaaaactgcttagtgaagaacttagaagctgtggagaccttggggtccacgtccaccatctgctctgataaaactggaactctgactcagaaccggatgacagtggcccacatgtggtttgacaatcaaatccatgaagctgatacgacagagaatcagagtggtaaggccagggttaccacacacctcagccacctgctgacttcgcttggttttttttcttttaagaaattgcatgaaatttcttttttttttttaagctcatggcagctttttctttcttttttgttttttttttttttatcatttagtgaagagtcaagggtatgggatattgattttttgcatgtcagtagaaactttaaattgccctacaaacgtgactgaagaatgcctaaaatgtgattggtttcattaattgggaaatgagatgtatcactgcagatttctatgggactttaataggagaactgagaacacagcctttgaagttaatgcattgttgttctgttgtgttttcttgcctccatcaggtgtctcttttgacaagacttcagctacctggcttgctctgtccagaattgcaggtctttgtaacagggcagtgtttcaggctaaccaggaaaacctacctattcttaaggtatgctcaagagttaactaatggagggatgtagacagcacatgagaactgccatttgagtgttaaaagtagcaaattacctttgtggtctgtgtgactgttcactgtagaacacctggagtggtctgtgcagtactttgctgtgtgtaacttacattgtgttgcctgtagatcctgatgtattataggaccccctgctccatataggttgattaaaaagggaagatgcagtaaaaatctgaccaaagtgggaggggaggagacggaagacagtctttattggtgaaaaacctaattcatctgcttttactactcttgagtttatatgttatcacctaacctagtggacagtgagagctgagggctgcagtgactccataatcgtatttgcatattaggatacagtagattccagtaactcctttaagccatttattttcctgaaatagctcagcttatcttatcttattggttcttagcttg

SEQ ID NO: 4457 - DNA, 6000 bp, Homo sapiens
ccagtgactcaggaggctgagatgggaggatcacttgagcctgggaggtcaaggctgcagtgagccatgatcttccactgcactccagcctgggcgacagaatgaggccctgtctctcgagaaaaatccacacacaaagaagaggtccattctgtgtcccatgtcaagaagcagatcctggctgggcgcagtggatcacctgaggtcaagtgttcgagaccagcttggccaacatggtgaaactccgtctctactaaaaatacaaaaaatagctgggcgtggtggcaggtgcctgttttcccagctactcggggggctgaggcaggagaattgcttgaatccaggaggtggaggttacagtgagccgagtttgcgccattgtactccagcctgggcgacaagagtgaaagtctatcaaaaaaaaaaaaaaaattagattctgagagtcctccccttgtcctctcctgatgccctgaccctggtctcagctccaggaattaggggagctccttggctgtttgaagtgagacactggcctctgggcatcctggccaggcggaaccctgctagactctcccctgttgctgctcagggtccttgtgagtctgtggaatgtggctgtggttggacttcccagtgtggcccgtggctgtgctgctgggatggcctggggcagcatgtggggctgacttttatgcagagtgtggacccctcttgtgactgctttctgtactgactgatgcctttcggtcagtgtctgagccttgtctgctgctcaggtctaatgggtgcaaggaggcctgggaggtgtggaattggagctgccctgaggggggtgccgcctagggtagagacagggatggtgagcagtgggtgccggggctctttcatggccaggccttggggttctggaatctagggtgcctgatgcctcctatcccgcgagtcagcaatgtgactgagtgactcacactgtgacagctgctcagcgattagggttgaggggctcagtgcctacggggattctgcattggagatgtttttccatgctctggagctctctggctctgacattgcttctttttctgccctggctgtatgtaggtgatgtgtttgacgtcctgggacacaaagctgaattgggagaggtaagattcagtctccctaattctatgtgccagtgaaacagggtgcctggccagtaacagtgtagtcaggagtgatgtgttgtctggataggaaatggaagctgcttggagaaatgggtgttttaaggcagaactggtgatgacggaagtggaaattttgaggtccaccgtggacaggagcctactgagagttgggagggcagggatgaacccttccccgggatgcagcctggcactctagcctttcctaagagccttcttatgtgtttcagaggcctgaacctgttgacttctccttcaatcctctggctgacaagaagttcttattttgggaccccagcctgctggaggctgtcaagatcggggacccccacacgcatgagttcttccgcctcctttccctgtgtcatactgtcatgtcagaagaaaagaacgaaggtgggccgaggagccggctcgcactctcctgacctgactctgcccttgggctctgctctgctctgcaatgcggctgggctggggcttcctgggcggggcacgtggctgagggaagccacttatatcacgtgtattcttcctccccacccaggagagctgtactacaaagctcagtccccagatgagggggccctggtcaccgcagccaggaactttggttttgttttccgctctcgcacccccaaaacaatcaccgtccatgagatgggcacagccatcacctaccagctgctggccatcctggacttcaacaacatccgcaagcggatgtcggtcataggtgaggccaggcctggggtgctggggcgtttggggacagcattcaggcctggaatgggtgaagtgtgccgggtgactcttgatgtgtttatgttgggggtctttgcctgtctgaatttttctggcactttcttcacctgccccattcatagtgcggaatccagaggggaagatccgactctactgcaaaggggctgacactatcctactggacagactgcaccactccactcaagagctgctcaacaccaccatggaccaccttaatgtgggtgtgaggagaggaggggccagcctggggggttctactcttagtgtgggggaggcgacttaagtttgttttattgtgtaaatttaaggtctacaacgtgatgttttgatgtgtatatatagtgaagtgattactacagtcagacaacttaacacatcagccagctcccatagttacctctttttatgtatgtggtgacagtccctaactgtggaatgtggcacacacccagtctacagtgcaggattattcattgtcgccctcacgctgtccattagctctccagacttacccaggtgtgcctttccactctgcctccaggagtacgcaggggaagggctgaggaccctggtgctggcctacaaggatctggatgaagagtactacgaggagtgggctgagcgacgcctccaggccagcctggcccaggacagccgggaggacaggctggctagcatctatgaggaggttgagaacaacatgatggtacgggctgcgggacgggccaaggatgggcacggagggctcatgcctgcaattcttgtgccaggaatccttgtggtattttcagctgctgggtgcaacggccattgaggacaaacttcagcaaggggttccagagaccattgccctcctgacactggccaacatcaagatttgggtgctaaccggagacaagcaaggtgagagcccagcagggcagagccagttgcaactgacagtagccctgttggacccttgcatggagccgaggacatcaggcaggcaagtgtgctgaccttgttgggtgcctgtccgtagctcctgcgttctctcttggtagagacggctgtgaacatcggctattcctgcaagatgctgacggatgacatgactgaggttttcatagtcactggccatactgtcctggaggtgcgggaggagctcaggtaaacaagaagcccaggggaggcggtgctgtgcgttgtgcccagggctcaggtgggggtttctggaccatttagacttgaatccctgctccccactgccgttctggaagaccacaaccgtatcatttccacctcgacaggaaagcccgggagaagatgatggactcatcccgctccgtaggcaacggcttcacctatcaggacaagctttcttcttccaagctaacttctgtcctggaggccgttgctggggagtacgccctggtcataaatggtcacagcctggtaggcatcgctatccttagcttgggcagtatctttccagtgagcacttctgtccagggcttttatatcttgttctaatttcccctgatttcagagaagactggtctcaaaggggactgggaggagctgagactcccaggtgtctcctggaaagactggctctctcaggtttctctgtgctccaggcccacgcactggaggcagacatggagctggagtttctggagacagcgtgtgcctgcaaagctgtcatctgctgccgggtgacccccttgcagaaggcacaggtggtagaactggtcaagaagtacaagaaggctgtgacgcttgccattggagacggagccaatgatgtcagcatgatcaaaagtgagtgtgggctgtgcaggtgtgtaggctgggcttgaggctggggaggggcccactgaggtctctggactgcagaagaatgacgggaagggggttgtaacttggtaggctctaaagtgtgtggccggtggccatcttcaccctcttgtcatctcttgtctctgcagcggctcacattggtgtggggatcagtgggcaggaagggatccaggctgtcttggcctccgattactccttctcccagttcaagttcctgcagcgcctcctgctggtgcatgggcgctggtcctacctgcgaatgtgcaagtttctttgctatttcttctacaaaaactttgctttcaccatggtccacttctggtttggcttcttctgtggcttctcagcccaggtaataaatgttcccagtccactgttgtgcaaatctgtaaacctgagggcagaggttctgtcttgtttatcactcagtcccccagggcctagctattttctggtacatactcttaaaaaatgcttattaaaggaggagagaaggagcctcagaaaatttcttagggttctctgtatgtgacatcagctgtcttcctgtgcctgatgtgtagcaaagaaaggttgcatgctcccttgctccctgttctcttccagaccgtctatgaccagtatttcatcaccctgtataacatcgtgtacacctccctgccagtcctggctatgggggtctttgatcaggtatgggggagtttgatgatcagatgggatgcggggaaggtcactgcttgaaggagtcacatagacgtggtgtgtgacacttgtgcccatttcctgtggccactgggaaggcagttctttcagccggggaaggtgtggctggttctccctcctggctgcagctgatctagaactctcttgggttgctgaactaagttagtctgggggtagctggcttgaggttggttctagctgccaaagactttggaaaggaggaggcagggacagagtcagagtctgcccttggtcatccagggtcaaaacggcaacctctgaggccccctatgctacatggtcctcccacacaggatgtccccgagcagcggagcatggagtaccctaagctgtatgagccgggccagctgaaccttctcttcaacaagcgggagttcttcatctgcatcgcccagggcatctacacctccgtgctcatgttcttcattccctatggggtgtttgctgatgccacccgggatgatggcactcagctggctgactaccagtcctttgcagtcactgtggccacatccttggtcattgtggttagcgtgcaggtatgaggccatccaggaactcccctcttctctggaaggagtgagccttctgtccctggggctgccctgggcaccacagttctgtttctgggggaaggggcttttagggcgtgcgcctgcctgactatgcctactttctgcagattgggctcgacacaggctactggacggccatcaaccacttcttcatctggggaagccttgctgtttactttgccatcctctttgccatgcacagcaatgggctcttcgacatgtttcccaaccagttccggtttgtgggtaagtccccgtggcctccttgaatcggtgaggaatcacagctgttctgggactaacaggaccatcagctaatctgcacattcaacatttcttatgtgccaagtattctgtttattttatttatttatttatttattttcgagaaggagtcttgcccaggctggagtgcagtggtgcgatctcggctcactgcagccttcgactcactgcagcctctgcctcccgggttcaagcgattctcatgcctcagcctcctgagtagctgggattacaggcacacgccaccaagcctggctaatttttgtatttttagtagagatagggtttcaccatgttggccaggctggtcttgaactcctgacctcaggtgatccactcacctcggcctcccaaagtgctgggattacaggtgtgagccaccgtgcccagctagcacagagaaatctgaataaagggaaagggagcctgccatgtggctctctgggaactgtcaatccaggaagaggaaacagcaatataaaggccttcagccctggcctgggaggaggtcttctgcacgtggagctggggaggagtggaggaaatgagttggagggtgggggtgtggaatgagtcag

SEQ ID NO: 4458 - DNA, 6000 bp, Homo sapiens
ctggctttttgttccaaaagccacagggcttctcctcccccagactcttggtgcagccagagaggaggagcttggacctcctccaatacaaggctgggcagcctgtactgcgaggagttgcttccttatgcacctctcctgccccagacaccaaagctgtcaggcaaaaacccctgcctcctccccgcagacactgaccctgggtctacacgcacaggagcatgcctgggcctgcacccctacacgcacacacccctctgctttggctctggaaggtccgcagcatccatcctagagccctcccttggatgagtctaagagccctaacctgggaaaaggctgaaattaatacatcagagaaagaactaagtttctagagaggataggcctaggggcgaggagtgctgttctctcactccagtctgtggctaagtggccgaccacctttcccatggggcaccctctgtttttctcccctatatccatccacctagaccttgaagatgtctcagaagtgaggctgacaggtggccagaccagggccacccctagtcattctagtttctttcaagcttcccttaggagaggtctgttcggtctgttcttttcagacctagatcccccgtcccctcaacagcctggcatgctacagatctcttcccccgccccttccactggctgggctgttgctgcccagtggctgcacttagcttagctgcctggaaacagaggaggaattcccacaaatcccatagcacagtcctcatgcccctgcacatgggatagagggccctggaaaggagtgcatgcgaataagacctgcaagtggggtgaggagcctggcgatttccctcctccagttggcaaacagtgacttccgcttcctgcacaaactcagcacagccccagagagctgcctccctcacaccatctcccaacccacggctgtcccacgaatacagttaggctgtattcgtggggcagcactgtggggagtgggctaatagctttcaatcttctaacacagccccggctctggctcgctgccctcacctgacagctgtctttgcccgacactgctattagaagtgagaacgcactgcccactataatggcaactcagctggttgtcttccccacgtccaggaaggactgggggtgggtggggagctgggggcaaggcagtgtgtggtgtgtgtctgctcagaccgcctggcaccgctatggtcccaccactgagacccagactcccactgctcagacccagactcccactgctcatcctgagctgcctcctgcccaggaactgggctaacctctgaagtgcagccagcaccacctggtccccactctgagcctttccagccaagggaagggacatggtgcctgaacagacgctggctcagagagcagccccgcgcctcctcaggagcacagcagacatcccaactgggtggctgttcccagcggcccgtgcagctttactcggcagcctcccagctctccctgcacaaggggagcttagggtcagggcctatgggcctcagaaggggctgggcatgatcctctgagccttgctgtcttctcacgtttgctggcatcacctgcttacctgtgtgcccccccaccaccaccactcttgcgcacctgtgcttgctaggcccaaagcaataacatctttttatagatcaaccagatagctcagcgaaagacaccaagacagacaagcagagaggtgagggagaggtttgttcctttaaaagccttgcttgttgtcaaggcgagagtgtttccctacagagtcacaggtcttgggagatcaaagctgggccagcccctcttgatggacagactgaggcccaggtcacaaaaccacacagtgacacactcgggactagaaccattccatgtggtctcacaagcagtggctctgcctcaccatggggtggccatcctctgtccacttccaccacacacagggacccaatctcatggaaaagacccagaacaggagcccaaaagcatgggctccactccctgccctgccctgacctgcaacctcaccttagagaaggtgcttgtcctctctaggcctccatttcccttctgcaaagcaggctggacaggggagggtgaagcgggggctggactgggcggtctcctggatcccatcctctctgagctgtgtagggcatgtgctggcaggaggccagctgccccatctcaccccacctgagattctctgtctctctttggccagtgatgaggacaacaagcccctgcagggcagtcagacatctctggacggcaccatcaagcagcaggagagtgacgacagcctggtggactatggcgagggtggcgagggtcagttcaatgaagacggctccttcatcggccagtacacggtcaaaaaggacaaggaggaaacagagggcaacgaaagctcagaggccacgtcacctgtcaatgctatctactctctggcctaacggagcccacccaggcacagccaccactttgcaagtgggaggaggggagaaggggagacaaaaccactgcagacctaccacgaagccaccaccaccttcagtaacaagggtacgatatgggggtctgccaagctgtgaggaccagtagccaccaagccacccacaagccccctcccaatgaccccccttcagccccgggtgccaccagtgtgggagagctggagccgtggctgagctcagctggagggagcctggccccttgcccggtctcgcagccaccccgagcgttccaccacactgtccgcccttggcctcggcacacgctcaccttttctgttggttacgggacttctcattgtcttaatttcgctttgtgcatcttcccctccagacccaatgtctctgttttcttttccttttgaaaaagagtccctggaaaagaaagaataagtggattctcccccaggagaatcctttttgcaaagataggcaaaaaggattgaatccataccagaacacgtagacaggctgtaatattcaaaccacctctgggccaatgcatttccaaaggatgcctttctcgccatatgcctcccctggcccccagcccctctgcctcggccttgtcagttgctgagctgggcttggctcctttctggaaaatgacagtatttttggcagggagaaggtgcgcaggcctccttgctgctctctggtttggttgggaggtgtgtttacctcttgctcctcattcctcccctgcccttttctctggaatatctaagatgtgagctgcattgactctgaagacgtttgaggaacaggagtgggcactgatagaaaggacttcaacgccagtgactgtgtacctccagcagaagaaaatcaggtgtctggtcttgggggcactgtgctcacttctagagagaagaaaaaggctgggtttggacttcatgcctcctcactggtgaaacccaggatgtagatagagggccacacccaccctgtccagagtagagggcacctgtccacgtggccagggcccatgctgccaccctcgaggagatggaaccctgtgatgcaaaagctttgctggtgtgtttggggcataaggcactgctccccttccatctctagcagatatcatcttctcagccaattctgtaggacactgaggctcttgtttgacatggtgtgtggatggggacttgccccaagactgagcaggtctgccctttcattggggtgtatacatatcaggggaccctgaggtggcaccgtactcagtgttgtgatgcccccacctagggaggactcaatgctctttgtatgccttatgcagcgctgatctgtccctggagttcccaggttcccagctccccccctgcaagccttgaagcctccagcaacgtctatctccaggagagcagggcagcctatgcaagtgttccggcaggaccagaagtggccactcaacacacgtcctcaccagtcaccccaaatggagacactcgcagacctgcagttctcagaccgaaggtgctgccttcatcctccccacctaatgcatttttgaaaccaaaggtacctagcctcagagacagagaaggagagggggagatcttgagtctaagaggaaccctttagctgtttctgcagctgaggtcagtttcaggagggtgaagctgatccccaggaatggatcagctgccatgggcacagcctccgatttgagcctctccggctgccagccagggggcctgggccagaccagggctctgtccttccgtgactttattaaagcaacatttgccacatgtttaagccgcaaaggtattagcaatgcttgcatcattaataatcattcagttgaaggtcaagcccatagacacacactctctgctggtaagaaaccatagcccagaactgagccaataaggttgtttgaacctgagagtgtgtaatggtcatttgggccaagcctcagctagggctgctgcctggacgcctgaggggcagcttatcacagtgcaaggggacagggtaaacagcagggggtggggtgtgagcttggagggcccctcccctggatttcctccaacacctgcttggatactaggcccactgtccctgaagggaatgtcagggaagtgtgcctgtgagctgaattaaaggactggcctttccagaaaacgctttggatctgagcagagtagtcagtttctcagacactcattccatactgcaccgtacatgccagcgtacccattgcaccgaaagcaggcccttagggcaggaagggacgatgagcaagtctgccacaccacctggtgactgggaagggctgcttctctcgtaagggtcttggggagaagtaagcccgcagcctgcctctgcacctcgttccagtgtcctgccaggctctgtactgtcctttgtgtatgaagaaaatgctgttagccctctctcaggctgctgttctgtgggtgctgagagctgccccccatcaccacgccatcacacccctctgagcagaagcaaatctgaggctgaagaattaagttttccccaagcaaggaaggcaggtggtcagagagatcaaacgctgaggcgtggggattgcaggattcaggaggcagcccctttggggaagaggagggtgcattttccatggagcccatgtcagagtccactccagctcagcaggaaagtggaattgcccagtactgcctgccagctgggtctcccaagcaactaccccaagacataccaacagtgaagccaggacagcaccatgccatcggcgctccagtctgtctggctgggaggaaagtgctgggcatcttacagtaactctagaagttcctttgactaggctgcaatcccacctatatgctcagccctaagagctgtggtttcctgtgctctcatttgtccattcattcattcattcattcattcagcaaataatctgaaatccagtctgaactaaggcctgagctgtggataccatggcgcgtgagttagatgtggtccctgccctcatggggctgacagtcctaaaatcaagtgctaggacacagtggccattgagctgggagcattcttccctctaccgcttaagccactgatggctgcgagcttgaagagagggattctgagggagagcttggtccatctggtcaccaaggctgggcgggacagagcagtcaagaaccacggtgtggcttgagaaacagtcctgcttcctgagcctctttgctctgcctcttggggcaagctccttaacctgtctgtatttttatgcctctgtctcccattcagttcctccttgaatacctctttctacagagaggcacgggctcccctgaaggattgtcgaggccagggttcgggaagtacactgccatcggtcaggggacagctgcctcccaccttgcctgggtgatggtgaatgggactcatcttttcctgccttgcttttgaggagatggttgaatttaagcta

SEQ ID NO: 4459 - DNA, 6000 bp, Homo sapiens
tggcattagatgggcagaggaccagcaggagagatggcatactccctccctggaagcagctgaaaggtgccctggtgtgtgcatgtgggtgctgccctgcagcttcctccactctggcctgatctgtctgctttcccagctcacacagctgtgcctattcctccacgtattcctaggaagcatgcccacctgggttgctgctgttcacgctgaagaatattatccttcctctcgcatttccctgggggttagcagagctctttggtcacatgggtttctaagaagatgcaccttctggcttgatctgaaagtgaatacttggggagggaacctctgaaagatgaccattttccaaacctccatttccaagcaggcttggtgagcataaaagaagccgccagcctttcaaagaggagtcctcactggcagattttcacagcacatttggggcctgaaatttttttaaggcctcaccttgtattctaagctactaaatttagctactttttagcgtggttctttgctcctaaagcctatgacttctccagtttcccacccttcaaaatgtgtggtttgtgatttttttttttttaagagaaagaaaagtaggccaggtgcagtggctcatgcctgtaatctcagtgatttgggaggccaaggcaggaggatcactggaggccagaagttcgaggccagcctgggcaacatagtgagaccttgtctctcttaaaaaaaaaaaataataataataaaactagctgagtgtggtgacatgcacctgtagtcccagctacttgggaggctgaggcagaggatcatttgagccccccagagtttgaggcttccgtgaaccatgatcacaccactgcactccaccttaggggaaagaacgagaccctgtctctacaagaaaaagcaagaaaaataagatgattttaaaagggcagtggggagagaacggaagaataacaacaaggcaaaggaagagaaaataaaaaaaataagatttaaagaatactaaagaaagaaggggcatggcataaaaattaagggaagagaaagaaggatgtggaagaaaaaactaaactaaggggaacccagtaaaagggctgagaccttccagacgtgcagagagaagagcctgtgcccaggacctgggcttccttccagtccacccttctcagatgacaagagcctatctgtcacccccgcctcaggcttaacttggaagggtggaaagagtgaagccagagaccccctgccacagctcagctgcccatcctgtgaattgatagtgaccactctgtgtcactgagatgtggcctccatctctgccaggccagagaggaggcgccccagggatgtccaagactgaccaagaagtgcaagtgatgtggcttactccacagctccttttctttgcaaaagaagagctgctttgcaagtggtgtcctttcagagcccactgctttagtgcccttggcagcttttcccaggtgtgcctgcaactctctttgctcctgatggcagctacttctttggctttttctgtttcagaccaagtcttccaggtactgtctggaatactgtggtttgtgtatgcatgtgcacatacatccatggtgagggagcttcaggaccagtcacctatttcagtaaaacttagaaagtgccatgtgtttgcacgagggccctgggagataatggtcctatgtaccatttgcagctaggagaagtgagactcagctgcacagagtctccaaggcttggctcattcaccctctcctccatctcctgatgccactggtctcactctccaaggccgcctcgtccaagctgctgctttgtagttgctcctgcctcctcacagttgtgaagcggcacggacagaacatggaagccgcacagctagcaagtggcagggtgtggattttagaccaggtcttctgactcccaagcactctgtgggccactgaaaggctcatccagtgcccagcgagcccagctctggcacatcttcctgccagacacattcaccttaaccccctgtctttacgccgtcctcccatcacatttgtggaaacagtctcagcgcctacagtgacttgaccaaggtcacttagaaagcatggaagtgagtctcacgcccagggctctacagggcctttcccaccatgccaccatgctttgggctatctgttccccacccccaccacaggaagctctgcatccttggcagatttgggaacacgtctcatgtataaagacgagcaggcttagaaaagcattgctctgctgctagcttgcctggcagacatctccctggttcttgtttgctacttttctcctagtgaactattggttccctcctgaacccctgttttcctgctgttcagttattgtgctgatgggtaagctgctcttggagtggagctataaccttccattagggagctgccaggtgcctgtgttgggggcagctctccccagttcattctggtggtgcagcatggccttgcaggaaactctttctgttgcttctgagccctcctgatcccgggaagcacagagagacctaccatgcagagtgaaccccagggctctcagctcactcggcccctccccacctgtctcctgctgccactgccttctcttccttttcctctgcttaataagaaaaagtttaaaatgttagcttgggctgggcatggtggctcacacctgtaatcccagcactttgggaggccaaggcaggtggatcgtttgtgcccaggagttcaaggtcagcctgagcaacatggtgaaaccccatctctgcaaaaactagctagacatggtggtgcacaccagtagtcctagctacttaggtggttgaggtgggaggattgcttgagcctgggaggtcaaggctgtagtgaggtgtgatcgtgccactgcactccagtctgggtgacagagcaagatcctgtctcaaaaaaaaaaaaaaaaaaaaatcctagcttggtggggcctagcctggagcgggcagagaaggggtatcttggccgggtgcagtggctcatgcctgtaatcccagcattttgggaggctgaggcgggtggatcacgaggtcaagagatcaagaccatcctggccaacgtggtgaaacctcgtctctgtactaaaaatacaaaaattagctgggcgtggtggtgcacgcctgtagtcccagctacttgggagactgaagcaggagaatcggttgaacccaggaggtggaggttgcagtgagccaagatcgcgtcaatgcattccagcctggtgacagggcaaaactccatctcaaaaagtgaaaaaagaaggggtatcttgagtatgagaagaccaagctgtctttgtttctacctgagacagaactgcagtggctggactgcctttcatggcagctaaatgaggtagatcatttcattgttttacgatgtcagtattgagggaggatcagtcttatgctaggcacagtgaatggtccagatgaacataagatctgatccctgccttatcatttaataggggcataagacctatttacaaataacccttatgcaagaacagtgcttggtgcgaaaatataaagtcaagatccagtaccataggagggggatcatttgcagaagtaggggagctgccagaagtgttccctggccctacaggtcagagctggccccagaaattgggacctatgtaatatgctttgccaggcttcttcacaaaccccaagtcatcagccaaccacaaatgtttgtatagtttccatgagcccagggtatgaggactcctgatctcagtgattttggcctgcaagccctggcactggctcccagagatagcactgggcccttatctcttcacaccttcttgaatttgggactacccaatcaacgtgacgcgtgtcggccatcagtatttaagcctggagttcctcaccagactcaagtgggtgcagaatccatgtctttctgaacgacagttctgctgtgagaagctgccattagagagatccagcaggccccaggactcagctggccagccggtgacactgctcactgctcattgtcctcagctgtggacctctgtccccctctgctggccactcacagaatttcctgctggcactgtcaagatgaagtccaaggaggaagagactgctgtgagtttcccatctgtgctttatcttgggtgtttttgccagggcaatgctggcagagactgggaagcagaagctagtgcagaagtggccattggtgtccagggcagagactggatttctgggacaggatctcagggcagaagaattcccctggtgaggctggctgctgtcagcttcctccaggtggttattggagtagagaaactgccttggaagtgatggtgccttaagccaacgggcagggcagcagggagaggaggagaggactctggctggagctggctgtgttaggatctgccagggagcccccctccaggctctagtcttttttggctttggagagctcttcgctatcctggaaggctggctgggaggctcacttccattccgaatccatgagactgctctgtttgtgagaggagcttctgatcatgggaggcatttctgtgagatgggaggggtgaggtggagtgcctgtcttctgggtggttgaaggatgcaggtgcacatgtcatgtgtcctcgtgcacatccctttcaaccccctttgccccccacccccacccctcctcattgatgcctgtcacacctgggtgtccttatgcacacaactcacagtggaacagctggacttgtggaggggcatctcatcagagctcggtcctcccgcgctcggtgatcctccctgtctcctgccagatgggaaggagcagcccgtgagccccaggggagggggaaatctcctagagcaatccgcccctaatccccaggctgtgcctcagtctggagatggcggctgcagagtctgggaactcaggcacacctgctcgcagcccagtgctgcccagggtctgtgaccccgggggcctgacacagtccgcagacagctggggcctcagagccccgggtacctcatcgccggcacggcttcgggaaacagtgcccacacaggtgaggcgtctggtgggtggaaggagagaatttcaccgggcggggtggagttgggggatgggaaaaggcctgttctgcagttagtcaggtgggctgtgcttacactccagtctctcagggagctctcctccaggtatagagaactgtttgtgggtgggagaagggaggagccttaggctgccaaatgctgggagagcccctggggttggatgtgggcgccctgtgcaggaaggcaggtgaaccctggcagagatgcctccagaagctgtggctatgtggcacttcagctggggcccaggcaccttattaagtggaggggtgttcctggttgtggtcgcttgtgtctgtgaagaaacagtgacaggaatggggactgtgaaggtccagtgagtgctgaccccagggagacagtgggagaggccataaggagtaaaatgtttgggtactgagagtttttagggaattcagaggatggacaatggagaagacctgaatatgagaggggagctcggggccccaactgggatctgtgggtgtgaggagacgaggagggtgcaggacatttactggacaaaagggctttgttctccacagggcagacactgaggggaggatgtagttttcatcagaactgaggggtggccctaatggaaggggctagaagccaagggttagatgagagggatgtctccaccaggacaagagagtagcccttagggtcagggcaggaggaagaacttgctggccacaggaggtggcaggtggaagcctctacctggtgtcagctgataataggcagctggctctgcactgcctggagatgagtagttgctgcttgaaaggatgagtgagtgactttccttg

SEQ ID NO: 4460 - DNA, 6000 bp, Homo sapiens
ttttttttttttaaaaaaagactgtttgtactacatactgcaatggtatgatctccaggatgttttatgaagtaaaaaaggcaagatacagagtagcaggtatgatttgctgccttttagctaagaaaagggaaagacatatatacaactatttgcttgtacttaaaaaaaagaaacacaatggaaatataaactaaaaatagaagaaatggtaacctataaaggaaggaggatatagggaggaggaaacaggaatagatctagacttctctgaacaccctgctttctagatatgactttggagccatggaaatatatatatataattttattttttgagacagagtcttgctctgttgcccaggctggagtgcagtggtgcgatcttggctcactgcaagctctgcctcccaggttcacgacattctcctgcctcagcctcccaagtagctgggactacaggcgcccgccaccacacccggctaattttttgtatttttagtagagatggggtttcaccgtgttagccaggatggtctcgatctcctgaccttgtgatccacccaccttggcatcccaaagtgctgggattacaggcgtgagccaccacacccggcccctattttaaaaaaaatttttttttttttttagacagagtctcactctgtcacccaggctggagtgcagttggctcaccgtaacctctgcctcctgggttcaagcgatcctcctgcctcagctcccgagtagctcggattacaggcacctgctgggctaattttttttttttttttttgagatggagtctcgctctgttgcccaggatggagtgcagtggtgcgatcttggctcactgcaacctctgcctccctgggttcaagtgagtctcctgcctcagcctcccgagtagtagctgggactacaggtgcccgccaccacatccagttaatttttgtatttttagtagagactaaacttggagttttgccaagttggccacgctggtctcacactcctgacctctggtgatctgcccactttggccttttttttttttttttttgtatttttagtagagactgggttttgcagtattggccaggctggtctcaaactccagacctcaaatgatctgcccgccttggcctcccaaagtgctgggattacaggcgtgagccaccgcacccagccaaatatttaatatactataaagcaaaattaaattgaaattttaccaaaaggaaggaagtggacagaaatggatttgcaccattctgtccaaccagagtccttgctcctaagcacagcatcattttccttctcgttaattatcccttttaacagcaacgaaatgacctggccggcacacgagaacacagagatgaggccacaccttgtaatttctggggttctgagggggaccctggtggtggttctgggtgctgcggttctttcagtaaagaacttccaggagtttctaatcagctgctttcatcaagattctcataaccttctcctgctgccgctttcaagtgggtttgttcccgagcacattattaggaaagcggctataataactgcttacctgcctccggctccgctccacaaacacccgccaagcccacactgtgcaaaacagtagtaacacgcccgcctgagaatggctccgcggctccgcattgctgcctaagagctttcctgcatgtgatctcatttcatcctcaccgcaactccgggccggggaactcatgtccccggtgaggaagtccaggcttgagatcggcctcaacagtcggaggtggcaaagccagggcttgctcgaagccccaccttctcactgttggggagcaggctgactccaagctgtggaatcctgtgcaggggttattttggtatctgtggggtaatttcacactgaggctaagtcaccgttttgggttcagatggacatgaaattgaatctcagggatccaactttctagcaatgtactctggagcaaatttggtattttcctcatctgtaaaataggaacaataaaagtacctttttttttttttttttttgagttggagtcttgctctgttaacccaagcttcagtgcagtggcgccatcttggctcactgcaacttctgcctcccaggttcaagtgattctcctgcctcagcctcccaagtagctgggattacaggcacctgccaccgtgcttggctgatgtttgtatttttagtagagacaaagttttgccacgatggccaggctggtctcaaactcctggcctcaagtggtctgcccgcttcagcctcccaaagtgctgggattacaggcatgagccactgtgcctggccaaaaataccttctggagagtgttgctggagttacagatgatatgttattgtgatatggtatcagcaacagtcatctcagaaggtgcagcatcttggaaaattttcttgtgtgcgcttcatctactgtctcagatagagtcactatacattcaaaagtacagatcttcctccactagctaacaaagtcacctccttatcctcaagtctatgttcccagttcaggatgggcctgggtgatgcctcattccccatggctccagggcctctgatgctgccactttgtcagtggctggctcagctcaggcaaggcccctctcccagctaaccatagcataagcctgaatcgatccctgtctcagggccatttggaggattaactaatccatcatgggggaaacctttgaaatgtgccaatgtggctgaggctattgtcaggcagagcagaaactgagtttactggttcccccgtttccgagactttcaagctggactcactctcatgtgggtgaaatcccagcaggtgcaggttgcactgagctcaccaagccgtctatctgccccacctgacgctggatctttttgacctatctctgtttctttaagggacagtaagggtgagaagataaagggatcaggattccagacactgaagagcttttgtttgtgtttttaatagaactgaacacattaaatttccccttttggcatcatcagtctatggactgaaaacatagttctgagattatacctttccgattttatgttttgcaaatctcgaaggtccctggaaatctacagggtacatcttttttcaccctctgagatgtgagctccataataataaaacctaactcagcaattcattgagttcatcactatttattgagtacctactctgatcgctggtatactagaagcacagaagccttcttcttgaagggaaaaagaaactcatgtatctagaaacaccaggctctatgtggcactttcatttatttgccacataaagcctggtatttctagatctatgtggcatcatttcatttaattctcacaactctaagaagtacatattgttccatttcgcaggtgaggagattctgaaagttccataacctggccaaggtcgtttgcatttgcagaggccagcactgaagtccagtcccgtctgactagaccatctgggtccttcccactagaatacagtggggaggagaaaaggacactgatggattagtcagtcgacagcacaggcagcagattataaagctgaactgtttggttagagcagctcggggctggagagggagggctggcaggaggacttcctgaaggagacagcccagaagctccttgtaaggacctgaggcttgggtatgggtggaggaggaagtgtgatgttggccctgggaggggaatgaataagaagagacagtggcagacagcatgccctgaggtcagctgggtggaggatgggaagcccagcagagatgtctggacctgacgaggtggcagcagggaggcactcactgagtttataactccaggaggggcagaagcaatggcaacacccgtcaccaggggagaggatgactcaaagccttggctggaaggagtggtgggtgtggcttggagcctgcccgggccaggcaggtgctttgggaagggtccagccaaggagagtccggtcttcctccacgcaggggagggggagcaggggaaggaaggagagacattaacaagatggaatctgtaggctttggtgcaggacgcttacggggaacacggctcagggagttggattccagattgcttttgaagccttccccaggtcacatcacaccgctgttcccagccgttccaggtcttcctgttgactgtaggatcaagtccattcccccaatctgacctcagtctacgtttttgggctctttgcccactagtctcctaaataagtcctctgcgccccacaaaccagtctccacccagcctccagtgctgccagcctcctccacccccacctggagcagtgacattcatggatagctcctccagcggtctcgaaaaatgaacattttagggttccactttttgctgttggtgtccccctaatgcgaacatcctgtccttgagggctgattctttttacaatagttgtcccaacgggggaagtcatttcacctttctgacttagtttccttatctgcaaaatggagccagtagtgtctcatagggtacagtgcctgcacacacgcccatccacggctgttccaggcctttcctccactgcgggggggtgccaggggtccagaggcgaggaggagggggccgctggacgctgggaaattgggaggaccccaagatccctgtagggatccacggtagagggggagggcttctctgtcctctctatccattcggacctccgcatttctaagaaccagcatcgcaccatgtcactgagaaagagcgcgcacaccagccgccttttgaaagtcacaaatagattccttcagtgaattcaggacagactccccgggggcaggtcccggggcgggagccggtgtgggtagtgctgcgcggcccttaactgtttaccaggcgcgtttcgctgacctcgtctcctggaccccctttcgtgacccctctcaacacctctactggggagacgaggaccccgaggttctggggggcgacgcgacctgcccgaagtgacaagggtcctgggccgcactgctccgccggggtctgcgctcctcggcggagcgggtgggaaggatgagtcctcggggtggagaaggaggagcgggtccccgggtaccgctcacccggccttaggagcccgggagcgcgcgtagggacgcggagttgaggctctccatctgcggccagggaaagggatacagtcccccgggcccctcccggccgctcggaacccaccccaggcgcgtccccgcgggcgcgcgctccaggcggggccgacgggctcggaggcgcgcgcccgctgccgggtccgccgcgcgcgctccctccgctcctctcccccgcccctcccgggcccgcgcgctcccagggtccgccgcgcgcgcgcctcgcgtcgctccccatccccgcccctcccgccgccaccccgcccccggccgggtaccctcgccggacccgagagagagcgccgccgccatcttagttgctgccgctgccttcagcaagacgctgctctgaggcggggagggcgccgcgtcctgagcgcgcggcccagcgtcacggcggcggcggcggcggctcctccttggacccccggagctccccgcgccgcggagcagctagccccaggcccctagagccccgagagctccgagagctccgctcggcgtcccgcgcgcctccctgccgctcccgccccgggctggcgatgctgcgccgccccgctcccgcgctggccccggccgcccggctgctgctggccgggctgctgtgcggcggcggggtctgggccgcgcgaggtaagccccggggctgggccgggccgctgggtcggtgcgggattcgggtccgggtgcaggattcgggtcccggtgcggggattcgggtccgggtgcgggagtagggccggatgccgggattcgagccgggatgcggggagtcgggtccga

SEQ ID NO: 4461 - DNA, 6000 bp, Homo sapiens
tgggaggccaagacgggtggatcaccagaggtcaggagttcgagaccagtctgaccaatatggtaaaaccccgtctctattaaaaaaaaaaaaaaaaaaattagccaaggtggtggcatgtgcctgtagtcccagctacttgggaggctgggacaggagaatcacttgaacccgggaggcggaggttgcaatgagctgagatcgcaccactgcactccagcgtgggcaacagagtgagactgtgtctcaaaacaaaataaataatttaaaaaagcaatctgtggctggatagtggtggtgatggtagcactgcagtgtgaatggactgaatgcccctgaactgtgctcttttttttctgaggcagggtttcactctgtcaaccaggctgaagtgtagtggtgtgatttcagctcactgcagcctcgacctcccaggctcaagcaattctcccacctgggactacaggctcagacctccatgcctagctaagttttaaatttttttttgtaaagatggggtgtcaccatgttgcccaggctggtcttgaactcctgggctcaagcgatctgcccacctcagtctcccaaagtgctgggattacaggcatgagtcactgctcctgtccttgaactgtgctcttaaacatggtgaagatggtgaattttatatgtattttaccacagcttttttttttttgagatggagtctcgctctgttgcccaggctggagtgcagtggcgtgatcttggctcactgtaacctctgcctccctggttcaagcgattctcctgcctcagcatcccgagtagctgggactacaggcatgtaccaccacgcccagctaatttttgtaattttggtagagacagggtttcaccatgttgtccaggctggtcttgaactcctgacctcaggtgatccactggcctcggccttccaaagggtaccacaattttttttaagttgcgcaactttgtaatcagaatcctaacaaaacaataattagaaacttgaggagtacctcagcatggctggaggctgccgtggggaaagcaccagctgggaaatgctagctgtggacaccaagaccctgcagataagacagggagctctggccaggtggggtggctcaaagtgctgttaatcccagccctttgggaggccgaggcaggcagatcatgaggtcaggagttcgagaccagcctgaccaacatggtgaaaccctgtctctactaaaaatacaaaaattagccaggagtggtggctcacacctgtaatcccagctactagggaggctgaggcaggagaatcgcttgaacctgggaggcggaggttgcagtgagctgagatcacgccactgcactagagcctagacatgagagcaagattccatctcaaaaaaaaaagaaaagaaaaagagagctctgaacaagcgcctttagggtcacagagaaagtgcaacctgctggaggctgagagttacaggtctggaaggcgcctctgtgaggagaggaagccccaggcgcgagcgctcattttcagtcatcttaaaatagagcagaccaggctgggtgcggtagctcatgcctataatcccagcactttgggaggctgaggcaggcgggtcacttgaggtcaggagttcaaggccagcctggccaagatggcaaaaccccatctctactaaaaatacgaaaattaagtgggcatggtggtgggtgcctgttgtaatcccagctactcgggaagctgaaacaggagaatcacttgaaccctggaggcagaggttacagtgagccaagatggcaccactgcactccagcctggacaagagagtgagactccgtctcaaaaaaaaaaaaaaagtagagctgaccagcctgctgtgtgcattagctgagctgagggcttttcctttcttgctgaaagttaatgttcaacccttcccgatcccatgcctgagaaatatcaccttcggaccaatgcagctcagaagttatgctgctgtcttcctgaatttaccaatcatgtagaagttcactgatgttacttacagaatcccatgttgaatagaacaaacagcataagcttgttcagtcctcacaaataacccagtgaagtgggttctgttattatggtgatccccacttctcagacaagatactgaggcccagaaggatgcattaacttacccagggttacacagctagcaaggaagagagctagaagatgagcccaggcagtttggctgcagagtctacaagctcaactgtttcaggcctgtctaaagctcagtctcctcatccatgaagcagggataatagtacctactgcttggactcgcgtgaggaccaggtggaatcatatgcatcaatcatttgccacggctcctggcacacaggagacgcttgctgaatggtagcggcagctgctgcatcttctcattgcatcctcattccatttcaggttaaattttggtgttggactccttagaattctacctacagcatctctgacaaaagcccgccaggctccgcttgactctctgcccggtgcgctgtcagatggcgccaagcccaagctctttcctttgcttcctgtagaagcccgtcctagagccctgggctgtgaggaggagcagccccacagggtcacactgtccttttcccttgcagaccttggcacccgccatcaactggttgccttttctcaacaccatcttctaccccgtggagatcaatgaatccgagcctattgtggtctatgacaaggaataccttgagcagatctccactctcatcaacaccaccgacagatggtaagaggacccccagtggcctggggcacgcctctcacagacagccctcttcttgggcaggtgggcaggggtggggatgacagtctgactcaggagagtgggacctgggcgggcttttacgagaggcagcaggacatcctggttacaggcacaggtttaaatcccagcctctttcaaactaccagctttgtagccttgggcaaatttcgtaacctttcttaagttcattctcctccttcataaaatggtgatacaaatatcacctgtggccgggcatgaacgcccgtaattgcgggacttttgggagacagaggcaggaggatcccttgagtccctgcgtttgagaccagcctgggcaacatggcgagacggtgtctctacaaaaaataaaaaattagccagacatggtgtcgcgtgcctgtcacccagctccttgagagggaggctgaagtggaaggatctcttgagctcaggaggcagaggttgtagtgagctgtgattgcactgttgcactccagcgtgggagacagagtaaaaccctgtctcaaacaaaaaaacctagcacctaccatttagggctgttgtgagaatcaagtgaaacaatccatatgaggtgatttaatagagtgcctagcatatactgggactcagtaaatgttggctattatttttagttaatacttacgattttctttcttttcttttcttttttttttttttttgagatggagtctcactctgtcacccaggctggagtgcagtggcgcgatctcaactcactgcaacctctgcttcccaggtttaaatgattctcctgcctcagcctcccaaacagctgggattataggcgcctgccaccacaccggctaatgtttgtatttttagtagagatggggtttcaccatgtttgccaggctggtccccaactcctgacctcagttgatctgcctgcctcagcctcccaaagagctaggattacaggcataagccaccacacccagcaatacttataatttttaaaaaattttttgaaaactaccaaaaaaatagggaaaaaaatttatcgtatttaacttatttttttcctaactccccaaacttacttgttaaaatttttttaatgagatggggtctcactatgttgcccaggctggtctcaaactcctggtctcaggcaatcctcccaccttggcctctcaaaatgctaagattacaggtgtgagccacctcaccaggctctgaaaaaattttaaatgactcctgttgatcttgtggtatgtgtgtgtgcatatgtagagagaaagcatgggggagggcaggagagaggagggaaagagagatcggttttctaatatgtggtctttttttcccattatcataactaaatgtctagtctccttttcccttgacctgtatcctgaacattttcccccttgtcatctcaaaacctctgcaaacatcatttttcatggttgcatagtactccgtcgtgtacaaatacagttctttacttcctccttctcattatcaggcattttggttgattctgattagaggttagatgttcactacagtctcaaggtgacttcttggcaacggtggcaacagctacagataggttccctgtgccctgcaggtggggcagtaggagctgtcatcatggaaagcttggcctggctgggctgagcttcttttcctgcccctgctattcttagcctctctggccttctggctggggcacctccaagctgtagaagtggtagtcacctctccagcccagccctgtagcatacaccattggggtgggtctccatgctggggcttcatagcttccagacacagagcagctaggcaacaagcatttattgagcacctgtggtatacaagtgactgcactcaacactgaagcgtttcctatggtagaagacccaggcttttcccttgaagagcttacattgcacgtgcttagggagcagtaacccaccaagcccccgcaggctggaaggggcctggggtcacaggccaagtttgagagccccctaggggccagcaggggaagggccgcaatcctccctgcctaggtgtccctgagcctctctggcctcctctccccgcagcctgctcaacaactacatgatctggaacctggtgcggaaaacaagctccttccttgaccagcgctttcaggacgccgatgagaagttcatggaagtcatgtacgggaccaagaaggtgagcctgctactgcgtatgcctgaatatgggctgagcgcctactttatgccaaggtgtctatgggagcacaggaagggacctcagccagctgggggtgggtagaagcttccggaaggagtgcttatgccaagtaaagggtaaagaggagtcctagccactcagccaatttatagcaaaaagtagttgccagtagtgatgatagatgctccccttgaacaactcatgatcctcacaatgcctgtgaggtgagtactgttattagccccactttgcacaggggaccaccaatagtattacttcttccccggaaacgtaaaacacagaacagcacctggtccttagaagcaccacgcgactgttcagtgttattattttcctcccagtttgtattctgggaaaccccaggccaggtgggctctacctgccgttaaatgcccctgccaggagccctgagggtccattcttccaaaggcttcagggaccttccctgccctcccacaggggaacctacccccagtggaaagttccacagccacttccaccttctccccaaggaagtggctgtcaccctctcactcatgcagccgactaatggttactcattgaactcctgccatcgcgtgccaggctctaagcccagtacgggaatactgagacaggtgagctggggtctgtaccccgagagcccacaccggctgagggaggtgataggaaatgaccagttctcgtatgtgctgatgggatacatcacgctcgggccccagagagtggctggaagaggccccgctacagagcagtagaggctggtgtgccaagctcacctggcacagcttccccaacccagacagcagctagcaagaccccaacaatcctccccagagaggaggcagagctgactccagctggaccccactcctgcagcccttcccagagtccaatccagatg

SEQ ID NO: 4462 - DNA, 6000 bp, Homo sapiens
tggtattaactttaaacctactctttattatctaggccaacctcatatatggatgttttggacaggaagggatcttgggaggtcttccagtccttgtcctgcctctaggaaggacagtagctgagacactataaaatctctttggtgtttaaagtcagatcacagatagtctactaattatgcaaattatacatcagaacaggcaagtggtgcattcaagtatgtaaataaggcattccaaacaatcagtttgaaattccaaatgtagaacatctttaggacatattcaaaagtaaaacatgatagcctcaccgttttagagttatacaaagatagtgcagctgtgatgtggctctaaggaaatccttgtgtcttggctgactggattttcttttgttaactgtatttaaacctggagggacggatgcattcccattattgaggaggttgttgagatggacacttttcctcccattgttgtgcacaaaatacagcgaggcactgaaaatcagatgtgagtcaggagagattgcttaataacccccacttggcctggattgctcagcactgccagttgcacagaggcttttaaaacaaatgtttaagtgtttctctcttccccactcccgtcattactccccacccctcattgcatcactgcttcagccttatccccagcacatgtgtgggaattctcaggttggtatagagagcaggagtgctttagaagctttctaagccagccccagattgcccgatcaggaattcactattgtccctttccatttgaaggatatctgaatgttctcactcctttctctcctgtgccaaagcaaatgcacagtggcaggtctgtgtttactctcctacttctaaagccatgactgatccacatgctttccagatcccaggaaaaacaacctggtggagatcatcttggatatcaacgtcagtcagctaactgagaggctgaaggggatgttcatccgccagattggggtcctcctgggggtgctggattccgacatcattgtgcaaaagattcagccgtacacggagcagaggtagctgggcaatgaatggggggagcaaaggaaagaccaggggcccccgggcttcttgaatgagctgagaaatagtgtggttagatagagaaaggtgggctttctgaccagaaacactcatgttgccttttcttcaatagacttctgtcttctagtgcaggtgacatgcgctgtactagacacttcagcagggctccagggtgtaggaggtcaactattttgacaaccacagtctagtagaggagataagtaaatatggaacattagtacggtgtgggtttggtacaacaagcggcattgtggaacactgtggcaaggacaatgaattcttctaggagagttggggtaggagtaatccaaagatttttctagaataaagaaaacttcaacctgggcaacataacaagaccccacctctacagaagatttaaaaattagccaggtgcagtgtggttcgcctgtagtccaagctatttgggaagctgaggcaggagaattacttgagcccaggggtttgaggctgcagtgagctctgatcacaccactgcactccagcctggaagacagagtgagactgtctcaagaaaaaaaaaaaaaagaaaaaaaaaggggaaaaggaaacttatattgaccaggcatgggaggatggggaggaaattcagaacagggcaacagcattgagcaatggccctgtggtatgaaagtacacagtttcttccagaagaagtcacttggttcaagcttagtggccccaggatgtggtagaagacaagactggcagtggagattgagaacagttatatgcaagctgaggatcttagttttaatagtttgggtaggcagatccaagttggtttgttttatgtgtgtgaagtttttgttttgtttttaaaagcaaggaatttccataatttgatttttttttttttttttttaaagaaagatcagtagtgtggaagctagtctaaaatagggagagaccaaaggctgggagaccattcaggaagcttctggactagtccagtgaaaaggtaataaaacctgaattaagatagtggaagaagaggagaagaaattaaaagaaattcagtggtaattcagtagtacctggccctttacgaatgaaggtgagtgagatagcaaatgtgaggcttttggtttggatgtctggatagatggttcaggtcattaactgagattgggaaggcaggcgaaaccagtatggatgattgaatttggggtgtcttactggctgcgtcaggagatgttccgtcagatagccacaagtaaaggctggaacttgtggaaggaagagcccgagataggagttactgcatacaggcaggagccaaagccatgagaacgggtgagtctcactaggagagagctaagatggataaggacacaactctgaagggcatcattatttaaggaggaggcagagaaagaagaggtagcaaaagaaactaagaaacagcaatcaggtgggaggaaaaccaaatgagagtagtctgctggaagttaaggggtgatctggcaaaaggggtgcttccaaaggattcagatgctacagggatggaggtgtggtgagaacacaaagtaggcctatgggtttgtgattagtagatcagtgcaactatagtgagagcattttacttagatgttggaggcagaggacagatttcatggtttgaggatacagagatggtcagtataacacctttttgaggaagttggtgctgaaaataatatgggaggtaggattgaaagaatatctttaaaaattttttttcattgtggtccttgtggaacatgaacatctttttaaaataggaagtttgtgagcatttgtatagactgagaggaaaaggagatggtggagataggggatgggtaataaatggaggcagatctgggggaccagccaagttggaaacatgaggtgagagcagtggttcccaactccagccacacaatagaatcttgcggaggttgtctgaacataacactgcccaagccttagccccagagattatagttcagttggtctggagtggggtctgggtacctagaatggaaaagctccccaggtgaatttaatctacagtcagggctcactaggtcagagatagcacgattagggataagtatactcagcagcctgggagtaggaacagggcaaatggctgcttgattgatccaagctggcgggaattggctggcaagcagtggaaagatgttagcaagagtgctggtaagagcactgttgacaggttgctcagattcaccagcactgcatagggggcatgagcaagagagaagcttctgggtttccctgagcttctggcttgtactggattgacttagttaaggaattcaggaagaacatgtgattggaagaaaatagtattttacagtaggaaagaacatggcccttatattagacccagcttctgagccctgccctactagtgttagctctgtgggaaagttacttcacctctctgaacctgttttactatctgtgaaaatactagtacctatttataggattgttatgaggattaaataagttaatgtttgtatagtccctcacacatagtgtgcaattaatggttatgagttgattttgagacttgttggatttgaggtatctgttgaagctctggggtagatattcacacaagtatttgcagatatagactggtcactcaggagagatgtggggaaaggagataaagatctgagggttattgatatatagaccgaaattgaaactgtaagcatgaattaggtaactgggagaagataatgggcaacggaccacacatcctttatggcaaaagtttttttttgtttgtttgtttctggaattgataatgccccattgttaatcccactgtgcagcaagcttttagaaagtctgtggcagtacttctcagattttatgtcatgcatgcctggaaaatgataccatttatagggcaccttgggataaacagagaaggctgcttgtattggaagcaactggtccagggcctctaggatgcccaggtcccacccagccacactgcatgatgaggggatcaatatcttggtcacacctgtaaaccagtgtgactcactgatttagaaggttctaattgtaaaactcacatggagctcaaggggcaggctactaaaaattaaggctaaggcatagaacagacttggtactacccagatgtgagttcacatgtggcctatcttggacaggaattgacaatcagcaaacagattctgggcatggagtaatataagttcatagcagccatactacagtgtaagatctttttgttgtcatcataattgttttggctatgttgtgatgctgtccaacaatttacattaacaaagcattgtggtttgtctttcaagtaaactagtcacaaacccagcagtcttagctggaaaaaggtggacagcaggaatgtagccataccaaatccccatttgtctcatcctccagttagatggagagtatgggtcttcttgctggaggaatgggttcttttgttagctggggcagcttagggcattttaaaaagaacagactttgtagtcagacataacagggttgggatctggctctgccataatcaactgtgtgaccttgggcaagttacttaacccctcttacaaagccccagtgttgttctctgtaaaatggagatgaccctgataacacctttctcactggcttgtagtaacagaatgcatgtaacacttagcacagtgtctgtcacaaacagaaggtacttagtaaatgttagctgttgctgcaggtatggaccgcttcagctcattagtactgttgcatgtctctgcagcaccaaaatggtattttttgttcaaaacgagcctccccaccagatcttcaaaggccatgaggtggcagcgatgctcaagagtgagctgcggaagcaaaaggcagactttttgatattcagagccttggaagtcaacactgtcagtgagtaattctgggaatttgggagcaagagcctacctagtgcctgcagctcacccattggtcctttctgtccttggccttcatcttcttttctctgggaagatggagataatcattctcttgcactactattaccatgaaagagtcctgattcatcactggggattcttaacttggggcccatgggcccctgagatcgtgttcagaaggctgtgagcttgagtggggaaaaatttacatctttgttttcactaacctctgactgaaactcactgtttacttcaatgatcaatgtaggcaacaaactacagtagtatcaacagaacctgtggctttgaggcaatagaaatcacaaataatttcctatcacattacatgatgtcatttttacttatcactacttcaaaattatgatagttgttaaacccacttctagctcttgttgtttaatgcttatttatttatttatttatttatttatttattttgagatagagtcttgctctgttgcccaggctgcagtgcagtggtgtaatctcagctcactgcaacctccgcccccccgggttcaagtgattctcctgcctcagcctcccaaatagctgggattacaggcatgcaccaccacgcccagctgatttttatatttttagtagagatggggtttcgtcatgttatccaggctggtcttgaactcctgacttcaagtgatctgcctgcctcggcctcccaaagtgctgggattataggtgtgagctaccatgcccagcctgtcttcttaaatatttcaaaaacgtttaatataattattgccttcctttgaagtactataggtattttatttttccaattgtgagaaggggatgtgtgggacataaaagattaagaattgctgatatagacaaacaacaagtgaagacaggc

SEQ ID NO: 4463 - DNA, 6000 bp, Homo sapiens; identical to SEQ ID NO: 1515

SEQ ID NO: 4464 - DNA, 6000 bp, Homo sapiens
agccctaacggagtgagcctgtggagtttctctgaactctcttccatgtgagaatacatctgttgctgtttgcccagttaccttttgtggaaactggttttctatactgagcaccttggaactgggctcaactctgcctgagaaatgaggatgtccttcctcactgagccttgcggaacaggaggcatggttctaaggaattgtgtgtactgacgcacaggctgctttccctggagatacacacttatctgtcactcacttggatggagttaggcattggagaaagtatatgtgtttgagagtttggctggtaggtcaccaccaaagggtgatcctccatccacctcacactggacttctgcccccacagtgcagcatgactagctaacaggtgatccaggtggtgggcaatcagcatgccatttgtttttaaatcctctgcctagggttccttcaagagaacctggcaaagccaccatggatgtcttattctcctggattaatgggtcacataactgtgaacgcttggataaagaagaacagattagatagaatattgtggaaattatggcaaagattcattagacagttgttggcaacaaagtaattggctggtggcccatcctgaccttctccaaggaggcctgcttttgagaggaaggaagactaggtctctggtggtttaggatgaaaccctgccctgaggaacttggagcagcgtggttaaattggatgccagggggaggagggtcctgaaggtggggaggagagtcagaaagtgccacagtggctagaaaaatggcagcatgtaggaattttgaaagatggaaaagaagttatcatttgtcagagattaaaaagtagggaagtggatttcccctaaaggtcatacccttagaagcagctggtcaagtaacaggtgggcattttgagagcaaggcacatgtgtctttgtgtaggctccaaaaagtgactcaaaaagcagagggccctgagattggagtgtatgcctggggtcctccatcccatccctcatagcctgtgagtgaccaggcaattctttcctgtgcttttatcaaccagggggaaacactcctccatatgtgctctcccaggcctgctgcagtaatcagctgaaggctatacaggtacccttgtgtgtgaggttctagtaattgggttgttttcccaacttaggaatgatccaggccctgggaggcttctttacttactttgtgattctggctgagaacggcttcctcccaattcacctgttgggcctccgagtggactgggatgaccgctggatcaacgatgtggaagacagctacgggcagcagtgggtgagtgggcacctctgacctgaccagtgtcagagctcctcaagccccagaagactgaggccacactgccaccagccatgcaggtgaagagccagagctcatcttctgtcttctgcatttcagacctatgagcagaggaaaatcgtggagttcacctgccacacagccttcttcgtcagtatcgtggtggtgcagtgggccgacttggtcatctgtaagaccaggaggaattcggtcttccagcaggggatgaagtaagtaatgaaggacatgtcaaggccttggctcaaagaaggggactggtgatttgtaaaccctttgccaaaaactaaacatatgacacatatagccaggtttctggaatctctagtttatagagcaaatttaggaagcaagaaatgtagctttctagttttttcatctgacctccaagttttcaagtacagctaatacataaagatgttgatctgccattttaatgcatagcattagaagataaacctttatttgcaccttttaagttttttctcccctactttgattttaggaacaagatcttgatatttggcctctttgaagagacagccctggctgctttcctttcctactgccctggaatgggtgttgctcttaggatgtatcccctcaagtaagttgatcctctggtagctccaaaaagtatgaaatagtatgtgtggcttttccccccattacttgtggtaatagttgttattttcagaattttgagtggtatgtacaaaaattcctatgggttggaaaactgtgaaagcttgacatgtcagtaaatcagactaacaaatcctgaggcttccatgatagcagctagtgtttaggatttggcccaagataagataaagccacacaggctctagctccatggaactgctcaacagcgaactgcattgagcactcaggtctgccacagctgtagtccagttgtctttagaggccaactgggggtatgctggagcgtaggcgcccaggctcaaatcttgatttgcttgcttagtcactgtcccattacaagtcatccacctttctgagactctgaatactctgctctcaaagaaagaaggttggagaaacagatctgaggtcccttttactttataatcagtcatgggtagagttgatcaaaggaagcatactgctagtctttggccttaaacacagtgaatgactctgcatttcagataaacttgaattttcaaagagggtttatcacaaactccgttagttttttgcaacattgagtatgtttggtgatacctggttgaggttaagcaactgcaacttgattaaaacgtgcaaagccacagattgtgggacccatttacaagttcctttgaagcttttgatttaaagcattagtctcctttgaattcctgctgtcctcatccttgctcagacccgtctggaccatctctcaatcccctgttgccagcacttccttcagctcatcttatccctaaagtaaccaaaacccatcagcctcattcacttcctgtgggttatgtgcagacatcgtctgtggtgcaagatgagactggcatccagagtcagtctcattgtcccaacctgtctttatagctttctcttgtaccccttacccatccaagctcatgttaggtgaattcggctttcttcctctgcctttgtgtttggtaagatccttcctccccacatccctccttctgttccctcttaccctgccaatcctgatagtcccttcagggccggtttccttggagcttgtccctccagggcctgtgcacttgcacctcttctctggcattacttgttgcttgtcatttcacctccctgctaggttttaatctagaaggcatgggccacagtgtctttcttctctgtgcatccccagctccctacacaaagctggtgtacagcaggggccagccatctccaaattgaattctgtcagcttgggccattatgtatcaagatggggcttggagaggtcacagagctttccaaaaaggctggtggaaaattacactgaaaagggggcatttccatcttctgggtccttccctggtttttttgccaccaccaaagagattgttctgacaggttctgcccaattttggaaggtggttcagttattcggtgactgagtcaaatgagatcatctctcttagctgccttgtcagacacacaggaagaagaggagaccaccggagtcctgcccagggacagcctttctcacaccatagcagggagctggtgatcacggaggctgcctggagcctgtcagcaggctagagactgtgtggctcagcctccaggccccttggaagccttcgggctcagcttttttcagtccccaggaccaggcctcagaacacagagctgatatcccaaatgctgttgtcagagatcaaatttggggaatgcataaactggttttgacccacactggcaggtctttatcttcaaaatgctgggatattaggcagatggtcttaaaaagcttcttaaacactttagaaatgaaagaaagaaaatgttcagttgctctgggatggttaacagaaaagtactctgctcatcctataaaccaagtcttatgaaatccaaactgaagatgagtagggattccattacaaagtctgcagactgatttcctctgcgtctctaggccctgggcacatggagtagcaatctgttttaagacatttttatttgttctgttaatgactcagtagttaactgtgactgtacttggcttctcctttcaggctgattatttcattgtcactggtgatgtgcaatttctctttctttatttgaactgtgttcgtgtgcatataaattggtaccttactctatttccagacctacctggtggttctgtgccttcccctactctcttctcatcttcgtatatgacgaagtcagaaaactcatcatcaggcgacgccctggcggtaattatgggcattctgactttggttggaggaggagtgggaggggctatagttctattggttttttgtttccctcaaggtgtctaggctccctcagtggtcagtctgattagctaaggtgactggaccagcaaactgaccatagtcacatcttcagaatgtagatctcagttacagtttgaggactggtcatgttttagactttaaaatacaaaccaagtatgatttagtgaaaacttgtcagaatctaaaccatctttccaggtaacttggtattcctaaaaacatgtaaataagtacagttgaggtcccatgtttggattttaacacacccgacccccatcatcctccggttggttttcatccctgtttccctctgtaatgctggagcgaggaagactcactgtagtgtgtcttgtctgtctctttgccacccacaggctgggtggagaaggaaacctactattagccccccgtcctgcacgccgtggagcatcaggccacacactctgcatccgacacccaccccctctttgtgtacttcagtcttggagtttggaactctaccctggtaggaaagcaccgcagcatgtggggaagcaagacgtcctggaatgaagcatgtagctctatggggggaggggggagggctgcctgaaaaccatccatctgtggaaatgacagcggggaaggtttttatgtgcctttttgtttttgtaaaaaaggaacacccggaaagactgaaagaatacattttatatctggatttttacaaataaagatggctattataatggaatttgtctgtgccctcgtcgcttctttggtacagatgtctatgtgatctggagctgtggttttcaacatgagtccctgaccagcagtttatcagcatcacctggttgcttgctaggaaggcgggcccagacccactgagtcagaaatgcatcagcaatgtggcttaataagccctcaggtgattttgatttacattcaagtttggaaaccactggctaagaggaagcattctgcccgtgctcttttagttggagtaggtgagtttacctgacccattttttctggctgctgcctggggtgatagggctgtaactccacctgctgccttagcatctggctttttgatggaagagcacctcgcctaaaggatttccagaccctcagagtatactaaactgcagatgaggcccttctctttcagtctaaaagagacctgaagccttcctgctttccctccagagatcaccaccacatctcaagtgtctctagcccagggcttatctgagaagcagaaatctatcccacacagtctgcctgggcatgtgtgctgagaagtggttcccttccttccatataatgtgttcctaatttagcatcaatgacacaatttcagcaagtggttatgtgccagcaagcacttaagaaaaaggtgaaagagatgtgtttacttcagggtcaagtctgagaacacctcctgctttcagagctgctgtaaaaggctcccctcagtctcagccatgagtggtgcagagtgctgttaactgccggtgcttctcccaggctgtcattgccaactgtcgcctccaagcaaacacaacaagcaaactccttacctctggcaccaaacagtgatcgtgatctgccagatgatcatagtgtcttttttctcc

SEQ ID NO: 4465 - DNA, 6000 bp, Homo sapiens
agtcattctagtttctttcaagcttcccttaggagaggtctgttcggtctgttcttttcagacctagatcccccgtcccctcaacagcctggcatgctacagatctcttcccccgccccttccactggctgggctgttgctgcccagtggctgcacttagcttagctgcctggaaacagaggaggaattcccacaaatcccatagcacagtcctcatgcccctgcacatgggatagagggccctggaaaggagtgcatgcgaataagacctgcaagtggggtgaggagcctggcgatttccctcctccagttggcaaacagtgacttccgcttcctgcacaaactcagcacagccccagagagctgcctccctcacaccatctcccaacccacggctgtcccacgaatacagttaggctgtattcgtggggcagcactgtggggagtgggctaatagctttcaatcttctaacacagccccggctctggctcgctgccctcacctgacagctgtctttgcccgacactgctattagaagtgagaacgcactgcccactataatggcaactcagctggttgtcttccccacgtccaggaaggactgggggtgggtggggagctgggggcaaggcagtgtgtggtgtgtgtctgctcagaccgcctggcaccgctatggtcccaccactgagacccagactcccactgctcagacccagactcccactgctcatcctgagctgcctcctgcccaggaactgggctaacctctgaagtgcagccagcaccacctggtccccactctgagcctttccagccaagggaagggacatggtgcctgaacagacgctggctcagagagcagccccgcgcctcctcaggagcacagcagacatcccaactgggtggctgttcccagcggcccgtgcagctttactcggcagcctcccagctctccctgcacaaggggagcttagggtcagggcctatgggcctcagaaggggctgggcatgatcctctgagccttgctgtcttctcacgtttgctggcatcacctgcttacctgtgtgcccccccaccaccaccactcttgcgcacctgtgcttgctaggcccaaagcaataacatctttttatagatcaaccagatagctcagcgaaagacaccaagacagacaagcagagaggtgagggagaggtttgttcctttaaaagccttgcttgttgtcaaggcgagagtgtttccctacagagtcacaggtcttgggagatcaaagctgggccagcccctcttgatggacagactgaggcccaggtcacaaaaccacacagtgacacactcgggactagaaccattccatgtggtctcacaagcagtggctctgcctcaccatggggtggccatcctctgtccacttccaccacacacagggacccaatctcatggaaaagacccagaacaggagcccaaaagcatgggctccactccctgccctgccctgacctgcaacctcaccttagagaaggtgcttgtcctctctaggcctccatttcccttctgcaaagcaggctggacaggggagggtgaagcgggggctggactgggcggtctcctggatcccatcctctctgagctgtgtagggcatgtgctggcaggaggccagctgccccatctcaccccacctgagattctctgtctctctttggccagtgatgaggacaacaagcccctgcagggcagtcagacatctctggacggcaccatcaagcagcaggagagtgacgacagcctggtggactatggcgagggtggcgagggtcagttcaatgaagacggctccttcatcggccagtacacggtcaaaaaggacaaggaggaaacagagggcaacgaaagctcagaggccacgtcacctgtcaatgctatctactctctggcctaacggagcccacccaggcacagccaccactttgcaagtgggaggaggggagaaggggagacaaaaccactgcagacctaccacgaagccaccaccaccttcagtaacaagggtacgatatgggggtctgccaagctgtgaggaccagtagccaccaagccacccacaagccccctcccaatgaccccccttcagccccgggtgccaccagtgtgggagagctggagccgtggctgagctcagctggagggagcctggccccttgcccggtctcgcagccaccccgagcgttccaccacactgtccgcccttggcctcggcacacgctcaccttttctgttggttacgggacttctcattgtcttaatttcgctttgtgcatcttcccctccagacccaatgtctctgttttcttttccttttgaaaaagagtccctggaaaagaaagaataagtggattctcccccaggagaatcctttttgcaaagataggcaaaaaggattgaatccataccagaacacgtagacaggctgtaatattcaaaccacctctgggccaatgcatttccaaaggatgcctttctcgccatatgcctcccctggcccccagcccctctgcctcggccttgtcagttgctgagctgggcttggctcctttctggaaaatgacagtatttttggcagggagaaggtgcgcaggcctccttgctgctctctggtttggttgggaggtgtgtttacctcttgctcctcattcctcccctgcccttttctctggaatatctaagatgtgagctgcattgactctgaagacgtttgaggaacaggagtgggcactgatagaaaggacttcaacgccagtgactgtgtacctccagcagaagaaaatcaggtgtctggtcttgggggcactgtgctcacttctagagagaagaaaaaggctgggtttggacttcatgcctcctcactggtgaaacccaggatgtagatagagggccacacccaccctgtccagagtagagggcacctgtccacgtggccagggcccatgctgccaccctcgaggagatggaaccctgtgatgcaaaagctttgctggtgtgtttggggcataaggcactgctccccttccatctctagcagatatcatcttctcagccaattctgtaggacactgaggctcttgtttgacatggtgtgtggatggggacttgccccaagactgagcaggtctgccctttcattggggtgtatacatatcaggggaccctgaggtggcaccgtactcagtgttgtgatgcccccacctagggaggactcaatgctctttgtatgccttatgcagcgctgatctgtccctggagttcccaggttcccagctccccccctgcaagccttgaagcctccagcaacgtctatctccaggagagcagggcagcctatgcaagtgttccggcaggaccagaagtggccactcaacacacgtcctcaccagtcaccccaaatggagacactcgcagacctgcagttctcagaccgaaggtgctgccttcatcctccccacctaatgcatttttgaaaccaaaggtacctagcctcagagacagagaaggagagggggagatcttgagtctaagaggaaccctttagctgtttctgcagctgaggtcagtttcaggagggtgaagctgatccccaggaatggatcagctgccatgggcacagcctccgatttgagcctctccggctgccagccagggggcctgggccagaccagggctctgtccttccgtgactttattaaagcaacatttgccacatgtttaagccgcaaaggtattagcaatgcttgcatcattaataatcattcagttgaaggtcaagcccatagacacacactctctgctggtaagaaaccatagcccagaactgagccaataaggttgtttgaacctgagagtgtgtaatggtcatttgggccaagcctcagctagggctgctgcctggacgcctgaggggcagcttatcacagtgcaaggggacagggtaaacagcagggggtggggtgtgagcttggagggcccctcccctggatttcctccaacacctgcttggatactaggcccactgtccctgaagggaatgtcagggaagtgtgcctgtgagctgaattaaaggactggcctttccagaaaacgctttggatctgagcagagtagtcagtttctcagacactcattccatactgcaccgtacatgccagcgtacccattgcaccgaaagcaggcccttagggcaggaagggacgatgagcaagtctgccacaccacctggtgactgggaagggctgcttctctcgtaagggtcttggggagaagtaagcccgcagcctgcctctgcacctcgttccagtgtcctgccaggctctgtactgtcctttgtgtatgaagaaaatgctgttagccctctctcaggctgctgttctgtgggtgctgagagctgccccccatcaccacgccatcacacccctctgagcagaagcaaatctgaggctgaagaattaagttttccccaagcaaggaaggcaggtggtcagagagatcaaacgctgaggcgtggggattgcaggattcaggaggcagcccctttggggaagaggagggtgcattttccatggagcccatgtcagagtccactccagctcagcaggaaagtggaattgcccagtactgcctgccagctgggtctcccaagcaactaccccaagacataccaacagtgaagccaggacagcaccatgccatcggcgctccagtctgtctggctgggaggaaagtgctgggcatcttacagtaactctagaagttcctttgactaggctgcaatcccacctatatgctcagccctaagagctgtggtttcctgtgctctcatttgtccattcattcattcattcattcattcagcaaataatctgaaatccagtctgaactaaggcctgagctgtggataccatggcgcgtgagttagatgtggtccctgccctcatggggctgacagtcctaaaatcaagtgctaggacacagtggccattgagctgggagcattcttccctctaccgcttaagccactgatggctgcgagcttgaagagagggattctgagggagagcttggtccatctggtcaccaaggctgggcgggacagagcagtcaagaaccacggtgtggcttgagaaacagtcctgcttcctgagcctctttgctctgcctcttggggcaagctccttaacctgtctgtatttttatgcctctgtctcccattcagttcctccttgaatacctctttctacagagaggcacgggctcccctgaaggattgtcgaggccagggttcgggaagtacactgccatcggtcaggggacagctgcctcccaccttgcctgggtgatggtgaatgggactcatcttttcctgccttgcttttgaggagatggttgaatttaagctaacaggaaagccaaaccagcaccctcctttgtgctctgagaggttggagacatctggtccaccccattgcccctgcccctggcaagccctgaagtcgggagaggtgaccacaggtctgaaaatcagccagtgccaacattgcttgccctgcaaggtgcaactgagcccacatagcgcattcatagtttccctgaccacagccttgggaagacggtggaaacccgaggatgtgtgggtttcccagctaacggacaagctcccctgccacacccagtgcccacgcatgctcacatacatacagcagaccacaaccctgttgccaagcagtgcttccaagggatagcgatccagattccaacattgtcttggagagggttagtccacatccaagttgcgtgagataagatgcaaagggctctgtgtggatgaggaacgcaccttagaggagtgggaaaggccaccagggttgggccctgtttaggtaattcctgttggcagcacctagagagagcatctgagctgaaggagtgggaaactttgcccaagcaatg

SEQ ID NO: 4466 - DNA, 6000 bp, Homo sapiens
aagctcagaaggggtgttccttttccctgagcttcgcatcatcagcaccatcacgagagaagtggagcctgaaggggacggggctgaggaccccacaggtaatgtgctctgtggggcgcgggctccctcgcctcggccggaaaccccattgtccccatgtacttggcggggctctttgtctctgtgggatttggggaggttttaatctttcgttggtgttctctcgggtgtgcttctggaatctgacccgtgagctggagctcatggtgatctctggaatcccatctggaggggtcttacatcttttcctggttgctgccaggctttgagatgtggcttgaggttgaggggttgagggcacttacgggagacactgcttgcacctgccaggctggccagcccatggaggcacaatgtccccacaattcttgctcaggacacatgaaactccccccctttttttttttttttgagatggagtctcactctgtcgcccaggctggagtgcaatggtgtcatcttggctaactgcagcatccacctcctgagttcaagcgattctcctgcctcagcctcccgaatagctgggattacagggacctgccacaacgcccggttaatttttgtatttttagtagagacgggctttcaccctgttggccaggctggtctcaaactcctgacctcaggtgatccacccgtcttggcctcccaaagtgctgggattacaggcgtgagccactgcgcccagccgtttcttgaaagcaactctcgcttgcttctgtcgttggtccttacgagagccatgtaggtttggggtgagccggcagggcatccagtgtgccccgccacgctgggccccactgcccctacttaatatttctggttgggcctcttttgcagttcaagaatcactggtgtccgaggagatcgtgcacgacctggatacctgtgaggtcacggtggagggagaggagctgaaccacgagcaggagagcctggaggtggacatggcccgcctgcagcagaagggcattgaagtgagcagctctgaactgggcatgaccttcacaggtaaggggagcgctgcagccacgcaggtgggccaggctgcaagaggggactttgagagctcttggctggctgctgcctgccatctgagaatgttgagttatcttagagggagatggggaaggagcacgttcgctgggatcattgttggctgcacgcatactcctgtctcctggacaggtaccggatgtgtagccactactctctaaagggggagggttgaggcgtgggatgacacgtcccccacagagggaagaatgcccctgtgcacattgcatttattcccatggctagaaagccaacttgtgtgaccccttggcctagctaacctgggtgtctaattgagcctgcctgtgctgacggctgcagccctgcccatgctcctgccctaagccacccggcaatcttccccctttcaacccctgcaggcgtggacaccatggccagctacgaggaggttttgcacctgctgcgctatcggaactggcatgccaggtccttgcttgaccggaagtttaagctcatctgctcagagctgaatggccgctacatcagcaacgaatttaaggtggaggtgagtacaaggctcccactgagcagggccaatagcagcagtgagtgagggcgctgatttgcagccctaatattcacaaacgccaacctcagagcattcatgatggcagctatacaggctcattctagggggtcgcctttccagcctggggcctgctgcaggttacacctgggcttgttggagtgacaagttgtgtttggggtgagctggggtggggggtgctcccctttccctggctgcctcagcctgagttggagcctaaggaactttgcagggaggtgacaaagagcaagtggcagttaatgcctctggggcttcttgagatttcccatgagagaaacaggaggatgtggttttatttatttatttatttttagagacgaggtctcactatgttgcccaggctggtcttgtccccccaggttcaagcaatccacttgccttggcctccaaaagtgctaggattacaggcgtgagccactgtgcccagccaaagacactgttttagaaagagcagcatccagggaaccaaaagttctctgcatctgtgccaggtcactggccctcctgtgaatgaagtcgagtcctcggcccaggttgagaggggctcacgcagggacccgcacgggcaggaccagtgctgctgaggctggcgctggtgactcacaggccacacaggctagagggtagctcctcctgctctgaggtcgtctacagacctatccagcagctgcttcatcgctcaggctctctgtggcctggagaaaattgacccaaagttactcttagcaatggaatatcaccatgaactcaagagcagaatgctaaattcggtgcctgttttgtttgagtcaaagggtaagagatatgaaaggaaatccatggcagtgattggtgctgtctttcacacggctgtgatttgaggaaaaaggtctacgccagtgcttcccaaacgacccatggggaaggaccatcggcttctttttctgctcttgttttgggcataatcttttataaaatgcaataaaaatggattgcagccaggtgcgtggtgcttgcctgtagtcccagctacttgagaggctgaggtgggaggattacttgagcagggaagttccaggctgcagtgagccgtgatcatgcttgtgaatagctactgcgctccagcccgggcaacacagcaagacccagtctcaacaaatactaataagtagaaaagtgatacatttctggaatgtgtgagaatattagattgttatagcagtttctaagtgcttattactcttttttgtttggtttttgtttctttttctttgtttttgttttttaagtgcttactcttgatttttttttctgtccttttcccgtagctccgtttgcccccagctgcggtccaggagccactctgagtggcactggtcatgccagctgcgggactccactgtcacctcttggacaggctcaggatgcctgtctccagcgatcctctctttctctgctataggtgaatgtaatccacacggccaaccccatggaacacgccaaccacatggctgcccagccacagttcgtgcacccggaacaccgctcctttgttgacctgtcaggccacaacctggccaacccccacccgttcgcaggtaggacatggggagggagaccaagcggagatgctccatgccgtccgccctgcccccaccccaccgtgggcacagcctcctgctcagcatgaccgccggtctttccctgtcccaattattccccatcacacacaaggaaactaaagccctcgaagagggcagatgatgtcacccgcagccatggagcaggacgtggccgagccaggttggaggcccatggcgagcttttcctggtatttcctcctggcctgtgggttcagctgaagcgtgctgtccagcccgttttgaccaggcacagccgaggaggtcaagggcacagtggccttctgggccgagtgacctcgcatcccgccccctcattctcccacagtcgtccccagcactgcgacagttgtgatcgtggtgtgcgtcagcttcctggtgttcatgattatcctgggggtatttcggatccgggccgcacatcggcggaccatgcgggatcaggacaccgggaaggagaacgagatggactgggacgactctgccctgaccatcaccgtcaaccccatggaggtaggagtgggcgggcgacctccaggactgagaggcagcacaggccagggcctccgagaagccggtacggcgcggctccttcaggttcacatgctttccatcgcgtcatctgctcagcaagcctggggcttaggtgtcttcgtgggtaaaccgaggctgagagagaccttattcaaggccgttctgccttaagtgtagagaagagccatgccagggcttggcgctcttgggtcatggtaatcctgagagagttctctggtggggcagctgaggtgctgtcccaagctgctttgtatgtgggtgactccgtgggtgctgactggagctttgttttcccttcacttctaatataacttccggtgccgtcctggctgctctgtcgctggggagggagacgctggggcaagttctccttcctctgtggctgtcgagaggagaatgccaggtgacggggctgtgggcagggccggactcatgtggccgtcacttctccttgccagacctatgaggaccagcacagcagtgaggaggaggaggaagaggaagaggaagaggaaagcgaggacggcgaagaagaggatgacatcaccagcgccgagtcggagagcagcgaggaggaggagggggagcagggcgacccccagaacgcaacccggcagcagcagctggagtgggatgactccaccctcagctactgacccgtgcccccggccacctcggtttctgctttcgaagactctgctgccatccgttctcccagtcccaagggtccacgatgtacaaagtcatttcggccagtaggtgtgcagacccctccccgccacgatcgtcgctgtgcttggtgtgtaggaccctaggctccccgcccaccctctgcctggtcgcgctcttcagtcccacgaggagctgacacgtcctctctggccgccatccggctcgcacaggggcctcccagcgcctcaggccccgcgtttgtgtctggagtctccccccggggagaggacactggcccctcgcactccagaaaagccatgccagctgggctcgttgacaaagggtaaaacatgctcactcccacccggtaatcatttttttctttttttaaaaaaagtttttattttttccaaactagtgcatgtataaataatggcaggatggggggtactgtgtagatgattaactgactttttaatattttgtaaataaatcggattccttgtgtcctttgtgctagtgtaacccgggactggaatgtaaagtgaagttcggagctctgagcacgggctcttcccgccgggtcctccctccccagaccccagagggagaggcccaccccgcccagccccgccccagcccctgctcaggtctgagtatggctgggagtcgggggccacaggcctctagctgtgctgctcaagagactggatcagggtagctacaagtggccgggccttgcctttgggattctacctgttcctaatttggtgtggggtgcggggtccctggccccttttccacactcctcctccgacagcagctccctgggcagtggcctggtctcaccgtgtgcagccttgtggtttatgcttaaatgtacattttcctgctggtaaaaggagaaactgagaggtgtcctgcagaccggctgaccactccttttggagacggcaggaggcctgagcgatccgtactcagaacgtccaggagagacgcatggcccgaagtcaaagtgctggaattttccaaaacagcctgttctctcctctctcctccccagagcaccccctgccatcaggggggttgaaatccctctcccccaggagccctgctgctttgcttggtggtagggcaggagagcaaacaaacagtcatggtctaaaacccacatagcactttgctcttagttacatgtaaaattttagatttctaaaacaggtgggcaatcattttgaatactgttctgtgaccctgactgctagttctgaggacactggtggctgtgctatgtgtggccatcctccatgtcccgtccctgtagctgctctgtttagacagcggacagacgctcacgcccaggggatgtcctcacgctgtcgccgcgcggtttcccttcgcagatgtgtatactcatgataggtcagaaagtgtatccgctacaat

SEQ ID NO: 4467 - DNA, 6000 bp, Homo sapiens
taaatgcggaggaagttgtggttggggatctggtggaagtaaaaggaggagaccgaattcctgctgacctcagaatcatatctgcaaatggctgcaaggtagctcttttattttaacaaacctcatagctagctctgctgttcgggcagcttgatttgaggggtacagtagcccatgataaggctggtgtattcacatgacatttttcttcttttcctcacatataggtggataactcctcgctcactggtgaatcagaaccccagactaggtctccagatttcacaaatgaaaaccccctggagacgaggaacattgccttcttttcaaccaattgtgttgaaggtaggccatttttgggcactttgagcatggcgtggtatttctcttgggcattaacaaaatcaaaaccataggcacaatctcttgttttattggctccatttctgagaacttgtgtcaagcacagagcagaggtgttttcctagctggcaggaaaccttgtggcagtttcccttccctccacctccaccctgcctcttctgtcaacaacaccagtctggcatgggtgttggagctgctgtcctgctactggagagaagtccctttgccaaacagcatgtacagccaaagagctggcccttaaaaagtgcttttatcaactctttttgtttttttagtcatcctatgtaattgtgtaaaatccgtggcttccttcaggttagatacaattaggtacagttctccctccccttctttttaaggcaccgcacgtggtattgttgtctacactggggatcgcactgtgatgggaagaattgccacacttgcttctgggctggaaggaggccagacccccattgctgcagaaattgaacattttatccacatcatcacgggtgtggctgtgttcctgggtgtgtctttcttcatcctttctctcatccttgagtacacctggcttgaggctgtcatcttcctcatcggtatcatcgtagccaatgtgccggaaggtttgctggccactgtcacggtaagaggcaggtgatggtcaccctgactcagatcagcttgcacgaatgttacactcttccgctatcctattctaaggtattgccaacttatgttttattctggatgtttgatatagttcttcttgagagccacatcacgtggtgaattttgacagtgagaaaacctcagcatttgtttatacgtaagataaccccaaagcatacattttgcttttaaattatcacgtggtcctgaacagtgcagtggagaaaggagaagaacttgggatcaagtagggggatagaatatggtagaatcctgttattatttttcttaatagattgcttttctggaaggaaggggaagcctcatgtatgggttccccttattatttcttcaaacttcagaagaaggttggagagatttaattttagacaaatttcttccacattaggatatagcaagaatctgtatagaattccagcctggttgagtgaagtaataatcttcctaatattttttaggtctgtctgacacttactgccaaacgcatggcaaggaaaaactgcttagtgaagaacttagaagctgtggagaccttggggtccacgtccaccatctgctctgataaaactggaactctgactcagaaccggatgacagtggcccacatgtggtttgacaatcaaatccatgaagctgatacgacagagaatcagagtggtaaggccagggttaccacacacctcagccacctgctgacttcgcttggttttttttcttttaagaaattgcatgaaatttcttttttttttttaagctcatggcagctttttctttcttttttgttttttttttttttatcatttagtgaagagtcaagggtatgggatattgattttttgcatgtcagtagaaactttaaattgccctacaaacgtgactgaagaatgcctaaaatgtgattggtttcattaattgggaaatgagatgtatcactgcagatttctatgggactttaataggagaactgagaacacagcctttgaagttaatgcattgttgttctgttgtgttttcttgcctccatcaggtgtctcttttgacaagacttcagctacctggcttgctctgtccagaattgcaggtctttgtaacagggcagtgtttcaggctaaccaggaaaacctacctattcttaaggtatgctcaagagttaactaatggagggatgtagacagcacatgagaactgccatttgagtgttaaaagtagcaaattacctttgtggtctgtgtgactgttcactgtagaacacctggagtggtctgtgcagtactttgctgtgtgtaacttacattgtgttgcctgtagatcctgatgtattataggaccccctgctccatataggttgattaaaaagggaagatgcagtaaaaatctgaccaaagtgggaggggaggagacggaagacagtctttattggtgaaaaacctaattcatctgcttttactactcttgagtttatatgttatcacctaacctagtggacagtgagagctgagggctgcagtgactccataatcgtatttgcatattaggatacagtagattccagtaactcctttaagccatttattttcctgaaatagctcagcttatcttatcttattggttcttagcttgtttactaatgatgtaaaaataagctccaggccaaaataagcccagccttagcctgtggaattctgatgcagtttgaaatgattgagattttactatgctgcccaagtgaagatgcagtctcagaaggatcatgaattgtacaaagtcctgtaggagaagaaagctatgtgaggctctctgggtcccacattctctgtgaagctgcctgtagtagttgtgggtataaactaagttgccaaagggaatatggcttggatgtaactcagatgccttctgtgatgaggatagggttcatttattctgcaaaggagattttcttggcattgaattgatgttgatttgaggataatgttgtgtatcttgaggataaaacttgagataaatgtttcatgtttttctttacctcaaagtggaaatgttctaggctttgagcatcaggtcccacaagtatcaaatctttcctgattaaaaaaccccagaaaggtagcagaagctgtattccaagtatttctggagttcggccatgttgatggcattattactaaaaagcggggagggagaagcagccctattctgcttttattaaaaatggcttttattaaaataagtggcttttatttaaaatgtcccccacttattttgtgtttctttccaaacccagccaactttcttgctctgtggagctgctatacttctgagcattgatctgttcatctgcatatgcagccttacatgttaaggttctaaaaggtttacctatataaaatttgtttacaactgaaaatgctttcagtatgtcaaaatataagtgtgtcatcatgtatcatagaaaatatgtgtgtcactgaagcatgggctttaactaaaatgttacgtggttcgattttattactgttggagttggtaatagctttcagttcacatccttcaggcccagttaattttgcacagttatgattagaatgcacagtcttctactttgcccttgacacaggcagcttgtccccagtcctgagaccttaagcattttcttacgaattctacggtaatgaaaggtgctataaatgtttaatctctcacttggtattttcagataagtaaccagaagtaggtagttgggaatagcattggctttgagacttttcagtaggccaggggaagatagaaatagactgcagtaggttggaagggtgtgttaatacctcttctagggaaggtgacaccttcccacacccttctttcactagaagctgctgtggggtggggaaggacgttggggtttgagtctgaagcactgtgaacagcagtggtcggggctagagggactcctgtcccacttaacaccgctgcttccttcttgcccatcctctgctacctctgacaagattggaatgtgtcttgagttatttttcctgttttttagtgatgcctcagtgaaattttttggagataatttacagatgatgtctctgttcacagcgggcagttgcaggagatgcctctgagtcagcactcttaaagtgcatagagctgtgctgtggttccgtgaaggagatgagagaaagatacgccaaaatcgtcgagatacccttcaactccaccaacaagtaccaggtctgaagatcgatgggtacacggagggcgagggcaagctgggggacaaagaggggaggtacatgagcaggaagaggaaatattctccctttggagttttataagctttagctttaaattttgcccttgattaccatagaatgccataatttagttgaatatcagcaggataaatgaagcctcttgcaaaacactgttgagcccttttgaatacttgtggtttggggtgggtgtgggcatgtggggaggtggctggaggtatgtgtacacaagtgttccccaatccctgtgttctgaaatttcgtatgttcttttttaatgtgaacaaatgtcaggaatttatgaatatatcatagtgctcatttttttttttttctgtagcattcaaagtatgttacaggtgtaagatacttcagagttcagaaagaagggatcttgggtcttttatagcaaatactaaatagtaagtgaagctttgttttccaccatggactgccacacatccaaccatccaatgtttatgtctcaacaatccttcacagttgtctattcataagaaccccaacacatcggagccccaacacctgttggtgatgaagggcgccccagaaaggatcctagaccgttgcagctctatcctcctccacggcaaggagcagcccctggatgaggagctgaaagacgcctttcagaacgcctatttggagctggggggcctcggagaacgagtcctaggtatgcagataacctggtaacagagtgcctgggcacgtttttatccagtaacctagtctggtagacagttaacaagtgatcctatgaacctctatgtcttgttgaccttcctctacatcttttaggggcaatcctcctatttgtttatttgccccctattattttgaaaacaataagtgctgaagaaatgttcagcgtattgggctgtgagaaacaacgtcctgatggtttgcttctgacttgtacttagacctttggtctcatgctagtcagttctgtttgtttaaaaaaaaaaatggtggaagaatatctttcttatctaacctttgttgctgtggacatgacttataagcctaattaaagttaattaattcttagtgtgtctaagttagacatactatttcctgactgccttggaatgggtgtgaatttacatgagcacttatgtgctcagcttagaaactagactaacggtaaacttttagtctaagatgctacctatttttttctaccctgacagctactgaggctgagaagttcactttacccattgtctaatgtatttgggaaagtggcatttataatactttgtaggttgacagatactacattcattatttatataatgcttcctattcttcttaacttgggtaaatctaactcatggtatctttcgtatgtgtctatccaaccgaaggattgctatcttctctttaagtgtttttcacttccctacttccaccaccccaaagtggaagcagtctctcttcttttgagtccacatggcacgttaaagatcattgtaacgtcatacaacattgaaaagaatgtcttacattatcttgattcttgtatttactatactagatgataaaccccctgggcagaatgcatctgatctgtacttatcctcaaaagtagctagcatgatgtcccacattggtgctcagt

SEQ ID NO: 4468 - DNA, 6000 bp, Homo sapiens
ttagtgcccctttatccatgagggatacatttcaagatccccagtggttgcctgaaaccatgggtagtactgaaccccatatatactatgttttttcttatgcatacatagctatgttaaagtttaatttataaattaggcacagtaacagattaacagcaataactaataataaaatagaaaacttatactgtaataaaagtcatgtgaatgtagtctctctctctcaaaatatcttaatgtactgtattcacctattttcagaccacagttgaccttgggtaacagagacctcagaaatcaaaactttcaataaggcaggggggactactgtagtgtgaggtttgtagtttggggtataacttcattcttttgatgtggaaatacagttttcctagcaccatttgttgaagaaactgttctttccccattgagtggacttggtactcttgtcaaaaatcagttgaccatagaaatatgggtttatttgtggactctcaattctattccattggtatgaaagtttttccttatcccactacaacactgatttgattaccatagctttgtagtatgttttgaaatcaggaaatgtgagtctctgactttattcttcttcttcaagattgttttgcctagttgaggcctcttgcaatttcatatgaatttgagtataatcattcttgagcatagtgctggcttctgttggctgaatacccagaggtagaactgtggggccacaggatagaagtatgttcagccttagtacacaccggcagttttacaaagtgattgtgccaatttacccttctgccagcagtgtatgggagttccatttgtaccacacccttatcaatatttgatatgccaatccttttgtaaaatttaacctttctggtagactgccctaaaattatgagtcaaacattgctatctccttcaaggggcagccaaagtgcagtcatccacaactttgctcaagtggactttctcctagcactgggtcttggagattgcttcttgcttccttccccatcagcagcaatcagggtctagctcaggtccggaggctggagctctggctggtggaagaggcagaataagctgtatcctcacactgccaaacctcagcccacctgagagaatcttgggatttggagtgtgtgcgtagtgggggcagagaggatgatcaagggatgctaaaggaaaaatggtaactggatgccgtcttggctgcaggagttggatatgattccagtgtggatggggcttttggagctatgccgagcccttgagaggtcagttcttaggtaaccatgcttccaagaattaagaagctggcagacctgtctcatttgaccttgaaaaggctctttcagctaccgatcctgagtccagaaagggtaaaaggcttttcccagccctacagcaccctggggctggaaactctcaggcctgtgccttatacttgctcagctctaaaggccctgaggcagtgagcactctttccactcacagcttgctgcataggtgaactcaagtttagtaaacattcactgcaagcctgtgtgtgcaatacatcaaactaggcaccttggaagctgcaaaggacataatatgaactccctgactataagtttttcatcatctggtagaggaggaaatatctgcacatatcattacaatgaatctttgcttagtgatggagatacataatgtcctttggaagccagggcaggagagttcatgtcccaccttgagagatttggtgtaccatatccatggttagtgcgtggacatgaagggttggattggcttcctggaggaggtggcattggtactgggccttagaggatgaataggatttgttgggcaaattttactccagagatggagtaaaggaattgtaggcaaagaaacaaaaaaagcagcagtgtagatgttactatcctggacatttggagaaaaacaggtgcagtcggattactgaatgctgacaaggggggacccctagatgtcagcctggaggagctagatttgattttgcagaaacagggagtccctgttggatttgcacatggaagatttatttagtgttgctcctaattggagagcattctggtaacaacagggagaccatgggactgctccacccacacagaaacagaaatacaatacccatatccagataggcatatgtgcccacaaacacacatacaggaactaggacaaacaaacacactgagacctagagacccacatatcaaaacacatagtcatactatcagaactcaccacacacacacacacacacacacacacacactacacaatccgtaaacccaagaaaacacatattcaataccacacacatgtcctgaatacctatagacacatgaaggctgacagatgcccacatgtactgagtcacactaaggcacacacatataagtcagatagatcccctgtgcctgatatacacaaacgcccaccaagcctggcaggtatacatgcacatttagacttatacatacaccaacacgcttacacacacacacacggccagaacatgctcacactcactgaagcccctccccagagacacacatgctatctgcgcactcatggtcacacgctcatgcataggcacagccacaggcagacccacatagcagccactccaagcagagacagagacaggccctggcgggtaccgactcagcccatggctgcctggtggcacctcacaccctcctccaaggctctcttctaaatgacttgtctcttggcttccagccctgggtcatcctggggtctcagccctggacaggccctcgaggcagtcacatcctacctcctactcagtgctgagatttctaagctcctctgacagggttacccagcttctgcttaaatatttcagacaaaatactttgtggtgacaagtttcccgttgtaatagcgttcactttccacgctgggaaatggggattatgcacccagggatgagactggacccttcactgcagtagttacagtcagtgagcaaatccagctggacggcctctggcctgctcagtccaccctgtccccaagtccctgtgggctgcacttggccacaggatcaacagttcccctaagtcattgtattgctgatctcttctggtgtgggagagcaggtgggctggatgtggcacaccagacctctttggagggagctgtggctggcaggggagtaagccttggggaatcggaggagcacgacctggctgccctgcctaggatgcctaggacatgctggcgctctcccccaggcaggccagctgttactagagccactctgcattggcacgggctgtcctctgtgaatgtgacccacattcaggcctgcccagcagctgtcttcccctaccacattcctctttctggctgccaacccctcctggcttcctgttccctatcggcattaggctccctgggttgagaaaggggctgctgtccacaggtggctttgggagatgggctgggcaggtgtggctgcctctatgaggagaaaagccgcaggaactgcaaagcgatggcttccaacactgagctgagctcagagcaggcagagaacaggaggcaggagcatgggggcagctaccctctgggtctgcccacccctccaacccccaggccacccagcagggggtcatctggatgtcacctgattttctcagcattttatccccttttgttccgcttcaatgtgggatcaatctgatctctccattaacccctctgtaccttgctgatatggaaaagggctgcctcttccggggcagaactttgcccctgacctgggctgctcactctgttctggctctgagtcttagggccaacgccttccatcctggttgtgcctttcccctctatccttcccattcccttacaaactccattagccctgtattcattataggcaagagaaatggctcaacaggagcccctgtgaaaaggccagatgggggctagatgtggggctggagggagccagggtgggagtgcgggttgttgacttgaagctcagtatgagccaatagtgggatgtggtggttgaagaggcatcacaacatgagcctgtcccaaagggctgccccgtgcaccctgtgtggggaaattatgccctgccctgggcgccataccacaatgagtactttatcttgttaacaaaagtgatttatgtttacattgcagaacacttagaaaagataaataaacacaaagggaaaaaaagcaaattatccataatttcactgctcaaagatagtcattcttctcctatatttataatctgttttttactcaatcttccatttgattaaaatattttactatattattttatcattttgataaaatatatcatatttcattgcttatgagagtattaagagtacaggccagtttcttagcatttaccatatgtattaggtactgtcatttagagaatctttgtactcaagttgactgtgatcccagttgtacaaataaggaaactgaggcacagtttcccgaggctcgcctgcactaagtaacttgcccaaggcaacatggccaataaatggcagagccaaattttgaacccaggtcgcctgctccagagctcttataatctccacactatactgactttcaaaccatgggcgtgccatagtttgtttatcatttcctgtagtgatggttgtttaggttgtttctaactttttcttatcattataaacaatattctgctgaatatttgtgtgacttaaatattttaattatctttgattatttaagatccattcccagaaatggaatttatgcaatgaagggtataaacatttttaagatgttttcatgtttttccaaactcccttctgggaatgctgttatcaggggacgcctcctccaggagggtaggagagctgagccttacactctaggagaatctctgacccagtgaagtttgtccatctcagaggaagcaggacaatgtggtgagtggaaatagtttcatcaggggaggttgaagggactggagatatttagcctgcagaagatagggacaagggccacacgcatggctgtaatcaaatgtgtaatgggctgtcaagtgaaagagagaggtttgtcctgaggctctcgagcagaagtggaccaggggaccaaagttgcggagagccattgttctgtgcgggagccattgtcctgtgtggggccagcacacagccctggatggaacagggtgggtattacataaaggttacatgaccagctgccacctctggcttgggttcatggaggacgtgtgcatgggggagggccaggaccacccccgccacactgtgctcccctacaaaacatgacgtctctgaatcttaacaggggggtctgctccccaccccacccccgccttggggagcctggcccggcctggtacgtctctctgtctatcccctcaggagcacagcctggcttgtgtcatgggccacacaactcttccattatgcatgagggagacccagcggtgagcgagtgagcaagccggccgagggaggggtgagtggttattaataaacaagtgtattgtgtggcgttccattcacggcactctcagaggacgtggtgggcttgagataataaagccctgtttatgccacggagggctggggaggtggccgatgggggtgacaaggagcagggaagccaggaattattttgattccacccagggcagggctgctgtgttttctctgaggccaactttcagggaaaagaaggatcttgctgggattttgctcaggcctaagtctgccagctgggatggcctggggcctaagaaatgcctagcttccctccccacctgtccccatggagggagactgagaagacgctggatgaaccagaccatggctccttcaggagagaggtaggatggtcaactctgccctccctcttggcctctcatcctca

SEQ ID NO: 4469 - DNA, 6000 bp, Homo sapiens
attgtatcattgcattccagcctgggcaacagagggaaaccctgtctctaaaacaaccaaccaacaagcaggaaatctgcacttacctatggagagacctgtgtcaggaaagcacaccacagtcactgtcattaatgtcagttcagatgatgtggaactgcctcgctattccacagtaaactcaagtcaaaaactgagaagttttatccaaattaaagctgggcaacctaaattactttaaaatgtattatgcagtattaatatgcatcaaaacatgtaatattgtgagttagcacatcctggaaaacatttggacacatctgataccaggcagttttactcgtgggtgtctctctagagcagagatcagcaaaccttttcggtgaagaactagatagggactattttaagctttggggcccctcggatctctttcgcaatgatgtaactctgcaacaacctctgcccttgcagtgtgaaagcagagaccatacattaaacaaatgagcatgtctgtgttccagtgaaatatatttatagaaactgtatttgaggccaggcgcggtggctcacgccagtaatctcagcactttgggaggccgaggcgggcggatcatgaggtcaggagatcaagaccatcctggctaacgcggtgaaaccccgtctctgctaaaaatacaataacaaaaaaattagccaggtgtggtggcaggcacctgtaatcccagctactcgggaggctgaggtgggagaatggcgtgaacccgggaggtggagcttgcagtgagccaagatcgtgccactgcactccagcctgggcaacagagcaaggactccatctcaaaacaaacaaacaaaaagaaactgtatttgtatttgaaattcatgtaattttctcatgttatgaagtactattaaaaattgtttttagtgtgtgggctcttcaaaatcaggaacaggttggactttctggaaacggcagtttgcagacccctaattcaaagcaactctgtccagtgggacttgctgtgccaaggggagcactctgcgtccattgtcttcttgcagcagccaccagccacatgtggctgctgggcccttgagaactggccagtgtaactgaggaactggatttttcacattgtttgatttttagcttgaattttcatttgcatttgaacagccccacatggctagtggctgccatgttaggcagcacaggcgtacagaggctcttgtagacgtgcagcagcaagcagggaccgaaataatcatgacaccattgtttttaaacagcaggaacaactgatggcattttcacacagtggaaaatgattgtaataatagcaaacatttgttaagtgctctctttccgccaggcaatgttttaagcactttacatgttttgacccgtggattctcactgttaggtagtagtgaaaatgaataaactatagctacctataccagcaaggatgaataaatcttagatacacaaagttgcatgaaaaagcaagtcatggccaggtgcggtgactcacgcctgtaatcccagtactttgggaggcggaggcgggcggatcacttgagatcaggagttcaagaccagcctggccaatatggtgaaatcccatttctactaaaaatacaaaaattagcgaggcttggtggcaggcgcctgtaatcccagctgcttgggaggctgaggcatgagaatcgcttgaacccagaaagtggaggttgcagtgagctgagatgctaccactgtactccagcctgggcaacagagtgagactctgtctcaaaaaaagaaaaagaagcaagtcataaaaactgcacgtgggctgggcgcagtggctcacgcctgtaatcccagcactttgggaggccgaggcgggcggatcacctgatgccaggagttcgagaccagcctgaccaacacagagaaaccccatctctactaaaaatacaaaattagccaggcatggtggtgcatgcctgtaatcccagctactgaggaagctgaggcaggagaatcgcttgaacccgggaggcagaggttgcagtgagccgagatcttgttactccatcctgggcaacaagagtgaaactccgttcccacccccccccaaaacaaacaaacaaaaaactgcatgccatgtgataccatttttaaaaccttaaaaccaagcaaaatgaaacaacactgttcagggagaataaatggtagcactattagcaaagcaagggaattcaggtcgtgttacctttgggggagagaaggtgccaccagtgagggcccagtgtgttgaggggcagcgaaattcctgatctcttcacatttccactcctccatagtaaagggtttataagcaggatatatattgacttggtagaacagagctttcatgtaatgagaacagtgactgttgtagcatccctacagttagttttgaatctggtttctattcacatttaagcagatgttccattagcagaggggtttatatttgttgccttggttgggtactttggattagaaaaatattgtcatttttttcagttcaagaacaaagggttaaaaccttttgttcggctgggtgcggtggctcacgcctgtaatcccagcactttgggaggccgaggcgggtggatcatgaggtcaggagatcgagaccatcctggctaacatggtgaaaccctgtctctactaaaaatacaaaaaattaactgggcgtggtggcgggcgcctgtagtcccagctactcgggaggctgaggtaggagaatggcgtgaaccagggaggcggagcttgcagtgagccgagatcacgccactgcactccagtctgggcgactgagcaagactccatctcaaaaaaaaaaaaaaaccttttgctccaaatttttgtttcattaaatctactgatgagttgaatgttaccagaatctagctgagagaatttaggttggaaatgaacatctgaaaactgcaaaataacaaatagatgtacttattcatggtttgtcactagagtgttcattaaaagaaaaatcctgccgggcacgggggctcactcctgtaatcccagcactttgggaggccgaggtgggcggatcacgaggtcaggagatcgagaccatcctggctaacatggtgataccctgtctctactaaaaatacaaaaaattatccgggcgtggtggcgggcgcctgtagtcccagctactcgggaggctgaggcaggagaatggtgaacccaggaggcggagcttgcagtgagccgagatagcaccactgcattccagcctgggtgacagagcgagactctgtctcaaaaaaaagaaaaatcctaatgacccctgagggtgttaggacacttcatgtaggagtatttcatccctaaattaataacttcagaattatgcagtagttcatggtaagttggattcaaagtgacattttgttcctgaagattaggttttgctgtagcaatcgtagaagccggtcgctgagcttggtgtggaaatgtgtaatatgtgcacctttgacttttttccttagtgtattccatcttcattctttcctgtattactgacatgggcttatcttttctccctttagagagttttgaggtgacagtcaccaaagaaggtgataaagggttctttcttcccctcttatgaatattaacccactaactttgtttataaaattgggaatcagcccttaaacaggagaaactgtcatgctcttttatccttatttattctcctactttgtttctattttaaagtatattgatggaaattgtatgtaaccagacccttggttagaaatatctggaaatcagacatccatttgaactgtatggataacactgtacatttttgtttaatagaacttcagagatttgctttataacaattttctattagttggaattgtggaaggagtgcagtcttattttcatgtgaaatacattttgtggagtttcacatcgacatcaaaacatttatactgttctcccatggacaagaatggaaacatagatttttaactcctaattaagttgtgagccaatttagatgtagagaagttcccaggctggtgtctttttcaggtttgataggataaagtccgaaacaaaggcaagtctagccagtccctcccataatagaaactgtgtctgaatcgtagatgataaaatagctgttgaaatggatgcctgacgagtcggtatttctacctttctcattgagtagtttgttttgattccctaattttagccaggctcattgcacaggaagacttgtttcctttgatttttttttttgacagaatttctgtaattacggtgctgatcctatatctcacgcttcctcctctctcaacacataactgcgttttagcttctctctggtccaaatcaaactggctgccagccctcccaggagctggggcagcgctggtgttctcaggcctggctgtgtgctaatgagactccttttaccctcgagctatctaagtgctcctgtggaatgcctgtctatattttcttctctctctcttttgtattcctgcatgaatggatgcaaagtaaacaagttgcttggaaagccagaatctgcttcatcttactaaagcccgagaacttccccatgtttaaaacacagtgcccctgctttgtccacggaccctccaaacccctggctgccaaattgttgtcatttattttctttgggggtggagatggggggaggagggcaaggtgcagaagatctatgtggtaggaattcttacctgttctgctttgactccctaggtgagatttgtggatttaaaattcacgggcagaatgtcccctttgatgcagtggtagtggataaatccactggtgagggagtcattcgctccaaagagaaactggactgtgagctgcagaaagactattcattcaccatccaggcctatgattgtgggaagggacctgatggcaccaacgtgaaaaagtctcataagtaagtaagctggacaaagagtgaacataacccaccgagtaaacgtgtgtgcgcagaacgaaaatagtagtgactattgcctgctccccaagactgtttttgaaataggcagaagatagttctcaagtgtctacaattagattgtaaacacttggagggcaggaatcatgtctctctacccttgtatacagtttctagcaagagccttgctcacattaggcatattaggttttttggggttgtttttgtttgttttttgagatggagttttgctcttgttgcccaggctggagtgcaatggcatgatcttggctcgccgcaacctccgcctcctgggttcaagcgattctcctgcctcaacctcccacatagctgggattacaggcatgcgccaccacgctcagctaattttgtatttttagtagagatggggattctccatgttggtcaggctggtctcaaactcccgacctcaggtgatccgcctgcctgggcctcctaaagtgctgggattataggcgtgagccgtacctggcctttttgtgttttgtttttgagatggagtttcgctgtttcacccaagctggagtgtagtggcacgatcttggctcattggaacctccgccttccggtttcaagtgatttttctgcctcagcctcccgagtagctgggattacaggtgcctgccaccacgcctggctaatttttgtatttttagtagagacgggtttcaccatgttggccaggctggtatcaaactcctgaccccatcattcacctgcctcggcctcccaaagtgctaggattacaggcgtgagccaccacacccggcctaggtttttaataaatgaatgagtgaataattttatcacaccaaatactctattaaagaagtaaaggccctacattaaaaattgaaaaagtctgcttctcccttaggaaggttattttgttgtcatatttatcttttgctgtaat

SEQ ID NO: 4470 - DNA, 6000 bp, Homo sapiens
cttaccttttacattgaaggtagcccagacttggcagcctctagggaaccagcaaggtcagagtccatcacacaactttcctgctaaagtggtatttgccaaatcatgtccagaggtgttgtttctacaatcttcttggcaactccgaaatgggctgcatttggggcacttccttttgccatccttctggcccttcttgcccgtcaaaagcttttgtctgtgggctttggaaatagtccagtttttaaggtgttttatttttcagagttaatggtttcttgactaatcagactatgaaaatgccttctctaggttctttaatagttataccaagtgttattcccattttaggaatgaagaaactaaggctgacaggcaaaggtcatgtagccagcatgtggcaacactagaataaattggcagactcaacaccattagcagacctgtctggagggaatggtgggtcttgaactttcaagtaccctctaaactttttcagcaggaatttcagaagtctcaagaattctgagctccctgctggccatgggacattgtgctgatatggtgggaaaaatgcaggttgagaaagccttcgcatcctgccctgttggaggctggtgtttgggatgggtatgaaggcctttggcggtggctatagcttatgcagacctgaagcaatatacctctgggatggaagatcctgcttattttgggataatttctaaatctgtcatatctatccccaaccctgtccccattaaatggctaattgccaaaaaagaggaagcaacatcttcagctctagcaagtctcggggatgtctcactcattgtgaggactgtgaggattcggtatatatttttaagtgagtgaaccttgttacatgttttaaccttggttcctcctgtcaagaattttatcttctcatgtcttgggcaccttttccctctacccagatcaaatagcaaaatgcttagttaatctttgagaggatagaatccatgggaagcacaggatgaaatgatgacgctgtgctaagctgtgtcaccgtgggtaagcccctgcccttgctgtgactttccacttcctaaattagaatggaagggggaaaaaaaaaaaccataacccaacttcatttttatgagtggccctttagaaaatagtgtaatccgttgagtttccattgtacctttcctcagagatgctcaaaggggcgggggtgcccttacatggaacatgatgagagtgaggattaatcactcccagtcctctgggaggggggaagtgacctgaactttctaattgaaaaagtaggaagtgtgtgcccaatgcccagatgagtgggaagattactgtagttgattgaggaaatgccgtatttatcattcacccttcccatgacctttgtttttccctaatgccttaaaaaataataaggaaacattgtcctacctgattctaccactgttcatctcacgcagtgtgcactccctgactctgaattttgcagctttgagactgaggtaattgagactgatagggatttaaggatatttggttcccacaagaataagctaatattaagttattattttacttgtggagaagaactaaattgtataagctgcctggttcttctagacacacattgcctagtgaaaaaattaaaattttgaagaaaaagcagttttacttgttaatacttgccatgtgtctcacccacaaatagcctcatttaaaactttgccttacctagcatgaatggataaagaaaaaggagagttattagggaatctaaattcccaactaactttagcactgatagtggtgaagctatgggcaagacatttattttgtaagtgggggtaaaactttggaacgtgttcaaagcctagctgctctagtaatcctctctcctcttctggagtggaagatattggaagtctgagaataagcaaagcatgcagattatgaagctgaggggttataactatttcatttattgaaatatatttcaatgatattcaacttgctcagagagaatccgtgagctgtattttaaaaatcaatacaggctgggcacggtggctcacgcctgtaatcccagcactttgggaggccgaggtgggtggatcatgaggtaaggagttcaagaccagcctggccaagatggtgaaaccccgtctctactaaaaatacaaaaattagccaggcgtggtggcgagcgcctataatcccagctactcaggaggctgaagcagggaattgcttgaacccttgggcggaggttgcagtgagcttagattgcgccactgcactccagcctgggcgacagagtgagactccatccccaaaaaaaagaaaattaatacaaagtggtcacataaatcttttagagatccttagtcaatgtctttaaaatgttttttaagtgttgtgctttctcattaaaggtatgatatacctttaattaaagctaaagatataccactttagctgtggttcctttctggtagatgacctgccttttcctttttgttttatttgtccacttgtatgtgttactatttttcatttaaactctggcaccaagagctgtaccgaaagaggcaccaacaaatgtggttgctccataatggagagaatgtcaagaatgttgactatctttagacctgcttcattaatagataagatagaaactaaagaacccacccagttggaagaagttattagtcaagtagtgctgcacacgtgaccacagaagttaaaaaggtaaataatgtgtctctacatgtggcccactccagtgaatttggagaaggatttctccttggagtcttaagaggatatttttaaatttaagtgaacaatgtattttatttgcaactattagttatgactgaaacacacataatacgttttgattttcttttttcatttcagcacagtgaaattataatctggacacgagttcctaattattgctttagtagctggtaatgcacttaggaaagttagaaatgagtaaaggagaaccacaaaataatagtaatagcaccatatgtcatgcattttaagaaaattgctaatgtctactttttggccttaagttgtagttgtgggaggctgcttcagggggaggtgtctggaacaaggggctcttctgctccgctaagctttggagcaccaagttcaggctttgtgtagataagctcaaggatttttcaacaggggtgggggagtggaacaatctaaatttaaactatagaatcaacattttctttaaaaattgttccagttttcaagaggcgtaggtggatcctgtgaattatgtgataatgcacacgcttttcctacatcctgcttatgtcaaaacatttccagagactttcattttggaggttttattttcaggctacagaatgggctgggcgctcccttttttatctcttatgcaaagaattttaaggagtcttaggctgactttttaatatgggaagctggtaaaggtcagtgttcttatgtgagcactaaagatatttaaatttgatatgtaataatgtctttgcaaagcaaagaatataaacagtataaaagtactagcatttagatgtattgtatcatttaatccttaaaaacatgaaatgaggttggcactattctttatctccacgctgtggaagaggaaattgaaatgtagaagttagtaacttgcctaaggatacactgctggtaagtggtaaagcccaggattttaactcaaggctgtctgattgagaatgcggactcataagcacaatattgcactctaagttaataatgtaaagttagtttcattctttcagtagggaagatggaaggctgcagaatagggattttgatagcaaaaatctcctcattaaccccaaaaggaagtggcactggcagggccattctgaagcctaccggtagcttcagtattgttcttaatgctcttggatggagagaatgtatcttgagccaatgtattaatagtagattgctttgcttatgtagtaggcaatatatgggtatacattttcctgactattatcttaatgactattccaaattatgactaccttaaaaactaccaaaatcccctgctccagaattttcagtttcagatgaggttcataattcatggcctcacttttcccacattctcctacaggttggacgtgataagtatgagcctgcagctgtttcagaacaaggtgataaaaagggcaaaaagggcaaaaaagacagggacatggatgaactgaagaaagaagtttctatggtaagtactaggaggaatattgtattccatccttattaaaaatccatgatttttaatcccccaggcctcactgtattcttcaaagaactgctatatattaaaagagatcatagcagctgtacagatctcatctagtcgtagaggttaatgttgaacatatactttttaaaagctgttagagggtaggaaaagttattcagtcactctggcataaccagagataacagaaggaacttaggttgataccatgagtctttgcttttctctgtattatatcaaacattgggaaattcagcctctccaggcgatggaagcttccatagacttaacctgtctagaatcgacctggtcatcagagaaggcagataaggttttactagatccctgagagctgctgggtttctctgaagtgttatggcaaatagtaatgggccacggtcactcagctttagccattctccagtgaagagctgtcaatgataactgtgtggttgcaaagccacaaagcgatggtgaaaattgtaccaacttatgcactgaagaaaacatctgcactttgtttaataagcttaatgatagtaatgaataatgctattttttctgtcatttttttatactacactgtttaactattttctttgtttctgttttcccttaggatgatcataaacttagccttgatgaacttcatcgtaaatatggaacagacttgagccgggtatgttctagtttgaaagctgttgtacaaaatcctagttttccgtattatattttcccctgtattacatacaggtctaacctcaggggctctagtaagaaaatgacagacaccatctgcgtatctaccatgtgacatgcacagaatttgggcatttatatgctaccgtttcttttccctgaaactttttgaaagtagatgttattttcttttccctattttatagcagttgagagccagtaagtgggaacaccaggacttgcagttggcttcaaagccatgcttatgccttgaccttttgatgataaattttccctttatttttctacatttgttaaatagagttgaatctttcacctagttgaatcttcaacaattcccatttttgcacttttcccagctagcccattgcagtgtgttatggttatactatcatttgtttagttattctatcatttagttggaaattgttttgtacaaaaattaaagaaaccttttcataaaataggcgttatgtatccttgttatgtagaggattttgatattaaatgtgtaacaaatgttataaaagtaaatagtctagggatgtcttatttccagataatcactgaaatgtctgggaataacttgaatagcaagccaatatgtagcattttttcagtaaggcatcaagagacatgggtactgtggtattctgatatatattggtttttgtccacagttcctggttcataactcccatagcccttattacagtcgtttgttataatgttgggtgtgttagacctcagtggcaggcttcaagaaacaggatctctctcctgccctccttttcacctgtcgcaaggcaggactctaatcttgttccacttttctgattttccaggtagatagtgttggaattgaattggaggaaaccttggtggtggggagaaaccgccacacctttgctcacagaagtcatcttctgtgttgattg

SEQ ID NO: 4471 - DNA, 6000 bp, Homo sapiens
agccccgcacagccgcagcccaaaaggggccctagcacaccatagaggggagggctgcagggctgcagggcttgaggagtggcctttcccctcagcatgacctggagagtgttggttctgtgcttagccgctgtgtgtgtgcctttctggtaggttgtattactctgtacactggatccaggagctagaggagctgaaggtggtgagggtccccaggtccaccgtaggctatgcttccctaggtgggttccttagcctctgcatctccctctcattcagaaaaagtgattgagaatgtcttctttcctctgtcgcccaaaggttaatggctagacagatgtaaacttgtttggagcttccaaaatatacagacttccgcatgcttactgtgtaccaggcttgggacacgtgtgtgctatgcctttttgtctgcgcagtgtcttccctattaggagaagaggtgctgttggtccggaacttggtggtgtttatatcgggagcagcattgcagcccaggctcagcctctgtggagtgtcctacttcatagcacggattggggaggggaacgaattccatgtgtgtgctttcattcatcttattttgaatctaacatatgttttggcaaggaggatgtgggaaggtggaacaaaagaagcctggggttgggggtggtaaagtcacttctgggaaaaggtgattaaatacaagcttgcgtccagatgggtacatcccagagcgggatcacgagggaattttctcttcatgttttatagttggttgcttcaaacctggttttcaaggtccggtttgaagaccctaacctctcagtccttttctattgtctttgtcttgcttttccacagagttttcaggagttgaaaatgacaatgaaactgagcctgtgactgtggcctctgcaggttgctggattttttccctacattcactattgtgtttcatttaaagatgagactgattcattccacgtgtcgcatgaaacgccccagttgcattttggtcctggacaccatctgagctgcttccctgcattgcgcttccccattgcttcatggagttcccttattctgcccattctgaccccagctggagtgaggacaaatgacatctcaggcagtgcatgcatgggacttccccccccatccagtttgaccctgaccccactgcatgaggctccctgctttttcagtcttacaggcagggtttgggaggccgcctcgtgactgtcatgtggatgaaccacgagacaggaaaagacttgtttctagatattctgtcctgattgacagtaaattttaaatagacgtctctcttttttttttgttttgagatggagtcccgctctgttgtctgggctggagtgcagtggcgcggtcttggctcactgcaacctccacctcctgggtgcaagcaattctcctgcttcagcctcccaagtagctgggactacaggcatgcaccaccatgcccagctaatatttatatttttagtagagacggggtttcgccatgttcgccaggctggtctcaaactctgacctcaggtgatccacccgcctcggcctcctgaagcgctgggattacaggcgtgagccaccatgcctggcaaatagccgtttcttagaaacctcaattcctagtcatgatttacagtgcctgatttctgtaccagaatgagacacattgctgaaaatttgtcccttttccttttcagtttaagaacaaggtttagtgtaacctgtttctggctctttgttgtcatctgtcaagggccattttctgggttttggttttcgttgtaacatctgcacttctcagcaatcctcaggaggaggcaggaaggatgggacttaacaccatagcatccttgaaataggccgttccatgcagggagtattttaagcctcccttttatcctccctgcctcgcttgtgtgggttcattccccagggcgtgccaggtagagaaaacagccatgtggaacccagccagctgagaaggcagtggctggagaggctggtggcgtaggaagtgtcaccatgcaccctggtgatgagaacagggtaggccaccttaccaggtagtggccagaggtgtggggaccctcaggggacctcttggcttcaggtgagacacccccaactctccctttctccaggccatgtgcatgatcataaacggtttaatttcttcattgcgcttccatgtagattgcaaggctaacaggacttggtatgaactaacccgcatgtccatccactgagctgccagcaccggtaacaccgtgttgagtgagaagtgagttgggcgatgctgggttgcacgcctgacttcgccttttctcccctgacccaaaggtggcgacctgcacatgacccagtttttccgaggcaatctggctggcttaactctccgttccgggaaactcgcggataagaaggtgatcgactgtctgtatacctgcaaggaggggctggacctgcaggtcctcgaagacagtggcagaggcgtgcaggtaacaccgagcgctcgactgcacaccactcatgggccccttagactacagccccggaggctggtgggatgagggagtgagtaatctgtgattgatacgtttactgttgggtaaaagagttgtgttcactggacttaaacgagcttttctttttcaagtcagcaattcaaatcgaacccaggccagtcccctttgtggaggcatctgtggtttcagctcctgcggttactggcttattcttctcctctctgtggctggtgtgatttcagatccaagcacaccccagccagttggtattgaccttggagggagaagacctcggggaattggataaggccatgcagcacatctcgtacctgaactcccggcagttccccacgcccggaattcgcagactcaaaatcaccagcacaatcaagtacgtcctgatttttaacagccggcctgttttgcccaatgacacttgtatatttaggtttttaagacagcctaaccccttctgtaaggaaaggtgagccatcgtgtgtaaccagaaagtgtggggcagagagctgagtgatatttacgcatcttgtttgcaagtgtgttcctggagtggccccggcaggtgttagtgggggcctctgtatcccacctccatgtgcctttgcacaggtgggctccaagatcggctcccaaagccctgacccttccccatttcttgctggcaggtgttttaacgaggccacctgcatttcggtccccccggtagatggctacgtgatggttttacagcccgaggagcccaagatcagcctgagtggcgtccaccattttgcccgagcagcttctgaatttgaaagctcagaaggggtgttccttttccctgagcttcgcatcatcagcaccatcacgagagaagtggagcctgaaggggacggggctgaggaccccacaggtaatgtgctctgtggggcgcgggctccctcgcctcggccggaaaccccattgtccccatgtacttggcggggctctttgtctctgtgggatttggggaggttttaatctttcgttggtgttctctcgggtgtgcttctggaatctgacccgtgagctggagctcatggtgatctctggaatcccatctggaggggtcttacatcttttcctggttgctgccaggctttgagatgtggcttgaggttgaggggttgagggcacttacgggagacactgcttgcacctgccaggctggccagcccatggaggcacaatgtccccacaattcttgctcaggacacatgaaactccccccctttttttttttttttgagatggagtctcactctgtcgcccaggctggagtgcaatggtgtcatcttggctaactgcagcatccacctcctgagttcaagcgattctcctgcctcagcctcccgaatagctgggattacagggacctgccacaacgcccggttaatttttgtatttttagtagagacgggctttcaccctgttggccaggctggtctcaaactcctgacctcaggtgatccacccgtcttggcctcccaaagtgctgggattacaggcgtgagccactgcgcccagccgtttcttgaaagcaactctcgcttgcttctgtcgttggtccttacgagagccatgtaggtttggggtgagccggcagggcatccagtgtgccccgccacgctgggccccactgcccctacttaatatttctggttgggcctcttttgcagttcaagaatcactggtgtccgaggagatcgtgcacgacctggatacctgtgaggtcacggtggagggagaggagctgaaccacgagcaggagagcctggaggtggacatggcccgcctgcagcagaagggcattgaagtgagcagctctgaactgggcatgaccttcacaggtaaggggagcgctgcagccacgcaggtgggccaggctgcaagaggggactttgagagctcttggctggctgctgcctgccatctgagaatgttgagttatcttagagggagatggggaaggagcacgttcgctgggatcattgttggctgcacgcatactcctgtctcctggacaggtaccggatgtgtagccactactctctaaagggggagggttgaggcgtgggatgacacgtcccccacagagggaagaatgcccctgtgcacattgcatttattcccatggctagaaagccaacttgtgtgaccccttggcctagctaacctgggtgtctaattgagcctgcctgtgctgacggctgcagccctgcccatgctcctgccctaagccacccggcaatcttccccctttcaacccctgcaggcgtggacaccatggccagctacgaggaggttttgcacctgctgcgctatcggaactggcatgccaggtccttgcttgaccggaagtttaagctcatctgctcagagctgaatggccgctacatcagcaacgaatttaaggtggaggtgagtacaaggctcccactgagcagggccaatagcagcagtgagtgagggcgctgatttgcagccctaatattcacaaacgccaacctcagagcattcatgatggcagctatacaggctcattctagggggtcgcctttccagcctggggcctgctgcaggttacacctgggcttgttggagtgacaagttgtgtttggggtgagctggggtggggggtgctcccctttccctggctgcctcagcctgagttggagcctaaggaactttgcagggaggtgacaaagagcaagtggcagttaatgcctctggggcttcttgagatttcccatgagagaaacaggaggatgtggttttatttatttatttatttttagagacgaggtctcactatgttgcccaggctggtcttgtccccccaggttcaagcaatccacttgccttggcctccaaaagtgctaggattacaggcgtgagccactgtgcccagccaaagacactgttttagaaagagcagcatccagggaaccaaaagttctctgcatctgtgccaggtcactggccctcctgtgaatgaagtcgagtcctcggcccaggttgagaggggctcacgcagggacccgcacgggcaggaccagtgctgctgaggctggcgctggtgactcacaggccacacaggctagagggtagctcctcctgctctgaggtcgtctacagacctatccagcagctgcttcatcgctcaggctctctgtggcctggagaaaattgacccaaagttactcttagcaatggaatatcaccatgaactcaagagcagaatgctaaattcggtgcctgttttgtttgagtcaaagggtaagagatatgaaaggaaatccatggcagtgattggtgctgtctttcacacggctgtgatttgaggaaaaaggtctacgccagtgcttcccaaacgacccatggggaaggaccatcggcttct

SEQ ID NO: 4472 - DNA, 6000 bp, Homo sapiens
aagttgtgccaatttgagaatgctagccagtagcatgtggtgtcttcacagtcccaccagcatcagatttttatcctttttttttttttttttttttgctggttttagtaattttcaagtatttttatgtaactctgtagaaggaaaaatagacattgtgtatgctagtgattgtataccaagataaaacctgagtattgcctttgtgtttcctttctgtggatatatatgtttatatttttggctaatcgatgtttattagttttatatttgcattcctttccttttgatagtctaagccgaatcatccttagtatttactcttgcctactggatataagactttaaggtcatttacttggcagttgcattcaacacattgtcttgtttattacaggtcatcatggtcacaggagaccatccaatcacagctaaagctattgccaaaggtgtgggcatcatctcagaaggcaatgagaccgtggaagacattgctgcccgcctcaacatcccagtcagccaggtgaaccccaggtaaggcaggaagctcaaatcacagtctgctgtgaacaagcaaatagtgatggtttaaaatcttcagcgtggttctataatggtttgcatctaggcttgctctgagtaggaaatgtacctgcactgccagaaagcaaccttgtcattcctaagaagggttttaagtaagagcaagtcataataattagcacttagatggtatttactgttctaagagcttgatatggtgacctattatttgcagagcagggaaggtaaggattcaagaggcttttgaagtacctcagaactggtgaaatcatgcagtaaattcagcagtctagcttctgatttcatgctgttaaccactgagctctactgcctagcacctagcatcttgacactttccaggtccacactaacaaaataaaataaggaagggacaattacttaggccattcaggcaaacacaggagacatttggcaatgaagtaaaacagataatagcaaattggttttgttttaaggtttagggccctttcaccctatgttacggttagaggagggtttggtcttgtatcagctctgccactttctaaaacttggttatatttctttttttctttgatggagtctcgctctgtcatcccggttggagtgcagtgtcatgatcttggctcactgcaacctccacctcctgagttcaagtgattctcctgcctcagcctcccaagtagctgggattacaggccccaaccaccatgcccggctaatttttgaatttttagaccaccattttggcaagctggtctcgaactcctgacctcaagtgatccactcacctcagcctcccaaagtgctgggattacaggcatgagccacacacccagctaaaacttggttatatttcagcatgtctaataaagatagggaaaggaagaatacagacaggcctgccttagagatcatcatgagcctcaaatgagataaaatatatgaaaatgctctgtaacctgtaaagtactgaacacttaatagcttttatgtgctggggaaaattccttctttgttttgtttacaaagtgatctgcataagaatatcccctcttgaggtgatggacacatgctggtgatgtgatgcgtgactttttttttttttttgtcctaattctagggatgccaaggcctgcgtagtacacggcagtgatctaaaggacatgacctccgagcagctggatgacattttgaagtaccacactgagatagtgtttgccaggacctcccctcagcagaagctcatcattgtggaaggctgccaaagacaggtcagccagcacaaggatcaggctgctttgggcactattggctttagggattggagttccagtggaaacagagcaacggtgatggatggatgcatacctcgctgtattagactcagtataaataggccagtaggaagctcataggcatagagagggtgacttgttaatggtttagcagtgacagaagcactttaaagtccaggtgtccactgtgtcccagagcctgaccgctccgtggagtcatctgatatggggtcctagtatttgcaatagagatgtgagtggtcagactacagggcgtgcatacaggaatggcattttctggagtgccacccaccagagtcattactttgagtagctcttgttaatgctgggggctatgtttgttgtcacttctcagttctgttatttggtgtagggcctgtgtgaatacttgcctgtgacggttctcaggcttcataaatagtctcaataggaaaggagcagtgtctgtaatgagtgctcagtgggggcatgcatcgcactatttccatcgctaggaaaagtgattggtattaacccgttttcccttttctggggtagggtgctatcgtggctgtgactggtgacggtgtgaatgactctccagctttgaagaaagcagacattggggttgctatggggattgctggctcagatgtgtccaagcaagctgctgacatgattcttctggatgacaactttgcctcaattgtgactggagtagaggaaggtgagagctatttaaggtgtacaccaagatcttattcagatactgcccattagcatccatttctgtatacttcttggatatgttcagtttccagtgtgcttgtctcataagctaacagtaaaaaatcttggttttcataggtcgtctgatctttgataacttgaagaaatccattgcttataccttaaccagtaacattcccgagatcaccccgttcctgatatttattattgcaaacattccactaccactggggactgtcaccatcctctgcattgacttgggcactgacatggtgagtgtcacaacagtcacagatcgatagtagtgaggtgtgagctgtgtcttcattcactggcactatgctcccagcatccatgaggctggcgttgggaaaagaaattctcaggaccagtatccagtgtgtgtcccaatcccggcttcacagaatcagtattaccactcttcaaggcagcagttaacatttgtttatcagatgggaatctttatttttgtatacttcacctaaaagatttttaaatgggagggcaagaattttataacaaaaggttcacaatattagcttccttatttttagtaactaaattccttctccccaccccttcccaggttcctgccatctccctggcttatgagcaggctgagagtgacatcatgaagagacagcccagaaatcccaaaacagacaaacttgtgaatgagcggctgatcagcatggcctatgggcagattggtaagctgcagcctggagtgggaagctggcacatctaaggcatctgaggtgatggtgtccacctcaggttgaggttgatttcagagactgcaaatccaggcgactttcaggtctaggatgagccctaacggagtgagcctgtggagtttctctgaactctcttccatgtgagaatacatctgttgctgtttgcccagttaccttttgtggaaactggttttctatactgagcaccttggaactgggctcaactctgcctgagaaatgaggatgtccttcctcactgagccttgcggaacaggaggcatggttctaaggaattgtgtgtactgacgcacaggctgctttccctggagatacacacttatctgtcactcacttggatggagttaggcattggagaaagtatatgtgtttgagagtttggctggtaggtcaccaccaaagggtgatcctccatccacctcacactggacttctgcccccacagtgcagcatgactagctaacaggtgatccaggtggtgggcaatcagcatgccatttgtttttaaatcctctgcctagggttccttcaagagaacctggcaaagccaccatggatgtcttattctcctggattaatgggtcacataactgtgaacgcttggataaagaagaacagattagatagaatattgtggaaattatggcaaagattcattagacagttgttggcaacaaagtaattggctggtggcccatcctgaccttctccaaggaggcctgcttttgagaggaaggaagactaggtctctggtggtttaggatgaaaccctgccctgaggaacttggagcagcgtggttaaattggatgccagggggaggagggtcctgaaggtggggaggagagtcagaaagtgccacagtggctagaaaaatggcagcatgtaggaattttgaaagatggaaaagaagttatcatttgtcagagattaaaaagtagggaagtggatttcccctaaaggtcatacccttagaagcagctggtcaagtaacaggtgggcattttgagagcaaggcacatgtgtctttgtgtaggctccaaaaagtgactcaaaaagcagagggccctgagattggagtgtatgcctggggtcctccatcccatccctcatagcctgtgagtgaccaggcaattctttcctgtgcttttatcaaccagggggaaacactcctccatatgtgctctcccaggcctgctgcagtaatcagctgaaggctatacaggtacccttgtgtgtgaggttctagtaattgggttgttttcccaacttaggaatgatccaggccctgggaggcttctttacttactttgtgattctggctgagaacggcttcctcccaattcacctgttgggcctccgagtggactgggatgaccgctggatcaacgatgtggaagacagctacgggcagcagtgggtgagtgggcacctctgacctgaccagtgtcagagctcctcaagccccagaagactgaggccacactgccaccagccatgcaggtgaagagccagagctcatcttctgtcttctgcatttcagacctatgagcagaggaaaatcgtggagttcacctgccacacagccttcttcgtcagtatcgtggtggtgcagtgggccgacttggtcatctgtaagaccaggaggaattcggtcttccagcaggggatgaagtaagtaatgaaggacatgtcaaggccttggctcaaagaaggggactggtgatttgtaaaccctttgccaaaaactaaacatatgacacatatagccaggtttctggaatctctagtttatagagcaaatttaggaagcaagaaatgtagctttctagttttttcatctgacctccaagttttcaagtacagctaatacataaagatgttgatctgccattttaatgcatagcattagaagataaacctttatttgcaccttttaagttttttctcccctactttgattttaggaacaagatcttgatatttggcctctttgaagagacagccctggctgctttcctttcctactgccctggaatgggtgttgctcttaggatgtatcccctcaagtaagttgatcctctggtagctccaaaaagtatgaaatagtatgtgtggcttttccccccattacttgtggtaatagttgttattttcagaattttgagtggtatgtacaaaaattcctatgggttggaaaactgtgaaagcttgacatgtcagtaaatcagactaacaaatcctgaggcttccatgatagcagctagtgtttaggatttggcccaagataagataaagccacacaggctctagctccatggaactgctcaacagcgaactgcattgagcactcaggtctgccacagctgtagtccagttgtctttagaggccaactgggggtatgctggagcgtaggcgcccaggctcaaatcttgatttgcttgcttagtcactgtcccattacaagtcatccacctttctgagactctgaatactctgctctcaaagaaagaaggttggagaaacagatctgaggtcccttttactttataatcagtcatgggtagagttgatcaaaggaagcatactgctagtctttggccttaaacacag

SEQ ID NO: 4473 - DNA, 6000 bp, Homo sapiens
gttattgattcatggatttttctaatttttcccccaattatttggttcaacaattcttggatttctactctgggtctagaactatgctagactctgtggcagtgaataaaacagacatagttcctgataggtcattcctctgtaggtggttaatagaacacaccatgagaaacattgagatggagaaaacagacttgcaaatggacaattgcaatattaattgctggagcttctggaaaggaagcagataatgaacaagtgtccaactcagtcataagcaaggggtagaggattactctgtggagaatataaaatcatcagacaagtttcatggtgatctgtggtcttctagggacagttgtgacccacttaccagtcttttcattattttgtagttcaaacaactgcacagtcaatagtgtcctctctgtatagaatggatgattgaacttatctatagagttacatcaagacaaaagacagaagaaaagggtctattattaatagaacatatagactggatttggaatgagaaagttctgaaatcaagtcagttctggctcttggtgacagtctctgttacaggccataggttctatgtactccactctcccctgtctgtgattggctttcttagctcattcatggggtctgctccttcacagcttcagcttgcagagtcacactgctacttaatgagtgtgtcaatgtaccaggtcctttgcaaagtgttttatgtgccttttcacaaaaactttaggtcgcattatttacattgtacggatgaagcaactgaggctaagagaagttaagttttacagagacgacagctaagaagtattgtccttgggatccaaacccagattttgtccaagattcacactctcagctttgctatatgactatgtgtgtgtgtgtgtatatatgtatacatacacatgtatacacgtgtatatatacacatacacatgtatacacgtgtatatatacacatgcacatgtatacacgtgtatatacacatgcacatgtatacacgtgtatatacacatgcacatgtatacacgtgtatatacacatgcacatgtatacatgtgtatatacacatgcacatgtatatatgtgtatgtatatacatacacatacatacacgtgtatatatgtgtatgtatatacatacacatgtatatatgtgtatatatacacatatgtatatatacacatatatacacatatgtatatatacatatatacacgtatacatatacacacatgcatatatatgtatatgtatttgtatatatacacacacgcatatatatgtatatgtatttatatacagccatctaatagctatatttattctatatctatatctgtgtacatatatatgtatacagaggtgtatacatacatatatgtgtgtgcatatcagggaatatatagccatgtatatacatctgtgtatatatttgtgtgtttgtgtgtgtatgtatatatgtgtgtatatatatgcctatatattttctgctatatacattatgagattcatggttcctatggccccctctcatatccttatagttttaactactacttctaactgctttttcctcagtatttcctaactaaaattttttagaatgaagtcttgtcccagttaatatttctgccatgccttaggtgctgtagattggttgccttgatgtcacatatctatcctggtcccatcagttgaccccccctgggaaagaatcaactagtactgagcagagattgatgggtaggacaatttcacttatatggatgaggaacattaaggattggcagtatatcacacaataagcttttattggtctatcatgtaccagtacacatgtgggtaaatgttctctctgacgtcagactagtagctcagagcttttgctttggtgtttgaaggcccaggtttgtatactgacaccaccatctaaaagttgtattaccttgggcaaataactttatttctttgaggcttttctctattggcaacataggaatagccataagttcctttccgggtactgagaccctcctagctatagacactgggctaaatagagctccaggatgcatgagttaccatcctggcaagcttgcttgcagtctagcattagttcataagactaatgtcagggcggggaaggggggtctataaaatgcatattccaggacccaccccccacctccaaagattctgctttagtagacctggaatagagcacaggatttgcagtttattaagtgtcctgaggctagtgtgtttggtggatcacactttgagaaacaaggtggagaaatcaaagctttcaagtggaaaatcacaatgttgcttgttaagcgctgaggggacattaagtgctgagagaagaaccaagagctttggagcaccaaagaggagccgtaaactctgtgggggtaggtgtcacagaaatgacacctcagctgaataggggacctagcaagtggagagaaggggaagaattttgaggctgccatataggtgttttctgggagtggtgaggcaactgaggggcacagtggctacaaaaaggccagaagagcaaacagggtcagagcacaaagggccttgtttgttaagtttacttatctgtgatggggcatcagaaatgtttagattagtgaatgacaagttgagatttgacttttagaaagttgattttgacttccatgtgaagaacagaatgagggggaacagagagactgcacagagacccatgaggagactggtcataatacaggcaagctgcaatgaggaactgaagtcaggccataggatgcagatggacagcgggggatggacacgggagatatgttgggagctggggtggatggagagtgcgtacctagcttgcagagtgggtgacatccacctagatttgcagccagacatggatttaggtggaacatgggggaaagcagtaatgagttttcattcaggtatatctactagagaagtcaggaacttgctagaaaaaatggagatccaggttgagctttatttagaagtatgataaactcgtgtttggtaataattgaaggcatagatgtggtcgagagtcctcaaaaagaagaaccttagagtgaaaaaaaggtgacattggattagcatcccaagaaataggacctcaagaaataccaacatataaaagatgggcaataaatgcctattgtgaaggcatttcagaaggagtttagagatgtgtgacaccttggtgatggtaaccttgaagaatcaaataaaaaaataatgctatatgtcattattatttttgttctttactcttccactaatcacatggactaatatgctttctcttgcggagtgtcatgtcaaaggtacaacaatttaaaaaacggaagttaaaggatcatctttctaacaaatgtcagctcaactccaggaatagaagacatacaggtaggtttttacctcattattaactcaagaatcatttttccagtactactatgtgcttgtgtggatgatgtggaggtgaagggattggtccccacactcaacatgcttgccttagtatgtaaaacaaacatcacaggctaggcgcagtggctcatgcctgtaatctcagcactttgggaggccgaggcaggtggatcacctgaggtcaggagtttgaaaccagcctggccaacatggcgaaaccctgtctctactaaaaatacaaaaattagcaggggagttgagaatggagaagtgatctcaatgaggtaaaaatgggccagggagagcttacaagagaagatgactttttaatacaatatagtcaaagatgtaaaacagaaggttttgctgtaaaatgaaaagagtcctaaatccaggttctaatcctgctaccacctctgctaggtaaccctggactagtcctttaaccttccagtgttggctctgttctccaggaacctgcaagcagcaaccacacagggcttggaagggagagtggctgttctccacacacagcaggttgacttgttccaggtgcttccaacaggtgatttctcagcgagcctgagccagtagtcagggacaaacaggaaggttaaccttgcctctccatgcttgggagaacaggtgtgtgcgcggtggactccggttcagtcgttctttttcttttttcttgcttttgatgggatcagatggttcatttccaaagagagacagagagaactgtatcgtatttaggagcaatagccttggagtaagacttgtgcttaaactctggatttgtttcttatcccctgggtgacctctggcaatttattccacctctctaagcctcagtctttgttacctaaaaaattgggataaagatacgtacctcctatggcatgtcgcggagattaaaggataatgtgcacacccccgagcccagtgccgggcacacggtggctggttgcaacagaaatctgtgggtggaacgctagctagccattgtgatgaataacatcaaggagagggagtggacctacacatggcagtccccttcttccccaaccgctgccaggcagacagccagcgtcctagaacttaaaggacttttcgatggctggaacctgggccgggtgggctccctggcgcggacggaggcggggagcgctggcgggggtctccgtctccagccacgggaaggtccgtgggctcccctgcccgggctgggccggtccccgagcagagagagaggctggtcccccggcccccggcgtcccggggggcaggttctgaggcgggagccagggagagagaggaggggcaaccgggggaatttccccgcctctcttgctggttccataaatcaccgcagccgccgcggcggcccagccgggaagtgcacagagccggagcgcagcgtggtggcaccagacgcctccctttccccaccgcttgctttctttctttcagttgtgtgggtttgtgaagcctcccctttccctcctcgctcgggtggctgccccagtctcgcagcccggccgccgctcctcttccccgggggccgccgtcagtcctcgccgccgcctgctcgctgcgctgggactcgcaggaagcgagagccgcgcggctcggctcgggctccgactccgactccgattccgactgtcagccccggggcccgcgcaccccggcctgcgggcgcccctgctctcggagacgccctctgcgccgcggggcccgtgtgggcgccgggctccggggaccgctcgggcggccgcctcctacccccaccgccgcggagccccgcgatggtggccgcccgcgctcccgcgctgtagccgggcgccccctaagtttgggagccttcgccaccgcggcgcggagcagagcctgcaacagaggaagaaacttttgcggggtgcgccgcgcttttgcggggggcacctcccgcggcccgcttccccgcgcccggagcccgtcggcggggagtggggggaggcagcatggcccgccagccggaggaagaggagacggccgtggcccgggcgcggcggccgcccctctggctgctctgcctggtcgcgtgctggctcctgggcgccggggccgaagccgacttctccatcctggacgaggcgcaagtgctggcgagccagatgcggaggctggcggccgaggagctgggggtcgtcaccatgcaggtaagtggcccccgagctggccagacatcccgcctttctcctttgctcaaactcccatcccactcccggtacaagtcccctggactgtgtgcatcggctccttgcatacatagagcccggcttcccgtcggacccctctgtcctctgcacagaccccctgacaatacaccaactcttcttccatgcattcgtctacccctgcccttctctggagaatcccctgccctctgcacggaacccacttgaccctgcacagcccccctcttctgagtaccagcgccttcatctcgtca

SEQ ID NO: 4474 - DNA, 6000 bp, Homo sapiens
actgagtcttgaggtcgtttgttttgaagtgatggataactgaaaccagtttgaagccagggaaccagggataagtcctggttctgttattatctgactatgtgaccttgggtccatgacttcccctccaaacttcaatttcctcatctgtacaatgatggggtgagggggttgtactagatgagccatggtgctttccagttctgaccatctgtatcatacacgcagatataagggaacaatctaggcaatgagtgttaggactacaaagggagcaactattaatacttcaggtttgagtgagccttggaggaggtgaaagaaccatggacctggagtcaaaagccctggagtgtgaggattaagtgaggcagaggctagaataatgtatggcacatagtaagtgctcaataaatatcattaactgatacaccaatttgcaactctggacaaattaatctctctgatctccattttttggtctgaaaaatcgagataacactaatgtgcctgtgcctgtctctataagaggaaaagtctttgtatgtagaagtccaatgcaaatcaaaaatcacctacagatataagatataactattattaatactcttattatcctttgtacccatagcattaaaagtctctttctcaccaagagaggagagacagtcagttgatggcactggccaccaggaagacatactgggagatcaggaggcagttactaaggagccacaggctctcagggcatgtgagatttacccacccaccagcatcagtcagtaagccaggtacccactctgaacacagacaacaggtttccctggcaagcagctctcagcccaaagggaaatctggaaacagccaagcattaaaagtttgagccgggcgcagtggttcacgcctgtaatcccaacatttgggaggctggggcaggcagatcacctgaagtcgggagttcgaggccagcctgaccaaaacggagaaagccccatctctacaaaaaatacaaaattagctgggcatggtggcgcatgcctgttatcccagctacccaggaggctgaggcaggagaatcactcgaacctgggagttggaggttgtgatgagctgagatcatgccattgcactccagcctgggcaacaagagcaaaactccatctcaaaataaataaataaataaataaatgtttgaataatttcctgtaccagagttctagaggccagcaacctgagaacactccactagagagctgtgactcaaacccgtggccaacatagagtgaatattccataaaaattattgaatgaaaaggcactggatttgggagtctgaagtcaaagccccaggcttaaatcttggctttgtcatacacaactgtgagcactaaggcacgcaacaacctccctgagcctatgtcctcgtttataaaatagacataaggagacccatctcctagggaagtagtgagaattaaatgaggtactgcaggtgaaaaaaatctgggattgcacttgataactaaatgcatgggtttttaagtgcacagaacctctgccacccagatgcccttcgatcctaaccccacacctttcaatctctgcagaaccctgaaaatgagtggcatacttccaaaggaacactcaatccaatgttgattctgaaaaactgccagcccttgggagagaaagagctgcactcattttccaagggtacccgacaaggcaacaataatacatttgcattttccagcctgcatttttccaaaacaagggaagactgcgatgtggatttaaccctgaaatcccagtgattgtgcagttgcatagacactgctctgcagggatgtggaaaacagccagagaaggctcttaccaggagcatgtaggacagaaaagctcgtgcttccacctctgcttaggtcttgactaacatggtgtttgaatgtgccagggtgcagcatcaattacaaagatctgggagttaggacctggtcctcaaagtcagcctttgcccaaagaagttccaccactccccttaccgtatgcttttgtcctttcttctctgcctcacctctctcaaagaaggatccttggtcccctatttctcatttgcattgggaaaacagcttgaaccaactgcggctccctctcctttcactgaccaccactgcctgtgaatccagggaagttactataggaactacatcacacagcccccagacatttgcttagaaaagaaacagtacatttgggaaagggagagtaagatccagcaaattggaggcaaccctcaagcccaatatttctcaaagtctggccacaatcacctgcattaaatcaactggaatgctcgttaaaggtacatagtcctgggctcccccaagatgtatcaaattaaaattggggtgtggcaagactcaaacttgttaaccccctcacctgattattcttatgcacactaggttttagggaccaaatgcagaggactgaactgtgataaaataaaaaggcttaaaatacactttctatctatctatctatctatctatctatctatctatctatctatctatctatctgagacagggtctcattctgtcacccagggtggagtgcagtggtgcaatcataactcactgcagtctctaactcctgggctcaggcgatcctcccactttggcctcccaaagtgctggaattacaggcaatagccaccatgcttagccttaaaaacactttaaatcttatctcccttcttaccctcttacttgtaaaatagggtactgctgaaccaaacaaaacacaagccaatttcccagtttatgtatgtccaagaaaattaaatcatgaccctgatgaaaactcatactttaaaataaaaacctctgctcaccaaatcaacaggcctgggcaaaaattaacccaagcatcccatcttagacccaccgaccaggtctattctgagagatgagagaactaagataagatcttggctgcagccccactctgtcccagccatacccagtaattcagctctgcattccacggcagggtttaatgtttcgggggactaagcggggcagttctcctagctccagcaaatatggctgggataaggttattcagggggaaaaaaaggtgagcttcaccaattcacccatatacatgagaaagaaaaaaatctaaagaaactgaccacactgggcacatgtcagatactcgaaaaatgtgtgaattgaaggaagaagacacctgatggaataatcctttcgtgagatgctaacagcctgcacgtacaccatcaagaaagagaaagagaacaaagagtcaaactgtcgccacatccaaagtacaacgttttcaaaaccagcaagacccagcctacttagagggacaatacttttccacctacaggcacactgtaggtgccgaaagtccctgggtctctctacgtcacagaggaggtcaagtggcttgaaggaagagcagaacactgttccacagaaaaagcactctttcctgctgatgggcagtgggaaccgccactgcagtttcagaagccagaactcctcactcagggaggtgcatcacagggagtcagccttgctcacacctgatggtccagggccgaggcttctgctccacccctcccccaacggtggacctggggctccgacctcagcgctgaaattccagtcatctctgctaaattcttcagcaacagttccctactagatgctgaaacttaacattaagccacaaaactagcaaatgggtagctttcaccactcccttcagtgactggcacatgcagaggagtctggcaaattagccatttaggaagtgactctgacacctagacccggttacctggagtttaaaaaaaaaaaatctggattcttttcttcaattaggaagcaggcattcctcttttaaaagaccttcctgaaagcacctctccctgggagcccagcaggtaaataacaccagagcttccttaaaccgattctaaacgaccaggtgcccaggctgagctcacttgccggcttctcctctggaggagggatccgggaagtaactcaatccagtcctaggcgggtaaggatgggggagtctgcaggtgggaagggggaggtgaggcaataccgctcaaactttgcagttgctcttgagcagttctgggcaggagcccgcggaattatagactcagaagggagagttaccctccctaagagaaaggcccccaaatcggcctagcccgccagctctgggtccaggacggctgtgcatcccatccgctcaaacatgcccccccaaccgccaccacaggtagcaccctccccggagccccctcaccttggcctcaaagcagatgccgtgctggaaggcgtcctcgttgtgcaaggggatccgcaggtcgtgcccatcgtccacaaggttgtacttggttttgctaggcatggttacccgcggcggacccgctccttcggaggcggcggctgcaggaaggggctggcgagaccccggggaggggagactggagctgggcgcggcgacgcgtggcggggcctgggagcgctgggcagggggagccctggccgcgcggcggccggacccggagcggtgccgagggccgagcggcagcgggctgagctgatgcgggcgacgcgagcggcgctgtggtcgcgcaattcctgccggctaggagggcggcaggggaggaggtggcggcgggagcgggctgcgcggcgcccctgcccggggaggggagcggtggggcttgcggcccgaagcgggactgggcgcggcgccggccccagagcagtggaacgcaccgcccgggacgaagaagaaaaggcgacggtggcggtggcggtggcggtggcggcggagcagggtgcctgtcacggagacgctggatcagccgccagcgagcggctcctcctgtggggcgggcccaggccggctcctcccgccgggctcagaggccccgcccgccgccgggtccgcccccgcgctgcccgcgctgccagccgagcaggtgaaagtccccgggagagtcgcgcccggccctgcccgcgcccccggccgcgcgacgccggcaacttcgccccggccccagactgccgggatctgaggtgccctagctcagcctagtttcctttttttaacggtcaaattctgagccggagctactgatggccgcggcggcatggccttgaagtttttgtttttgtttttggagaggggggaggggccgtgtttattgttttgttttcgtgttttaccaggaaggcccaagtcttgtcccagatatcccagatctgggccctcattaattctcagagtcccctttctcagaaggcaagactgcgcccaaatggaggactatcttaggcgctttttgttcgtatgtgacttgtgtaatagggcttatggggtgcctttagggagggttttaacatttaaaagccatcagccttgtagaaatggggaaggcagaaaggagtactaaggacaagagaatccagaacatttttatattcttgactgtctacaactgggtatggacaaaatgagcttccgagttatttccggccagcgtattatggttcccatcttagtaaatgctggagctcaatttgcctattgctaagaaggggcctagtcacttttctcctttacatcaacagttttggagaaaagttgcctaattatctccatcttggcagatatcgggtaatggaagggttgtgtcctatgtgttcagtttctgaacggtgcaagatatgcaaataaaggagctataggaggagttcgtgaccaagtattcagtatctgtgaaaacaccataggtagagctgcaggacagctgttatatacatggctaactccaaaatctcggaaagtaaccagtcaagccagtgtcaaagccagtcaaatctgagattccttagaccaaagggtcagattctctgttgaattcatcaccttaaa

SEQ ID NO: 4475 - DNA, 6000 bp, Homo sapiens
ttggcctcccaaagtgctggggggtatctgcatttttcataaacttctttggtgattcctctgaagcaagttgagggaacagtgccgttacaccatcactttctctctccatagcctcaaatcagcgccctagagggacccccattacacccgctgttgcaacagagttgagggtgggggtactgcatggctgtgatgcctgcaaacctctgacctcccaagctcccgactctaggaacatacagggcttgcctgagtttccacccagagaattggaccagcaggactggagctcctccagatttccagacagccagagcctctgtccctcccaagtctgagtgtcaacctggacagggagactatggcctgatgtcaccaatgcttgtcccctgtcgctgtccccacctgcattccagaccatgggacagaaacaataagctgaggcaggtattgccagagagatggaggcagcccccacctcccctgctggtgctgacgctgatgagacaactctgagaccccagagctgctgctcagctcctttggctacttgagcccatttttccttcccactctaaggaggaagggggagtaaggaagatatgctttggccagtccgtatgagaagaacagcagttgcaattaactggactccgagagcgacagggagggacgggagactgaagcaggtacagtgtcgccacacagggggagaaagccacaggcttggttgctgtcggagaaacagcatggaggttcagagcagtcagtttgttcttaatggtcataagtccagggaagggaataaaagagaaaagaaggcaaggggagaaagaagaaagataagccaggtactatagtaggtattttacacatttaaccttatctgagtctcccagccattctgcaagataggcaattgctatagtctgaatgttggagtccccccaaaattcatatgttgaaacttcatgtaatagtagcaagaggtgagccctttggaaggccatgaaggctatgccctcaataatgggatcaagaggccagcatggtggtgattcaagccagtaatcccagcactttgggaggccaaggtgggaagatcccttgaggccaggagtttgagaccagcccgggcatcacagtgagaccctgtctctacaaaaaacgcaaaaattagcctggtgtggtggtgcgtgcctatagtcccagctactcaggaggctgaggtaggaggatcacttaagcccaagaggttgaggctgcagtgagccatgactgcaccactgcactccagtctgggcaacagagcaagatcctgtctcggggaaaaaaataaaaatggaatgggattaatgcccttataaaagaggttgaagagagtgccctagccccttccaccacatgaggactccacaagaggcaccatctatgatgcagagagcaggtcctcaccagacactgaatctgctagcacgttgatcttgaacttcttggtctccagaaccgtaagaaataaacttttgttatttataaatgaccctgtctaatgtattttgttgtagcagctcaaacgaactaagacagtaaccattcactgattcatttttcttttttttttttttttttgagacggagtctctctctggtctcccagactggagtgcagtggcgccatctcagctcactgcaagctctgcctcccgggttcaccccattctcctaactcagcctcctgagtagctgggactacaggagcccaccaccacgacctgctaattttttgtatttttagtagagacagggtttcaccttgttagccaggatggtctcgatttcctgacctcatgatccacctgcctcggcctcccaaagtgctcggattacaggcgtgagccactgcgcccagcccactgattcatttgtaaataaatgtgaattgagggccaggtgtatgccaagcactgttctcgggggtagggatatggtcaggcaggcaagttctctgctatcttggaatgtgtcctccacctacagagaaagaaactgaggcccagaaaggaggccaaggtccccctgttagtgactgaggcaccagaggttgggatttaaaccaaggcttgtataacatcaagtcatctaatctctctgctcagccgcatgaccttaggcttggccatgtttacagaggttccagtgatgactgagtgcttcactggggtgaggtcaacaaagggatacatgggaatcccacccccagaagcatggggtaagagaaagccatcagcattcctagagctttcatttagcaaacgtctgtccggggccagacgccgtgctggaggtttcacggttcttggttgaacattttcttttcttttcttttctattctttttttttttcttttctttttgagacaaagtttcactcctgtcacccaggctggagtgcaatggcgccatctcagctcactgcaacgtccacctcctgggttcaagcaattctcctgcctcagcctcccaagcagctgggattacaggcgcgcccccaccacacccagctaatttttgtatttttagtagagacggggtttcaccatgttggccaggctggtcacgaactcctgacctcaggtgatccacccgcctcggcctcccaaagtgatgggattacaggtgtgagccaccatgcccagcctgattgaacattttcaatgagacagctaagtggaaattgttgtcttcaactgtacagataatcaaaccacactggctgagtgccttccccaaggtcatccagctaataagtggtgggactgaattgaaagcctaagccggtttgactccaggatgcaccctgtctctccagtgcaccttcattcatctccccagattgccttgggaggacggggctagaggacctgtttaaatgactgtctcctgctcagttggaagctcaaagccctctttgctgttcgtacggattcactcacactcatccctcacagcaaatgtatgaagatgagtcttggaaagcccttgttcgattgggtcaatagaagatgggagagaaatgttctctcccaaaagatgctgtaagagagagccacagaagagcttagaaaggggttttcaaatagggcaggggattcagattttgcctgcaaagttcacttgtgctctctctctccttctctcgagtgaggagtccctgaggcaccagcaagagtgacaggtgtagtgtgggtggccacctgaggtcgcaggaaggggtgagggagggaagctgtgctctctggctaggggccggtacagccttcccctcaccggctcatcctctgagactcgacccaggtgcaccttcctgatcacctcctgtcgtaagtgcctgacttcccctgtaggttagggtctggcatagggtaggtgccaatgaatgtgagggggaaagaattgagactgagggaatggcaggagagggcaaagggtgggaagaggtgtggtgccgaacacctattaacctcagtagggaaggcaccaggtttgagaggccaaagaaaagatccatagccagcaaacggaacatgggggtttcaggaggcggaggttgcagtgagctgagatcatgccactgcactccagcctggacaacaaagtgagactctgactcaagaaggaaagaaagaaggaaagaaggaaagaaagaaagaaagaaagagagagagaaggaaggaaggaaggaaggagggggggagggaaagaaggaaagaaggaaggaaggaaggaaagagaaagaagaaagaaagaaagaaagaaagaaagaaagaaagaaagaaagaaagaaagaaagaaagaaagaaagaaagaaagaaaaagaaagggagagaaggaagggaaggaaggaaaggaaggaacgtgggggtttgttaggggcttgcctacaggagagagagtccactggtgatgaactggacaggagaaccgccttacatacagaaatggtccaggggcggcgggctggacaacataccagtggcggccgactgggcaggaaaacctcagccccttgcaaacagcatgcagtttatagagcattttcactttacaccatcccctaatgacctccacctggcaatcttcatttaacccaaaactcagggcctcaatcccctgtatggccagcgttccaccagaagggacgggacgggggctcagatattcatcgtaggtaagaaacgggttggctactccccagattccttagctcggaacacatattcaggtcttccacacagggtcattcttggagcgtgcttcagttatccctgtcaggtgcgtttaccctataagaaggcccttcaggggacactctggcagcctgagcagtttgcacagtgaagcagtaggtggctccccagctcctcctgcctgcaccacaccacacacacatgactgtggtcagggcgggggccgtgtagtaactaccggagtggtggagggaccaggagccacacattgctgttttagccagtgacaacttctgagcacgaaacactcacttttaggtcatattccttccaccgtcttcatgaagtccaggtgcccagtctcactgtctccgtttttcagaaggcagtcagttcagggaagctgagcgccttccccagggcacccagtcagccggggcagaattcagatcagaactcccgacagctgagaacgccgcacgggatctgccctccatacgaccatgcctgagccgttccctcctttccattttaacaggggcttgggttgggcagaaaggacccagctgagaggaggagcagtgtggggggacgcggcggacagctccacctgtcgctgctgcccagcaggctggagacacggaatggcccctccccttggccccctgtccccgatgccatagttctcatccattgtcattgtactgtctcagtgctgctatatttaagacggtgcagtctccgggatcgcattcttctcccggtgcccgctgagccgagggcaagaagagaacaaggaccctctcggcctcaggaatcttctccccagagactcctaagtgggcacactgcttctgtgagtcacccccagaaatcagggtgggggagggatgcctcctaagagtcagccactggggagtgatatctgtgggtgcatgtgtgtgtgtgtgtgcacgtgtgtgtgtttgtgtgtatgtgtgttgtgtgttgtgaaaggagcctgggaaatttgtgctgaggcagcacccaagtgaaaatgggaggggattccagaaacccctgccccatcccactgttctgtgtggccctgggtcttctgagagctgagctgtctgtgatgtgaaagttgcaaaaaaaaaaaaaagagtgggggctgccctgggaactggagtctttcctgtgatggagcagcgataagcgggagccaggctaagctggcaagttccacgaacttagagcggagctggctgagcccggcttggccaaccccacaggcagggaaagagagcgagccctcggatcccaaatcttagagctggaagggatttcatccagtgcctgacaggaaaccgaggcccagacgggaaaggagttgcctcagctcatgactggcaagggcaggattcggcctcgcggaagctggtggagccactggctaagaacacgtcccagcctgtgccacccgccgcccgcaggatgtgtctctgctcccagccaccatccgcccccatcgcagctcctggaggggtcttggctcaactgctgtgcattcctctttccctcctgaagaaggggagaggcctcctcggcagatggaggcttgggaggaaagcagaggggaatagggaaggccacgcagtgggacctctggcccagatttttgcaccccaagagagggaagcgggggcagtttcccctccacgcaggcacacacagtgttccgggaagaggcaccctggtcctttgggaa

SEQ ID NO: 4476 - DNA, 6000 bp, Homo sapiens
tacctgctccaagtgccattatctctcacctgaattacagcaatcatccctcagctgttctccctgcttcctttctttctcctccttaaatctgtcctctgtacagcagccagaatgaacctgaggaaacacagatcatgttgccactcagaacgcacccctttatggcttctcatttgactctgagtaagagctcatgaactgcaagcccctctgtggtgttgctccccattctttctttgcctcccctcttgctcctcaccccccggttcttaccactccagccacactggcctcccagctattcctccaacacaataagcaccctcctaactctgagcctttgctagtctctcggctactccccctgccctcccacatcagcacagccagctccttcctttccttcagtcttcactcaaaaatcactgctcagtgagccctccccagcctccctatctacaacttcttactcccccaacggcttcactttccatgctttgtttgttcttattagcatctatcactatctagcatgtagactgtacttctttttattttgtttgtcactctcccctcttagaatggaagcactgtgaggacagcattttatgtgcatatgtgcgtgtctattttgtgcctggaacacagggggtacttaatacatttttgttgagtgaacaaatgaatatgttgagcctcatcatgactctgagctgaacaagctgagcatcatctgcatcttacagatgaggagactgaggctctgtgagcctataaaatggggagccagatcaaagccaggtctcccaatgtcatgacctttatatttttcccttcaccggtaatacccttagacttggtcagtggagatcctcccttgggcctcaaattttagagcatcccggagtctttctctggctgtaccccttaccattaagtgggatacagtggctgcctggagtttgtcctgcctcttctagatcacgttgcaggtacccaggactctggagttccctgctcagatagtcttgagcctgctgacaagaccaacattgggggtttcttcccaggctgtctctactcaacctgggcctgaaggatgggcacagggtggttgcttatagaatatatgggtagaatttgaacatatgggctgcaaggatccacccacatgtgtacaaggcccctggtgatataagatggagttaggagcagaagagaagtgatacagtaagaagtgtaagaatatgagcacaataactgaaagtaaaatctcaatggatacattaaacattaagttagatgcagcagaaaagagaagcaatgaactacgagatacatctaaagtaattatctagaatgcaacacagagagagtaaggtataaaaaatccaaataagagttcaaaaaaaaaaaaacccaaaaacatgaacgtcaggtgtggtggcttgcacctgtaatcccagctacttgggaggctgaggtgggaggatgagttgagttcaggagttcaagaccagcctcagcaacatagccagaccccatctccataaaaacaattagctggtcaaggtggtgcatgcctgtattcccagctattcaggaggttaaggtggggaggatggcttgagcccaggagtttgagactgctgtgagctatgattgtgccagtgcactccagcctgggcaacagagtgagacctggtttcttaaaaaataaataaataaaataaaataaaataaaaaactggaaggatggagttgagatggtttggagttccagaaggagataacagaacaaaaaagatacctgtccttagatccaggaatctcaaataatccctaggaggataaaaaatgaaaataaaaactatactgatgtgtgtgtctgtatctatatgtatgtatatatactatgtatatatacatgtacatatagtatatggtgtgtgtatatatggtgtgtattttatacgtatatatgtatatggtgtatgtgtatagatacatacacacacacaccatagacagagaagatattaaacatccagaaaaaaagatcatctacagaaagacgatgctgatagctaatttcttaaccacagcaacaaaagagaagccaaaaaaacacaatggaatatgatctataatatgctgataaaaatttcacacctgttgaaactatctttcagaaatgaggataaaataaagtcattttcagacaaaaactgggagaatttattaatacattatcagtaaatgcagaaggaaaatgatcccagctggaatatctgatttgtaaagagtaatggtgggaaaaagtttggtaagtatgagagcaaatataaattaatgttgtctgtagaaaaccataatttaatttatattggaaagtcatatgatcttttttatttttgtttttgagacagggtctggcttggtttcccaggctggagtgcagtggtgcgatcttggctcaccacaacctctgcctcccgggttcaagcaattctcctgcttcagcctcccgagtagctgggactacaggcacgtgccaccacgcccagctgatttttgtatttttagtagagacggggtttcactatgttggcgaggatggtcttgatctcttgacctcgtgatctgcccaccttggcctcccaaagtgctggaattacaggcatgagccaccacacctggccagatgtccatttttattgcccctaatcaacactgtctggaggtgcttaccagcacaggtaacacaagaaaaaggaagaaagtcatcgttatttgtagataacatgatagtctatgtagaagtctctgcataatctatagacaaatcattagaattaataataatttagcaaatatgctggaaataaacatcaataaattaaagtcaactgtatttaatacagcttattccaacagaatattatgtggttgataaatttgactttattaaaactaataatttttgtccatcaaaagatacttgtaagatgggagaaaaatgccccaaactgaaagaaattatttgcaagacatatatatatatctgacaaattattgatatacagaatatataaattgtgcatgtaaatcaataaaattgcccaaaaatatcctgcacaacaaactgtaaaaaacaagtaaaagacttgaacaaggcatttaacatacgactaaataggaatagcccataaacagatactcatcatcattaatgatagcaaaatgcaaacgaaaaccacaattccttttctcaaccattgggttagcaaaaaattacgaagttggacaataccaagggttggcagggttgctgaggaataagaactcttatgcacttctagtgggagtgtaaattggtactatcatattgctcagtaattttagtcctggctgtgtgccctagagaatctgcacaaatagatgaatgtatatgcatgcaagaatgtttatagtagtatagtttgtaatagcaaatgattgttatttcccaaatgtccctcaatattagagtgaatacatatatttgagacattatattcatatgatggaacactacatagcaataaaatgaacttggctatatgtatcgagatgtgtgaatctcaaaagcatgacattgaactgatgcagcaagacacagaatacagggagaagcactagaactggtaatattctgtttcctatgctgggtggctgggttcacagatctacattctattgtaattctttaaatatgacatatatgtagggtacattcttttgtatgtatatgtcacaataaaaggtgtcaatgcaacaaagaatgggaaaatggattcggttgttgaaataatgaatatcattaacaggaccactgtgaacaaaaataagggctgtaatgctatacaaatggttatttgcgacttgggataaagtttacagtgtcttcatcatacttggattcaaacggtgatataatgaaggtggtgtgctcaggaaaactgttagacaactcaaaaagtggctctggtgatgacaaaggcagtgatattgaagacaccaaaagaggggttcttaacatattttcatgaaattacagtgaaaaaagtacttttaaattaacattttatatgtgattttaactacatatgcgtgactgattaatctagtttcataatacaagtcgccatttatttcctctacatttataatactgcatatatattcaaattggccaaaatctttctttccaatcatcatgctgggattatggggttatatgtggcacataccattcctgtatatgtcaggatggaaaaagttttacctggaatgaatttttgccatttctgatccacattgtacttcacacagtgatttcctgaaggaaatataatgatctgttcatcgaagtagaagatattgttggccacgtgggatcgaagaccaaaaacatgcagcgtctgagctaccacggctgacatgatctcccgccaaacagttctgctgaagaccaaggcagcgcttcagagtggagagcaccgccccgctccgaccccgcccccggcccggactcgccctccccgccctttgctcctccccttgtctctcccctttctcctccccttgtccctcccctttcccctccccttgtccctcccctttcccctcccccggggtcctcctccgcgccaccccacccccgcggctcctttttctgccttttcctttgtaccctcactgctaccagctccttctggcgacccccaggtaccccctcccacctttcgtttctctctgggtcagcagaccacgcatgtatccagaggcgctacctgtagggatcctaagcaacccggacactttcaaacgccgtagcggttcctatagcaacgacaaaccggaagtatggtttgccgccggaagcggaagtcccaatcaaaagttgagcagtagctgtgagttgctggcgctggagcgattcggtggcacgtggagccacggcgtgggagtagggggctgaaggcaggcagcagcggccagggccgccctctgctagccgcttgggtctcgggataccccgtttcttcctgtaggtgtgggacgtgcgtgcggcgagatggacactcccccgctctcggattcggagtcggaatccgatgaatcccttgtcacagacagagaggtaggtgtcagccgagctcgtggggctgggcgtgggagagggggccttacacccctgggagtgaccgtgattgtgtcctgcagttgcaggatgcgttttcccgagggcttctgaagccaggcctcaatgtcgtgctagaggggccgaagaaggccgtgaacgacgtggtgagcgtgggcacagggtcgggggtactcggacatgggatgcgcttcaggcgctgttgggcttgggagaccgattcttgtcccaggaaagatgcaccctgcgcctcgccaagagggtcaattacctgtctgggtattggggattagcactttgtcccttcgcctaacagcctgtgcttgggaaagacaaactcagagttcccttcttgtgagctcagtgtctggatttcctagaatggcctgaagcaatgtttggcagaattcaagcgggatctggaatgggttgaaaggctcgatgtgacactgggtccggtaccggagatcggtggatctgaggcgccagcacctcagaacaaggaccagaaagctgttgatccagaagacgacttccagcgagagatgagtttgtatgtttgttttcaaatgttggagaagttgaggatccttgtgcaggagagtgggaaagaggggaaattagtaagtctgcactcagaataagcctaggagtagagagagcggcttcttttgactaagaatagctaggagattcttcctgtttgagagaagagctctttggtccacggtcacgatccaaaatccactttatgggctaatttgaaatattcatgttaaaactttttgtgc

SEQ ID NO: 4477 - DNA, 6000 bp, Homo sapiens; identical to SEQ ID NO: 3178

SEQ ID NO: 4478 - DNA, 6000 bp, Homo sapiens
ctcattaagctgtgcttaaaatgaagcccttttcccaagggcatatccaaaggaaattattcatgtcaatcctctgaattcagacggggtaaatagctttggaaatttgacaaaagccaaacttttaagtgtagcaaatcaatattgcttggttggaaggttggttctgagaatggaatctgatcatgtgtctcagtcagttcaggttgctacaacaaagtactgtagactgactggcttcagcaacaaactattttttcttacagtttgggaagctgaaagtctgaaatgaagatgccagcatggttggattttgtgaggaccctcttcctcgtgtacgaacagctgtcttgttttatcctcacgtggcagagtgggagctctctgatccctttatctccttacagacttgaatctcattcatgagagctccacccccatgacctaattacctcctaaaggcccccatttccaaatactgttaatattgggaatttaggggtcaacatatgaatttcagagggatacaaacattcagtccatagcacgttgattaaaaaattgcttaaagggcagcacaaagaagatgtacagccagaacagaggacttattcaaactctaaatcctccagcagccgtgaccgggaaaatgtgccgctcagatctgctctggggagcatagttgactgccaggccctgcccctgaccttctggctccccaactccatttgtaacaagcgcatgctccccatagactgctcttagccaatgatcatgcatggtgtgaacactagtggatgcccatctctgcaaaatatggaactcctctaagcaggcaattttggcctaaggactcctcattttcaaaaccttcttagaactgtgctactacctgaggtgcttctaatccagtctttcttctttccctctctcctttaaccagtgtcatgatctgagggcccttcctgtctattcctgctcctgctccattatccttcccaggattttccacgcagtaaatatgtcttgcacatctgattccaccctggcatctgctttttagagggcctgttgatacaggtggactagaagtggggtgatctgagaagaagatggtaagatcggctctgagagtggctcattaattgcccaactggctacaagaactccatcttgagtggaatgtggggtcttggatagtgtctggcacaagatagtggcccccgtgtggatttcagtgatggcgacctgggaaactggcccagtggagggcaatgccatttaggtgagatagttaatgcacttgaaagatggagggagcagtgtctgaaagaacagtgcagtgggctggttattgctacattgtgttgatgccctgcatgggataatgagaaagtgagggtcatttgtaaacagttaaggctgagtgggagtcagaggtctccttggtaggtaacagacaggctcttatcacctgcagtggaggagtgtggacagcagaggagcaaaagagattttcatgaaaagagttgtagagccccagagatgtttaaacgcttagccaaggcaggtctgggccctggttgggaaaatctggaatcttgaagcatgaaatgggacatcctgatagaatccctgaggatactgactgcagatcctcagagcttgcagaggtggctgacccttccctagtcaaagctaacacttcccttaagtgggaaggcagtgttgaagcctctagcgtaaggaataaataggtgcccactcaggacctgccccatctcctcttagatatctgccagggtgataactcaggttaaattccagcatcacccagctgcctgtgtgttgggcctgtaaaggtgtggggaggaagactgcataatgtaggagctaaaggaactacctagcgtgtaccagcaggagccaggagaggacccctggaatgggatttctgaaggtgcttgatcaaagtgggcaggaactgtggcgggattgataaggaatcagagataccaagaggttgaggaggatttattatttaggtgcaccggcccagtcggattaacatccaaaggactgagccccgaacaaagagtcaagttaccttttaagcattttatggggttgggggagatctgtgcagggagaagcatgttacagaagcaagaaacaaagacagttatttaattaattgaggcatgcattacatcatttcttacttttcaaggaaaaacgtgtcttaatggcttgagtttatctgtctagtgaccttgcagcgcacagctaaagaaacagggtctttacaatgcctgggaaagggagagataaggctcactagccacagaaaaacaggcagttaatatttaaaggactccagctctttctctttctcggggggaggtgggttttcttacatagaactgagtttctgtttacacattctttaatttcttttaattcctattccagaacaagcctggctaaataaaaattcattgtcttgggggcactttcttgggacttgggactgtagaagatgggtaaactcactgctaggtgactattagaagctgagagaaagccatagtgcatgcagagtaaagcaggaatgcccgaattgcccttgcaaatggtagaaggacagaggagctgagggaagtggacttgcctgaaagaattttttttgtgtgtagagcccgaaggcagacagaggggaatgttccatgggaggcccagaggatgcatcatattctatggccatggggaatgcactggcgtgaggggcactagcatcactaagaagttcagagaaggctctcctctggagggaagggctgacggtaggagaggcaatcacagggctgggcttgataatatccattgggataacaggatcctgaagtagtagaagccaggtggtggctttaaccatgaggacaccagaagatgtaattactgtaacatctgccaagggcagaggagcagccaagggggcttgatccacaggaggttgtggagggctttaatagcataaggtctccctaggggaaaaacagacgggcagccaacaagagtgttgcctaacatctacaactggaggaagacaagaagctatttatcctatgcagggagtagttgcttaataaaaggcactgctcattgctcaagtctcagacctgagcctatcttcacactgagaccacagaatctgttgacttaagaggttgttgggtccctataaagaagaatcctgcaatactgaaacaaatatttactgtaattaatgattactctttggtctgtgtcccacggccattttcttgactgattttatgttgaggaaagaggaatacccagacatttcacaggtgttacccaaagtatgtaacacacatggctcctctctaagtgtgggggcttatggggatcaggtaataagcagagtcctggataatgtccagcttacagtgggtccaggaatacactgacccatccagtagtcattttcttagttcctgagtgcataattgggagtacatattgggcagctggagcaatctccacattggtaagaagctcagggtccttggtcttgagttatcatggtggggaaagccaatgggaagcctctgaagctgtccttctttccaagtgaagataataaatcaaaaccgatatttcatctgaggggatagtgagatgatggtggagattaatgtcataattaaagacctgaaatatacaagagtggttggtcatccctgccatatctctacttaacttgccagtctggcccctttggaaatcaggtggacccaggataatgacataatggctctgcgcagtccaaaaggagctggatcaactggaaattccagagaacatcacacccatctatttcaccaatgacattatgctaaccaggcaagatgagcaagaggtggctagcatgctggaaactttggtaagacatgtgcactccagagtttgggagataaaccctacgaagactgaaggacctcctacttcagtttttaggggtccagttgtcaggggttttccaggatatccctttcaaagtaaaaggcaaatcataaaatacacataagataaacgaaacagtaacttacacattttccaaaagagatacctaaaattgttcatagtgtttatgtcctttgacatagtgtttatgtcctttgagatgttttcattgtgcacagagtgtaaacataataaactaatatgagacctcactactcatccatcacaatccagtgtttatttgtactggcttatttgtacacttttatttatttgtgtttatttgtacacttttttttaatcgcctgtctttcctcactgtgatataaagttcacgaaattcaggtctgtcttgttcactgctacatccttggcacttaaaatgtagttgatgctcaagaaatatgttttggtgaaatgaatgaaacatactatacacataattttggagccagctactttaacctccagacacttaagattatacttcatctttcttaaaatgcgtccctccaaaaatcatatgaaagcactgttcccatactccaaagactatttctatgaatgcagattcagaaccaggaagccttcgtcttttggcagtcttcgagtctcttcccttttggccggtactgccgtagagactacaacggacacagccttgcgtggatcattctttagaggacccaactcaccaaagacgggagaaagttgttcctaggcaagcagcccagcccagggccatgtcccgccttaagccacacggaggcgctagagcgccacagtctccgcggggcccggggcagctgggagaacgactctgggcggctgtattgactgccgggtgtgggcggagcgaagggcgccccggccggtatggcgggcaggaagtgcgggtgcgcgcctgcgcataggtcgggtctgcggtgtcaccgctttcgcttctgcttgagtcagtcctcacggtgacgcttttccccagcttttccgagtaggatcgtgcccaggggaggaggcagagtgcggcagtggggagggggcggagcgcagagcgcctgcgggggcgcccgggcaaggagtggggatccttggggatgggggtacgggaggaggcgtgggtgggcgataaggctgcgtggaggggaggggcggggggcgccggggcgggagacggaggggatctgtcctgggggagcccggttctcccctagccttgcccggggcacgccggtgaccccgtgtgtctgccccgtggcagtactttcgtgggccgcctgccctccccctcagcccgcccttatccgcggctccgctttcagagcagggtttctcacccgcggggcttcgggctcctcacccggcacctctgccagaggggaccgcctcccggcgcgtcgggcattcgtctctttcaccccttccctcttcaggagaaactgaacacgttttccagcctaaactcggcagggcaaaccagaacattccccgtctaagcagttccggggagttttaacaatttcctcgtaaactcgtctacagaactcactgtatactgtttaaatgtcgcctgtgtgtggagcaacagttttattgtgccgtgcaatcctcaacaagaaattgtagtccagggagatgaaaatcccttatttggcattcaggcgttgatcaaggtcgtgcaaccctcgctaaaaggatttaggttcatctccgtcattctcagccggggtgaaggggtgtagtctgacatttggaagcttaagaaccaagtctgctgccgtccaattcttttttaaagccttccatcatgtgtgtactttgcttgaatgattattttaaagtacatgtcctatttttgccaatctgacagctgtttccatagaaactagagaagaaatagtcattttcagcaagagttgttaaaactgtcttccaggcttcagctgtgagtgccag

SEQ ID NO: 4479 - DNA, 6000 bp, Homo sapiens
catggttcttagtaacagcatgctgttacttaccacagtaacttttctggttatatggaaaaattcagacatatcaagaaaagccaagagcacaaaattaagttatactggagaaaaacgctgcttttctacgccttcaagataaatattctaatgtcaggccaaaacagcaatgttagaaccaaaaaaagccaaagaggagaatgatcatctcaggccttctccaggggagaaaaaaatgaaggaaatgacatattgacctgcaaatcatgtacagcaagaaactgtaaaagatgaacttctgcaatatgaatttgagaaataaaaaaaaaaaaacaactgtacctcaaggaatgaaattaccactttaaatcaagaagacaacatttttaacccaaaactaggaaaattaaatagatgtcaaggagaagatacctgtttaaaaacagagtataaatttaaaaatcaaaaccccttaaaattttattaaaatcagataatacttcaagaaatcttgttgttttaaatataaggaaccagactctggttctgtatcagtgcctgtcccctggtcccctacctgagaacgtttaatttttagaaaaacacacaaacaatttgtttttaattccagccaagtcaataacacataaaacttcttttattagctcatcctttattagtcctcttcaactttagaccttttattttcctaacccctacctcttagtcctataatttttctttttttaaaaatgtgggataaccaatcattttatcttatctgactatgatacagacatttattttgtatatatgatttaacataaaattttaagactttaaattacatgagttcatttataaacatttatttcatttacagttaatttattttttaacaattatacctatatttcttacaaaaattgagatattagatggagctggtcattatttcaagtttttttaaattaaataattatatagcctgttaacatgaggtgtttacccacataagagccataaagttaaatacatgggtatctgtagataactcagaaaatacaacttttgtttttttccttacaggcaaaggctcactctgttgcccaggctagagtgcagtggtgtgatcatagctcactctagccttgaactctgggctcaagggatcccccctcctcagccttaagagtagctgggatcacaggcacatgcctggctaatttttaaatttttttatggagattgggtcttgttatgttacccaggctgatctcaaactcctgggctcaagtgatcctcccaccttggcctctccaagttttagcattgcaggtgggagtcactacccagccacagctgtttttgttaaataatattaaattaatcttatttatcaaagaattgcataaatatatatcactttgctttaggcctggtttatagcttcatgaccttaatagcacaggcaaatataaaactgaccagtgctggtgctcagaaactgatatgccaaaacatggtatttgacacgctaaactaaagaagcctcaaggtctctctgacttttcctccaaccccaccatccttcccaaagaagctgaagttcctttatctgcctaacaaccagacccaccaaggagagcaattgttggttctcctcctcctgttatctcatctgttaaagaaaagaagaccaaaatgtaaccacacccaagcagacctttatagaagtacaatgactgcctccaaggattatttaaattccaaagaaaactatttacaagttaatatctgttgctcaatccaatcattctctcaccaatcattcattgcccctcaataaattcctcttctcctcccataatctgttttaccagaatccaagccccccattctttctgtaatttcaagactagtgtataaacttctataactcattgagaagttgggtctttattctgaaagctcctgtgtatacacattaaatacatttgtatgtcttttctcttactaatcaatgtggcccatgtcagtgattttccagcaaatctttggggggctgagagccatagcccccacaccagtaaacacaggcaaaaatatatattgacaattagaaagacgtttttaattttattttatcaacaattttaaaaccaattacttttttaaagattaagttacatgaactaaaaaaattaggttaattactatgtttttgtgtgagtgcccatctatttaaaccaatcagattaacatttcttaagggatttttggcctaccacactgaattttattatgtagacataacatacaacataatacatgtacatatgtgtaaatatatttaaacaaatatacacataaaggtcttctagcttttattttagaattttagttgtgagatagtaaaacatataaacttgctggtttatagagaacagttggatccaaattatttttctggtaaaatgagataaaggctatgaatcaaattttggtaaaacagtttgagttaattaccagtgcagggaccaaagggaaacttcagtgaaggctcactgaaaaatcaacctgcaaaaggcagattaattggagaaaaagcatacaaatgtatttaatatgtatacatgggagcctgcagaatgatgacccaagcatatagaggaaattgtctatttttaacttaggattaataaaatatagacagcaatgtagaaatatgattggacagaaagagtatgagctaatgccaataaaatgagtggggaaacccagtgaaaaaagccaaactctgtaaaatatttagaggtttattctgagccaaatatgagtgaccacggcctgtgacacagcatcaggaggtcctgagaacatgtgtccaaggtgtttggactatagttttcttttatacattttaggaagacagaagatacaggcaaaaacatcagtcaatatatgtaaggtatacattggtttgacctggaaagccggtacattttggaggaggaggggtttggccagtggtggcaggagggaggttgtggaagccagggttcttgttacatatgtgaagcctgtaatatgcttcagaaagaatagatggcatatgtacctcaaaaggtaaatgaccttaaacggtgtcagactcttagttaaatctctcccggatcagagaaagacctggaaagggaaggagattgtccacagaacacaaatttccctcgcaaaagatagctttgcacaggaccattccaaaatatgtcagaaatatattttggggtaaaatactttgatcgcccttagggctgctacctgtcatgtgatgctataccagaatcaggttggaatttgttttgagacaggttctcactttgttgctcagattggagtacagtggctgtgatcacggctcactgcagcctcgatctccttgatgtgggaggctcaagtgatcctcccacatcagcctcccaaatagctgggactacaggcggccaccaccacactgggctaaatttttttaaagtagagacaagttctccccatgttgcccaggctggtctctaactcctggcctcaacctccttattctctaggattacaggcgccaggctagacctcacaggtctttagacttctacgcaccaggtacctggtagggggagggattatagtggcagaagagcagtaccagtggcccacaccacacaccctggcctcagctggctggggcacacaaaaccaggtgctaccgtcaacgactaggcccatagggtactgctgtcaaaacctgctgccaacaacttccacacactccccaaaacgctcggtaggcggtggtgcgcagctttcaatgcatccgccgccaggcgctcacaggcaagggagaaagaagccagacggagctcggagatgtggagggcagacgcaggcgcatttggaaaagggactggcggtgggaggcgcagagggaaaaaggaacgacacaatcgggcttcctagccgctggcggacccgatggggcgtcctgcgagggttcggcgagggttctgccaggatagtagcattgcgcccaaggagtgagaggcacccggggctactggagccagaccctcaacccgccctagtgggaggcgaagaacaacgaaagcctcgtattcccatttctctaatggctaatgacattaaaggttttcatatggttatttgccatctgcatatcttcagtgaagtgtctgtttatgtcttctgactattttctaattggatttttaaaaataattgatttttgagttatttacatattctagatactggttgtatgccagatatatggcttgtaaatattttctcctaggtaaaccttttcagtatcgttacagggtctttcacaaagcaaaagttttaaatttatggagtctaattcatcaacatttctttttaccggtcttgccactaatgtcaatttaagaaccttttgcctagccttagacaatagtttgttgttttttaaaaccgttttgtaattttactcgtcacagttatatctagccacttaatttttatgtaagggttatttttggcgggggggaatctatagatgtcctgtcttttcagtatcatttgtggaaaagattatctgtcctgcattaaactgcttttggactttcgtctaaaatcagttggaccggtttttgttggcaaagttttgcctgaagcttattccaacaggtgagaaaaagtccacagtttaacagttcctccccaacctgtaaccccgccttgaacttctggactagcccctcgattgttgtagatgccaagcggacctcgcgccgctctgcgttgggccagcccctcacagctggtttcttaccacgtattgcgcaagcggaatctatgcctgttacccacactccctgcgcccccgcaccccgctcctgtgcgcaagtcggaatataaaaccgcggaggagtgagctcttggggtgtccagttggttgccgcggcagtctctccgagcagcgcatttgtcttctaggctgcttggttcgtgcctccgagaaaggtaagtctttctttcgcttttttaggggtacttgaaaacaacaagtgtcagacaaagcagcagatgctgttgcgcagtagaagtttatgggcgagttgtccctgaaactggaaccaggtctttcttggcgcgattacgcaagaaccacccgcagccctgcgggctcctggcaggtcctgcaactgcactttggatagtcccgttgggaagctagcactttttaatatagaagaacgaggtttgataagtgtgcgagcttaaaggttgacacagtgtccactattacagctgcgtaggtagctagtgttcaggaagtaatagtggagtcatgtagtgtgaaagtaagattgaaatgggcgaggagggtagcagccgccacagccaccagagagaaacctgaccttgcaggtgcgtggtgatgtccatgagccaggctggtgccgcaacagcagcggcgggaccttgagctccgcacggccgctgggtttggacgccctctggttcctggaaactttcacctccccctcagcctgaggccaggtggcctgggaaggtggaaggagtgtggaggggagtgggggggggggtccactgcctgagaatgagaattctcttcacatctggaaacttcagttatcacgtgtgtcctttaccaattttttttcttttattttctttttgatagagacggcggtctccctatgttacccaggctagtcttgaactcctgtgcttaagcgatcctcccaccttgacttcccaaagtgctggaattacaggcatgagccaatgcgcccggctgctttaccaattttctatgaatgaatttgtacatacatcccctagagcaggaagtaatgtaaaacagaataattagtaatgcacatttcctaatgtgggatgttggtggccaagagatat

SEQ ID NO: 4480 - DNA, 6000 bp, Homo sapiens
atccttccctgttttcatgacctctgcagtgtgacactgtagtccttctcactgaagactaccaaggtcaaagctattttcaccccactcaaagtctaagctggccacatgacttgttttggctagtagaaagtggtgaaagtgacagtagatcagttctgagcctaggccttaagcggcttctcctgttatcacttgctctttcatttgtcattgccaggggaataagccctggctggcctgctggagaggagaggtatagcagagccaaataacctcacttatttcagccagtatctagacagcaaggtaaactccagttatgaaagcaaattaagacatattgcagatacacctagccaaccacccgagaaacttactcttgtgtgacactgaggtttgctgtttggcttttatgctacaatgttagcaatagataggtgatgatctttaactcattttcttatatcccatatatatcaacctatcatgtgtcctataatttctacctacaaaacatatctcaaatctttcaatcttttttccatatgcattgctctactgtaatctaagcaccatcatcacctcacctgaaatgaactgccagtttccctacttcctttctagacacttataatccattcttcaaataccagtgggagtgatttttttccaaaacataaatcagatccctcagtcattcccctgtttaaagccctgaatatcttcccattgctctcagaactcaatccaaactcctcaccatgacctgcaggccccagctgatctgcctaatatcaggatgaaaaagcagcttttataataccctctaaaccagtttcttcaaagaaatgtggaatcagtttctatttagaaatctctgtagaaaggtgttttgctattttaattcatggaatattattttggtaaatacaccaaagtatgtcaaaataacagtttcttaggcagacacagaaattggacataaagatctgattttaccaaaagacaaaaaattaaggtggggaaggaataaaaggagatgatgaaaagagaagtaacaatacattggggatccggtgtatcacactgaaaccacagaaagataaagttagacctagaaaagaggtctacatttgaggatataggagcaaagaggtcaaaatcatgctttgaaaggatgtggacatctgatctttaacttcacaccaatggcagaataagaaaaaaatgggttacttctgaggtaggaagtagtagctagaagattagacactctcaaacttcctgagaattgacattaataagcattacttaatattcatatggaatacttctggctaaagaatgcttttgcatattttccctgtcttatacctgaggagctcagggttcaatgaaatttaatacacagaaattagttttcatcctgaatttctccaagcgtactaatttgatgattcatatggcctacgggtttgtgagcattcctagaatgaattgccatgatttgtacttttaaaagaaatatccttcaagaagctgacttctaggatctatacgttgaagcataaaggataccacagacgcaaaacaatgcaaaaagtgctaaaaccagttgctgttcttaaacaatgtggttatagccccagaacaccaaaggcagcacagggatatctaagaaaggcacttggtgcagacacgggcaccagcaagaccggattctcatctcccaggaggtgaacttaaatgcagtttgttaatgctctctctctcaactagtatacgctttctttccgacaaagacttctctttcagcctcttgtaatgggaggggagaggtgaaaattttaaaaagctgctgggtcttgatattagtggaatttctctccaatgaactgacagtgtacaggtatgacaacatggcctgtagctcttctcgaagagaagagactgctgagaaaataaaatccaacaaaaatgctgcaggagaaagtctttctaacatgctcattcctctgccttctctcactctgcatctttccctaagaatgccacctccatcttttttctatgtcaacactgagcttatccttcagatgctaactcattcagcctccctattaggctctcaaatgattacaggccccggggatcttctcctttaataaataagttcaaatcacaatcagaattcattttctctgtatccctgaaacatcacacacacacacacacacacacacacacacacggtgtgcattatctgaatgaattgtaccagaaaccagaaacccaccggtaatccttttttatgccttttatttccccaacacatttaccagtcccagagttagattaggcctcctctgaagtatctcttgaatttcactattcgtatccatccctcagtgtacctgcttacaacagctatctccacttgtttgatctgtgcctccctttaatttgtcttgcccaaatctcctattccagtatattatccacaatgcattctaagtcgtcctactaaaatgcaaatcagatcatgtcactcctctggataaaatatttcagtgattccccttttctcatgacaagggtctggatttctgtaaatggtttatgatgttcttttttttttttttttttttttgagatggagtctcgctctgtcacccaggctaaagtgcagtggcacgatctcagctcactgcaagttccgcctcctgggttcacgccattctcctgcctcagcctcccgagtagctagggctacgggtgcccaccaccacacccggataattttttgtatttttagtagagacggggtttcaccgtgttagccaggatggtttcgatctcctgacctcgtgatctgcccacctcggcctcccaaagggccgggattacaggcgtgagccactgtgcctggcctagtttatgatgttctacacaatctggcctatgattatctctagtccagtttcatctctagctattttcccaccttatgttagcctctagacttttataaataacacaagctgtgcctgaacactcttctacctgccctttgactggctaacttttatatatttatcccatctcagcttagatacttcctttttctcctggaggttcctaatgccagtatcaatgttcttcctgggtggtaccacagcatcctacggtgacgaggaggaggtggcctagatccttccttttcttggtaaagggtggaagcagtgtggatactttacttggtgtgttctgatatccatgtgtcactaggcacttgttctttgtgtcttcacatctcctcctgttgcattttaaagcactttcatagtatatggttttgcctaataaagcattctcatagcaaaaaaaaaagtatggtattgtgcaaataagtgctcactccaaattagtggtatatttattgaagtttaatattgtgtttgtgatacagaagtatttgctttaattctaaataaaaattttatgcttttattgctggtttaagaagatttggattatccttgtactttgaggagaagtttcttatttgaaatattttggaaacaggtcttttaatgtggaaagatagatattaatctcctcttctattactctccaagatccaacaaaagtgattataccccccaaaatatgatggtagtatcttatactaccatcattttataggcatagggctcttagctgcaaataatggaactaactctaataaagcagaacgcaaatattgtaaatattagagagctaacaatctctgggatggctaaaggatggagcttggaggctacccagccagtaacaatattccgggctccactgttgaatggagacactacaactgccttggatgggcagagatattatggatgctaagccccaggtgctaccattaggacttctaccactgtccctaacgggtggagcccatcacatgcctatgccctcactgtaaggaaatgaagctactgttgtatatcttgggaagcacttggattaattgttatacagttttgttgaagaagacccctagggtaagtagccataactgcacactaaatttaaaattgttaatgagtttctcaaaaaaaatgttaaggttgttagctggtatagtatatatcttgcctgttttccaaggacttctttgggcagtaccttgtctgtgctggcaagcaactgagacttaatgaaagagtattggagatatgaatgaattgatgctgtatactctcagagtgccaaacatataccaatggacaagaaggtgaggcagagagcagacaggcattagtgacaagcaaagatatgcagaatttcattctcagcaaatcaaaagtcctcaacctggttggaagaatattggcactgaatggtatcaataaggttgctagagagggttagaggtgcacaatgtgcttccataacattttatacttctccaatcttagcactaatcaaacatggttgaatactttgtttactataactcttacagagttataagatctgtgaagacagggacagggacaatacccatctctgtctggttcataggtggtatgtaatagatatttttaaaaataagtgagttaatgaatgagggtgagaatgaaggcacagaggtattagggggaggtgggccccagagaatggtgccaaggtccagtggggtgactgggatcagctcaggcctgacgctggccactcccacctagctcctttctttctaatctgttctcattctccttgggaaggattgaggtctctggaaaacagccaaacaactgttatgggaacagcaagcccaaataaagccaagcatcagggggatctgagagctgaaagcaacttctgttccccctccctcagctgaaggggtggggaagggctcccaaagccataactccttttaagggatttagaaggcataaaaaggcccctggctgagaacttccttcttcattctgcagttggtgccagaactctggatcctgaactggaagaaaatgtctatccagtaagtatctctgggagacttttttaaaacaccttcatggattcatgataaatgtgctatttcaagggctcctgaagagaaggcattgattaatgacctgtttaggaaagacccttgaattttggtggggaaattttttcctgcttatgtattaaagcaactagctagaattcaggtccaaattatggggggtttgtgtgacttagcccggggtttggaagcagtcttgagtatggggatttcagacagacttgggctccactccttgcccagtcatttcctagtgtgtgactttggacaaattacctaactttttaagtctagcttttcctgtatatagaaagatgtcacaatagcttttactccattatgttactgtgagatttaaaagagataataccatgcaaagttctttttatggtatgtaggacatagtaattgtttagtaaaaggtaattattataattgagtctggtcagagattccactctttgaagttacaacatgaaactgaacagaggatgtagaaagtaaacaaaaatatagaacctgaatctcctggtctgactatgatgaaaaagtactgtaggtcttggggattggtagagaaatgagatgatggggaaaaaattatggtataatatgagtgaataatgaaagatgaggtacctgacccaaaaagctgtcatctctcaacccctaggaaggagataaatgggtctctccttgaggcaagaaaatcaatgatgctgtgagctgagcatgttgatagggtgggagaatactgtgggaaggaccctgtttaggaacaaatttcaggaagtgaactgatggcagtaggattgattgatttgtcttccgaagtaaggaaaaactgcagaggacaggattaagttcactgtaaccattgacattaaaagagaggtcatgtctcttgacatcag

SEQ ID NO: 4481 - DNA, 6000 bp, Homo sapiens
aagaccccctctcgcctactttacaataacatttataaccaaactatacattacaacaatatagaagacctttgttagtgtataattgtaatgttatttgagcaagtctcctacaatttaggaagaaatcctagaaagtattttgttgccgtcagccattaaattcattgcatctgtggtaacctgggctactcaaccacatggcaagtaaatgtagagattgaactgatgagaaggagctctttttgtagctatagaatccaaatgagatacttttgacaaaaaaatctgctttattattttatttgaaaaacacaagatggtatatattttagaaatataacttacaatgaagtggttctcaacttggagtaatcccctttccaatccacaggacatttaacaatgcctggagaaattctgggtatcacaactattggcatctactggatagaggccagggatgctgataaacattttccaaggcacacagaagtccccatgctccacacacacacacacacacacacacacacacacaaattacctgcaccaaaatgtcaaaagggcctagattgagaaacacttctgtagtggaagattcccctccaccaacaaatttctggaactctatatttctcaccctgacctgaaattcatcagtatacgtcagttttagttggcaaggtactccaagcttaaggcagcttaattcaaatagagaatcaattatggaccaagttagagcgctattattcagaggtacagtttataagggcttcctgactgcctccttcaggaaatacaaagtgatctcattagctctttccattaggtcctgggacccgtcttggctaaaacttctcatgctcacacagtaataacatggtctgtcgtggggtgggggaggggggaggggggagggatagcattaggagatatacctaatgtaaataatgagttaatgggtgcagcacaccaacatggcacatgtatacatatgtaacaaacctgcgcgttgtgcacatgtaccctagatctcaaagtattaaaacaaaataacatgaaagatgaagctggctttactcattcactactaataaacaaatgtaaacttctatttttttccattctaacaatcacagttacactgttgaataaaaatcgagtttattaaagtaagcaatcttaagaagcttccttatataacattactctttccaacatccttagggattcaaaatacaggtcatagggcatgaaaggcaggagtggaatcaatctagataatgaaataatctgcaatcataatcaggctccacctttctccttttatactaactccctactgattattacatttcttgaaatactagaagttgagcttttaaagcgaaaaaaggtacatcattataaagaaataataattaattccaatgtcacttccttaaaattctaaccaaaggagtaacccattatacccactccactatttgcctctaaaatgttctaaacaatgctattactaattcttctatttcaaaaaattctactaaggaactatttgctatttaagcttttttttctcatttggttgttgtttggttttgtttcgattttccctcaaaaagagccaagacaatccgaatttaagtctctgtttgtaagaattccaggacttcaaaagcaaatattagaaaccacgtaaaagcctgtcagatgttttgcccttagaaaggtttagggaataggaagtcataaaagcttttaaattcattttctttagtcagaagactagaagtataagggtctggagaggctgccctacctgacattcttgcacttgctgtaaataatagtgacgtacctgtaaatactttcccccataatccagacatctatacactaagttcagtcattgctttctttagatgggttctccaagagttaagtgtgatctgtgaatggtagttgagataaaaaactagaaataaggaaaggaaactgtctttaaaagaagtggctccagtttccgtttacaagcctgaagggttgttgtacatattaaaactgcagcatagctccatccctggtcaaagaaaaccctcctcctaccacccccaacccacccccgtggacactgaagatgtcagatctctgggaaacagcagtcagaaaaggatgcttttcatagcttgtactagaaaacactggcacccccatccctgcttaaaatagcactaaactgagtcacaatgcaggaagctataccttctgtgtctcttcaatagaatctagctcgtttctactgaaatgctaaataatactgcatagctttgcccatgtatgtgacatgtcaagtcttctaatcccccgtttgccctagataattttacgctttatccatcagcgtgccacgcaagatagaaaaatgcagttaacaagatgacagtgttacttaggtatttggcatcgatattagtgagagtctgtcatttcacaattatttccctagcataccagacggtaaagaaaatgttttcattcatccgcaaatgactaacattttattgatgtttcaaaatgcggttgaaactattgcactctcagtttccgagtcggttttgagagttaaggcagaatactaacatcagtgactcctgacgcaaatgtctccgttagctgcccagccttggagtgccagttcagcagggaggtgttgctagttaaggattcgtctgtaagccagtctgggtggtcacaggtgatgggaacccttccctttccccatatatccccgtgcatggcgataaaaatcactctgaacactgctaccaccaagcaaaacgactccctgcctgcctcgtaaagagctcagtctgcggaggcagccggatgctgacccctgcagagagtcttgcttcggtgcgctttgccaaatgaccctgctagcattatggaaaacgagttacggacgtgtgaggttttgcttcatttcctccaaaagaagaactgggatctggcaaagaatatcttcttcaaacactgctaaagggggatggggtggaggaagggaaaaagtgtgtgagggggagggagcttattttttaattacttattttccattttcacttccccgctctgcttcccaaactcctcgctgaacaagattgattggtgtaactgctaacgactcagcctcggttctcgcattgatttgcaaatggcccggaaaagcttaaggatcttgaatctggaaatgagttcaagaaggaaagaagaaaaaagagtaggggtggccccacgcctagtatctccttctgccttgggccagggcagggctgaaaacagcccggcgagctgcggaggggctgctgcgtggggaagcggaggttaccgctctgcaccgcggaggagcaagcctgttaacgcggtgtggaggctgttaagaaatacaaccctgcgactcgttaaaccccttaactctgccctgccttgactcggatgcgccgattattcggcctgataggctcaaatgggttaaactgcctcttacataactggaccgcctgggctctacacaattaaaacacttgattgcagtcttttcccgactctacatcccagcatgacccgccccgtccctcccagcgcgcctgcgtgccgcgcgtgcacaggcccccgcgcgcacgacacgctctctatcacacacacactccatgttgaccataaacaatcccctactcacacacacaacttagtgtcaacacccacagataaaagaggggcgtcctgcaatccatacgggccgaccgccacaaacacgcaagctgctctgccgcaaggccttgcacctcctcgtgtccccgcaaaaaagcagcgccccgccaccgtccctacctattcccgagaaaacgcagagagaactagttggctgctcgctaactgcagcgtagccacccaggcaagattagaagaaaataaacaaaaaaacaactcacagtcgccggcgtcatgatggcgccgaccacaacttggaggacttcaaacttacggtgcctcgagaggtaaaacgcaccggtgagggaaggcaaagcgcccctcagctctcttcaccccagccctgacacggagacttttctagcaaagaatccctctagcgcttacgacagtaaggagagccttcattctaaggtgcctctctttcccccttagtttgcataattgtgatacagttcctcctattttttttttcgttgtcttgcttttcttttttttttcttgctatcttttttctttctttttttattatttttttaatccccctcccttctccatccccagtcccctggcggggttgctaaggaaacggccgcttggcaacgcgcgcgagcccgggagccggcggccggcgcagcgctccgcgctgcttctgctgctgctgttgctgttgctgctgctgctgctgggattgcagccgccgccgccgccgctcgccctgcctcctcccccgccgccgcgcctcctccctcactcgccggcgcgctcgcctcctcgctagatggtgtgcgagccgcccgagaattagacacactccggacgcggccaaaagcaaccgagaggaggtgtagtgtggtgccagggggagggaggggagggagggagggaaagcgaagaggaggaggggaggcaaaaacaccgaaaaacaaaaagagagaaacaacacccaacaactggggtggggggaagaaagaaagaaaagaaacccacccacccaccaaaaaaaaaaaaaaaaaaaaaaaaaaaaaaaaatcctgtggcgcgccgcctggttcccgggaagactcgccagcaccagggggtgggggagtgcgagctgaaagctgctggagagtgagcagccctagcagggatggacatgatgctgttggtgcagggtgcttgttgctcgaaccagtggctggcggcggtgctcctcagcctgtgctgcctgctaccctcctgcctcccggctggacagagtgtggacttcccctgggcggccgtggacaacatgatggtcagaaaaggggacacggcggtgcttaggtaggaagaacggcgtgcttttcgtacttgtttcggtctatctttctgtctctctttgaaccctctttgccttctttataacacaagcaataatgctggtggtgctcatcatggaaagaccacatcccaagaattccaggtgcagattcttcccggagccccggcccgtttatgctggggcaggtagcaagctggactcgtgatgctaaagcactttgccggaacgccaagtagcctggggatgagtgaactgtcaggtttagaaggaggggcaggtgccactttgaaactcaatgcacaaggtctctgttttactgtcatggggtactcctggagagtctgacaagtttatcaggtttgtttctattttactccagcataagcgactctttcaaactgctgttctctgctcccatttattttccctctcacttggacacttaggctcgatttcttgctctttatctttctttccttttaccgctttctgttttctttcttttctccttcctcattctcttataccattttccccacctccttgtaactctttttccctccaatatctcttttcataccttttctattttctgttttttccctcctttttaaaatttcttctcatattttctcatttttatctccacgactctaatttctgttcctcacatttaatcccctttcctcctctcttttacccttttttctttttgtctattttttttattcctccttaatgtccctatcctgtgccctgtcttccctcttttgactcccatttctcatccctctccccataccgtttcccacccctgtggcacacacaggcatggtcactgttcccctccagtaccatttactcaccctcataaatcttatttccataaacatactaactcacatactctcaca

SEQ ID NO: 4482 - DNA, 6000 bp, Homo sapiens
gaaaagagtggttttcttaatatctagtctatttcccagaaatgaagagcttgtccctgctttcactttcaatttggggcagttttggtagtttgagtctttctacgaatttgtccattatgtctaatttaatttgttggcatacagttgttgatagcattaccttaaaatcttttttatttttgtaaggtcagaagtaatgtcccctttttcattcttgattttggtaatttgagtctcctgttcttctgctgggttttttgttttgttttggccagtctaacaaaacaggttttttttgccaattttgttgatctcttctaagaacagcttttgattttattgattttctctacttttgtcttatattctctatctcattaatttctactctttatttccaaaattctttattattttcttctttctgctagctttgggtttagtttgctcttcattcaccagcgtcttaaggtaaaagattaggttattgatttgagttctaatattttcttactaatttctctagagtgtatcatatatgtaatttatgagaatgtatatcacatttatgctaaatcaattccaatgagaaaatttttactcttataaatctaaaaatactagttttctcacttttttgatactattaaatacgttaaatatatgttcaaacaatataatacattgttataattaattcacataattttatgtcttttaaagaagctgaaggggaaggtataaatgtatagagcttgttatgttaacttacagtttcaggttctcttaatgtattcctgggggttcaagttaacatctgctgtcatttctttattccaatgcagcttcgctcctactgtcctctcttgtcctgttcttaagtatatcacgtttctatatgttatgagcctgaaacacaattatatacatattgctttatacaactgtcttttaaaaattagttaaaaagagaaataagaagaaatatgcatttatacagtcttttataactatataattatcttactggtgctctttgtttgtccatgtggatgtgtattgccatctggagtcatctgctttctgcctgaaaaccttcttttattaatagtatttcttgtaaagtcagtcatctagtagtaaattttatttatgtttccaggcttgaatctccccccggcccacactctttttcaaataaagtcagtttctgtgggaaaagctttggagctctgattttatggactgcctctctctctctggaaaatatctctgagccatgaccccttcgaatgggcagaggtggtagcttctgctctttgccagttgcccctcccaacacggaaaaaccaccctacaagtgaaccagagtgagggtgacaggccagggtttctcattctgccattcctgagctaaagctgaaatcttcttgcaaaaattataactgagaatattattatgtgaaagagatctgacctgactctatcttacttctaacctccaagctgtccttgttcatccctgagcataggccaaactgacattggaaggaatttagtcagccttttcccaaaataaaaccccttcttccctgagaactagactaactttgcaagactaacaaatcagccatgagattagaaactgtggtctgagagtcatgcagctagaggccacaagattccagacctctccaattgccatccaggtcaataaactggctcatctggtcttgtggcccccagccaggaaccaactcatgcaagaggacaactttgatgccctgtgatttcatccctaacccagccaatcagcactccccactccccaacctcctacccaccaaattatcctcagaaacccccatacccacattatcagggagaatcttttgagtaataataaaacttgagaatcccatacagccagctctgcgtgaattaaacgctttctctactgcaattcccctgtcttgataaatcagctctacctaggcaacaggcaaggagaacctgttgggcagttatggagcctctgctctatgagtgggactgggaaagtttgggagcccttgacttctggtcacactcaccagaaatttagtctttacaactcactattggaggggatgaaaaattctggtggactggcactcctgataggatatgtcatccctgctcagaatgtgagagaagaggcagccccaccttctttccatagcccccagtagtggaccttttgtcaacccgaactgaaaatgaggatgaagaggcccaagggtcaagtgccacagattcttgttattcttaccggagttataggagctctccttgaatagatgtttcattgtgatgtatgcttcctgtggggaaaagcaagagagatcagattgtcactgtgtctgtgtagaaagaagtagacatgggagactccattttgttatgtactaagaaaaattcttctgccttgagattctgtgaccttacccccaaccccgtgctctctgaaacatgtgctgtgtcaaactcagggttaaatggattaagggcggtgcaagatgtgctttgttaaacagatgcttgaaggcagcacgctccttaagagtcatcaccactccctaatctcaagtacccagggacacaaaaactgtggaaggcctcagggacctctgcctaggaaagccaggtattgtccaaggtttccccccatgtgatagtctgaaatatggccttgtgggaagggaaagacctgaccgtcccccagcccgacacccgtaaagggtctgtgctgaggaggattagtataagaggaaggcatgcctcttgcagttgagacaagaggaaggcatctgtctcctgcccgtccctgggcaatggaatgtctcggtataaaacccgattgtatgttccatctactgagatagggaaaaaccaccttaaggctggaggtgggacatgcgggcagcaatactgctttgtaaagcattgagatgtttatgtgtatgcgtatctaaaagcacagcacttaatcctttaccttgtctatgatgcaaagacctttgttcacgtgtttgtctgctgaccctctccccacaattgtcttgtgaccctgacacatccccctctcggagaaacacccacgaatgatcaataaatactaagggaactcagaggctggcgggatcctccatatgctgaacgctggttccccggctccccttatttctttctctctactttgtctctgtgtctttttctttcctaagtctctcgttccaccttacgagaaacacccacaggtgtggaggggcaacccacccctacacttccaggacaatctgcagagattttaaatggttcaaataattttgacagatgtaagaatgttatgctctaaaaagtaaaagactttaaagtagttttaataataaaggagctacagtgttaaggaaggatgatagaaagagtttagataaaattattttacaaagtatgaatgagaaaagacactgtatctgcaatttatatacatctaatatataattttaatgtgtaagtgagaaatgcttggccaggcctggtggctcacacttgtaatcccagcactttgggaggccaaggtgggtggatcatctgaggtcgggagttcgagaccagcctgaccaccatggagaaaccccatctctactaaaaatacaaaattagccaggatagtggtacatgcctgtagtcccagctacttgggaggctgaggcaggagaattgattgaacccaggaggcggaggttgcagtgagccgagatcgtgccactgcactccagcctgggcaacaagagtgaaactccatctcaaaaaaaaaaaaaaaaaaaaagaaaaagaaaaagaaaaaaaaagaaatgctcacacaaggttgggtctggtggctcatgcctataatcccagcaatttgggaggccgaggcagggggatcatttgaaggaaggagttcaagaccaacctaagcaacaaagtgaaaccacatcactataaatatatttttaaatgaaatgttcactcaggctttttactattttatttgcttttgctgtaaaatagagataatgccacttattctgtatgctagaagtcattactgaattagacataaaacacaaacagctcttagaaaacaatctataaaaataaaatcacactataataaatttaaaaataaaaaacctataaataaaatatttctacaatttttcacttagtaaataagcagcatagtgaagtggttcaagaagagggtatgggatcatgagtgcttgggttcagattagttacagtgttatgattttagacaactaataaagtctttctgtgctcagtttctataaaaccatgaggaaatattatgagttttcagttgtgcgattcatgtaaagccatcagtactgagcctagaacatgagtacaacacatggagccccctcctggctgtgtgctgggcattaagtgccaggggttaggtgttcatgagtgtgttaaacatgtcctttccttatgtactgcacctctcaaagaataggcagctccattgagagtgtgtctattattttaggaaattgtagctgaaaattaacatgatgcctcctcattctaggtttctcaaattgactcaatccatgagacatgtatcattgtattcaaaacctaatgggcattttgttagacaacaaatggtctctaagatttccaacaacaacaaaaaaaatttgaagcttctggttgagaaatctttaaaccctcccactggcacactccactaattccatttatggtagtggagtcagtgatttgaacgaagtactttcagtttcatattactctaaatccattacaaatctgcttagcttctaaatatttcatcaatgaggaaatcccagccctacaacttcggaacagtgaaatattagtccagggatccagtgagagacacagaagtgctagaagccagtgctcgtgaactaaggagaaaaagaacaggtaagaacttttactacttctcatcaagcagctttctctctagctccaaaggatctcagctcagtgatatggaacctataaggttgtggcagggatgggaaggaatttataaaggtcagttcattttcttaaacatcatcagaaccaaattaggctgcagatgagcctgaagtgggacgcaggtcagatgaaatcctggtgttatcagggacagcatggccttaagtgccactacagtgcttgtgttgaattaggcaccagtagacaggggctaaactgagcatttgaaatgtactaggatagtctttctctttgttgacattatctatgttgactagggatatgattacatttccatcgtcagtgatggactgaatcctgcttctatgcagctaagaaatggaagagttacaaacgggttcttttcatggaaggaaagaacagcaaatgagaagcagagtaagcagcccactgacacggttaaagacaaagaaaaaactgaaactcagcctgaaagatgaagattcatgaaaacagtatactttttattacacttgtgaactttgtttcagaatggattactttctttagaaatagtccagactcactaatttcctagtgcccactgatccctgtcccttagaagtgaaattcaaccccactgcttcactgaagtgcttccaattttgtcttcttttagtagagagcagggccaaaagtgtttcctctttaattctcctgtaatgcatctctacagaaaatatctttgcttactttaacctctccatgcactcagactactttgatcctgccttctgcaaagtcttcccctgaatgccttgtcaagacactagcctcattcatcacctctggtctgacagctcctctctctctctctctctctctctctctctctctcacacacacacacacacacacacacacacacacacacacacattcccagcc

SEQ ID NO: 4483 - DNA, 6000 bp, Homo sapiens
ttatctttgttgagtgctttaggttaacaaatacagatttcctttagttcttactataaccttgaaaggcaaatgttattatctatggataataaaaggaagatagtgagattaatctatttgcccaagatcatccgttaggttgccaagttatgacctcaacttgtgtttcataactccaaatccactacatagactctattatcaaggactggaataatcagtcttaaagtgggttgtcagacatatcaaaagcaaaacaaagataagattgtcaagatgaacacaaatataatatacttagttgaaaaaaaggatacattaaaggattttaaactacttagaaagtcttactttcttgtattccatatagggagctccatttagttataaagaattgctgccacagcatggatttgatctttgatctgatttgttcaagattttgggaggccaagcagtgattgcaaattcttatgaaaatctcttgttctttcctcttccaaggcattatgaagccagaaggaagctcctctgatgtgtgcactccagaagtctttcactcttttgtcaatatggttttgtcacactctcttgagtctttctatgcatttgtcctcttcgcgcaggcagcattaaccagggtgacctcagcaccatagtaaattacattctattgtagcacctctaccagcaccgcaagcacatagcctccacctccatccagcctctcagggagccgaaagcagtttctatatactaatccaccaaaaaaaaaatcatacttcgtgatcttctgtgtctttaatattttatacgaacttattattgatatgtatttaaacatggacaaaaattattactaaaattaaaaaggaaataataatgaatggatgggagagttcccatgataggaagaaagtgattaataccactagaaatagcataagtcagctcaacaggaaaagcttgctcatcagaacaaggaactaaaaagggcacaagacatgcatcctaatttcgtttttattgtgacctttcaataaagatttcaaagtttattccaaagtatactttcagatacaaagtcccctgggatgttgcttggaatggtctctaaatgctgtcccatatttataagacgatgaagtagaaggaaattttttttttcaactcaacattttaggaatttgttttggctttctagttctcagtacttgaatgaactcgaatgaactccttataagtccataagctgggcatattctcttgactgagggcctttgcaaaaggggcaaagatttcttaaaaccctgcttcctcacactatatctgttatttctcagcccccgctcatccttaaagtgtcctacttcctaaatttccaaggctggatgagatgcccttcccagttttgccatggcaccatcttgtcactcctaccattgaagatgttatataattgtaacattgaaaatgcctatttacacccgtctaccacctttgatctcaggagctaggtcttcttcatcaacttaggtttagttccaagcacaaaacccaccacataagctcaggtgtgagctaagtacataagctaccctccagtatggccccaatttaccataacctcactgtattcccaatttctagagctctcaaaataaaggacacaagtttagaaactagtgcagaagggagtcactgaattagaaagaacatgcacacttgtctgaatttaccctgttctctctgagggactggacaccacatggcccctgtgttcatcaagtttctcacctatgataatcaccctggaatgaagttactgcctttggctcacagggcaattacaatgtttagcatagtgaaggaagggccagaaacttagaaaaaagggctcttttagctaataaacaagtattcatctttacccttaaactatacataattcacaaagattcagttgtccctggagctattttatggttccccgatataaacgatagattttattgttgagaagaaaaaaagcagctgatttcctagaattgcttctattttgaaataaccctgctctactttcactttcattgtcaccagtattcacacacacacacacacacacacgatcttactctcttctctcactgtttatttttttctctttcttttagagacagcgtggaacacagatataacgtgatattaattaaattgatttttcaagttagaatctcacataatgacttgctagtttgaagttgctcaatggttttagttaaacattacttaatctctttctctttttcctccttggacaaagggaataacaaacaccccatattttgaagcagtattgtgttgtttaaataatatatgtaaataatctggcctagaaagtaactgataaataagaaacgttattgttgttcactcaccaaacacagaggtattttagtcaagttgttgataatgacaggtgacagcgtgctggcagtcctcagagccctcgcttgctcttggcacctcctctgcctgggctcccactttggcggcatttgaggagcccttcagcccaccactgcactgtgggagcccctttctaggctggccaaggccagagccggctccctcagcttgcagggaggtgtggagggagaggcgccagcgggaaccgcggctgcgtgcggcgcttgcgggccagctggagttccgggtgggcgggcgtgggcttggcggcccagcactcggagcagccggccagccctgttggccctgggcaatgagggacttagcacccgggccagtggctgcggagagtgtactgggtcccccagcagtgccagcccaccggcgctgcgctctatttctcaccgagccttagctgcgttcccgcagggcagggctccggacctgcagcccgccatgcctgagcctcccacccactccatgggctcctgtgcggccccagcctccccgacaagcaccaccccctgctccatggcgcccagtcccatggaccacccaagggctgaggaatgcgagcgcacggcaggggactggcaggtagctccacctgcagcccctgtgcgggatccactaggtgaagccagttgggcttctgagtctagtggggacctggagagtctttatgtctagctcagggattgtaaatacaccaatcagcaccctgtgtttagctcaaggtttgtgagtgcaccaatggacactgtgtatctagctgctctggtggggccttggagaacctttatgtctagctcagggattgtaaacacaccaatcggcactctgtatctagctcagggattgtaaatacaccaatcggcactctgtatgtagctcaaggtttgtaaacacaccaatcagcaccctgtgtttagctcaaggtttgtgaatgcaccaatcgacactgtgtatctagctgctctggtggggccttggagaacctgtgtgtccaaactctgtatctaactaatgtgatggggaggtggagaacctttgtatcaagctcagggattgtaaacgcaccaatcagtgccctgacaaaacaggccactgggctctaccaatcagcaggatgtgggtggggctagataagagaataaaagcaggctgctggagccagcattggcaacccgctcgggtccctttccgcagtgtgggtgctttgttcttttgctctttgcaataaatcttgctactgctcactctgggtccacgctgcttttatgagctgtaacactcaccacgaagatctgcagtttcactcctgagcccagccagaccacgagcccactgggaggaacaaacaactccagatgcgcggccttaagagctgtaacactcaccgcgaaggtctgcagcttcactcctgagccagcaatactaccaacccaccaaaaggaagaaactccaaacacatccaaacatcagaagggacagaatccagacgcgccaccttaagagctgtaacactcaccgctagggtccgcggcttcattcttgaagtcagtgagaccgagaacccaccaattccggacacaataatatgggttttagaggaagacttgggttcaaaccttacttggtagctttgtaatattaacaagttgttaaatttcttggtaacattgtggtgaaattactgtagaatgcaagggggaagggtgcagtgattcaaacctgtaatcccagcactttgggaggacaaggcagaacaatcgcctgagaccaggagttggagaccagcctcacaacatagtaagacttcatatctcacacatacgcgcgcacacacacacacacacacacgctggtatgatgcctcatttgtagtcccacctattcagaaggctgaggcaaaaggataacttaagcccagaagtttgaggttagagtgaactatgattgtcattgcactccagcttggacaacagagcaagaacttgtctctaaaaaataaacaaatacaaaataagaatacaatggtatgatttatataaagaagttatcactgtgtctgtatcaagtgtgccataaatgagagttaccttcatcattatttattatttattaaatgttaagtgtcaggacctgggttaggtgctgataattcaaaagtatataagacatagatattccctcagggcacttaacagtgctcaagctaatattcaaggtaattggacctaagaaaatattatatgaggctttctcatccacatgcttctcaaactggcccacaaacatgagataaatagcactattttaaatgacccaatgaaggggtttttaaaacttaatatagcaagcagtctctaagatcttttccaatgataaagtggaaagttcctggttgagaaatcatgacaaaccctcttaccagcacagctgtcaacaattccttttatggtgaatgagtcactgctttagttgatactttgtttcatattagtgcatttctttgcagaggttacctctttttcttgtctctcgtcaggtctctgacattgacagagcctggacgttggaggaagccccaggacgttggaggggtaaagtaaaagtccacagttaccgtgagagaaaaaagagggagaaagcagtgcagccaaactcggaagaaaagagaggaggaaaaggactcgactttcacattggaacaaccttctttccagtgctaaaggatctctgatctgggtaagactggggcaggggtgggaaaatatttaccagggttcatcagttttatctaaattgaccattcccacaacaggccgcagctgagcctgctgtgggacacaagtccacatactatcctggccctatcaagtggctgcaggttccttagtgctctctgctcctgctgtgaactagtctccagcatagagagatgggaatgtttctaaattgttatttctttcttgacactatcttaaattaactttatcattattagtatctgcttaataaagttagggctccatcacattcattattgccacttgtagagctctaggtaaatgaaggtaggcaacttgggatctgcaaagagagggaacacgttattataattagggagcttatacagtctttgtgcagctacttttctgagtcagtcattgattgattcccattttaaggtggtttacatcatgctataaaatgaaacagaagtcttgccagaagtgtctgtgagccattgttgtaagagaaaatgggtcctgaccacagaaaaatagtttttttgccattgtcccctgaagggatgggaaacagataattagatataagccttcatcagagcaagtcagaagtaatcgactccatattataaacaaagcactctttattatagaagaaggaaagctgtaatgcttacagtctatgattgtttgttaaagaagttataaatgttatatcatgatcattttaagttacagggattgagacattcaaggcaaaaacacaaattaa

SEQ ID NO: 4484 - DNA, 6000 bp, Homo sapiens
attttgaaagtgtatacaagaagttttcaacatacctgagagcataactccaggcataaaattatctgttctaattccagtgtttgggttttcctacttttttgtctgaaaatatctttacttttagttttaatactaattaatttttacaatagttagaattttagttggattagtttttgtttatttttattcataaaaattttattagtatagatttggggagtacaaaggcagatttcttacatgcctgtattgtatagcagtggaatcttggcttttactgtatccatcacccatatagtgaacatcgtacctaataggtaacttttcaaccctctccccacttctacctacccatcttctgtagtctccaatgtctattatttatagaaaccaaattgaaatacattgctgctgcagctagggatggcccccaaaaatattgttgtgaaatgttctctgtggacagattttaaacagttaacaggtaagcaattttgtgtaaaggaagaagtggcctgaagtaaggctatatacagaatcttgagcagtggagaatggtttatgtagttggccttggcacaattgtaggatcagaaataaacaggtctgtaggtaaatctataggaataagtgcataaagtgtgtggatctttatgtcttaagtcaatgtcaaccagagtatataggttttagagagacactgaacaaaccaggtggctaaaatgacttatccagtagatttgagccaggctttatcctcagctacctagtgtttgcacagaacagatacggtagcagggatgaaatctttgcatggacccatcaacctgggcttcctctcaccaaggccaatctcactacacgttaaatattggcccaaagacaacaaaaattgacactgagccttcagtataataccacccttcaagaagaccaaccagaccactagatgtcaaggtgatcaaatcagtccttttgcaccttggaggagtctgtgatttttttttttttttactgaaattgacataaattctgggtatggatattcccctgttgagagtggttcagccagcacctattcgaggacttgcagtgtctgtttaaatgtcctaaaatcctactaaacatcagcttagagaaagttttgaaagttttactttacagtaaagaggcacaacaatgcgaatgtaaccatggaatccactagtccttatacatcatctaaaagctgccagcctaacaaaactggaatggccagtagagaccattgtggggttggggactgtcattcaatatgcagtatataattggataactaaaggatattatatgctagctggaatatatgagcctgggaaccaaagcgttaaagtaggagtattctccgttgaattatttgtgaatttgtgatccattgtctagtctgctggactagagggccagttctcagggtgaagttaagcagtttttctaccaggggtcatagtaaagttctactaaatctgaaactatagctgccacctggtcattttatgaatttcatgtttgtagacaagccagcaggcaattaaaaggattgatctactggcaagcttaaatgattatggtttctgtgaggaaatagtacataatggaagcagggaggagtatggctggcactcaaaggattccctgggatactcttggtgcttgcatggcctgttaagatgcactggaagtaactacagccttattaaagcacagaaataggtcttctggtttctcagaaatgaagaaatgtttctctccactgagaaggcaacctagacaaggagaactcctgatcaagtatgagcaaaacctagaatgggtaatagaggagaagatcttgaatatcagttaggatcacaaaatcagttgcagcaaagaggactatagcttagactttcctattgtgtgtgtgtgtgtgtgtgtgtatatatatatatttaaactaacgaccagccacaaaattgaagaagccattaaggaaaggttgatctttgcataagataggggcaatatggatgggatacccacaacatctgtgaaggccatctccctttatcactcaaccttgcacattccaatggcatctcactgcaaacatcagagatccttcatctaagcattttttctcagcccacacgtgggccaggtcaggagtgcaagggggttatgctttcaggaccagtctttatccagaaatgaaaggaagttggaagaaaagtaccccaggtttctaacccacccaagagggaaattggaggcagattttacattgtttcctagagttacctgaggagatctaactcctggttcccacaacaaaacctgctagatatgttcccagtcactggcttcattccgttccagttttcactttcccactgtcctaccccgtttcttatgagcaccttcaaaataaatatcccttgctcacaaatccttgtctaggaactaaagctccaaaaatactgcctaacagccactctgttcattgtaaaataaagatagaaaaaaaattgtcttgtaggattgaaaccaggataatatgagatatttagtgtccagatcttagaatccatttattaaaaagggacaataataatgatgattattatgatgattcactcaacaaacacaaaaggactacaataaagtgcttgggtttcagtcttaagatccatttattagtagctctgtgattttgggcaagttactaaatctccctgtgtcttagcttttgtaaaattgggagaaagcatttgttgggagaattaaaatagaataatccacacaaagtagtgaaacctgtccagggcattacaaatgtctaataaataatatccttgttatcattcatcatgtactaagtgccaaaaactttgtccttgcctgtgagttaaagttctcagctactgaacctactgcgaaagtaataaacttagtcctgtgtgagcagctctaacatttcacaacaatagacctcaaaaatcatatgagctcttcccctggcctactcccaaactggagatgaatgtcaacgtatttcaagctaggtttgaaataccacatactttgaacaactgtgaaagatctcaaatttctcttctagtaacaacaacaatggaagcagggaggagtatggctggcactgaaaggattctctgcagtttctaggaaacatgcagtttcaaagaagtcaggtcaaatacatccagcctatctacactaggtaacagttgggcaattccctttgtcatctggcttagtcactgaatttcctttttggtttctatttcctacagagaactttcaaaaatccccctttctgttattccatattttgtattcaaattgtctcctttttcgagcagggaaaatggggtgggaagaacaaaaaccccaggactgagtgaagaaaataaatgagaaatcaccacagtgaaagtaaaagacgagagttcgaactcagcaagttctcatcgaagcagctttcttttttcttttcttttctttttttttttttttttgagacagagtctcgctctgtcacccaggctgaagtgcagtggtgcagtctcggctcactgcaagctccgcctcccaggttcaagccattctcctgcctcagcctcccgagtagctgggaccacaggcgcccgccaccatgcccaggtaattttttgtatatttttagtagagacggggtttcatcgtgttagccaggatggtctagatctcctgacctcgtcatccacccgcctcggccacccaacatgctgggattacaggcgtgagccaccgtgcccagtccctcatggaagcagttttcttactagctctaaaatacctcttctcccgattttataatcaaggtaatgagaggtgacggcgtgctggcagcccttgcagccctccctcgctctcggtgcctcctctgcctgggcacccactctggcggcacttgaggagcccttcagccctccgctgcactgtgggagccccttcctgggctggccgaggccggagctggctccctcagcttgctgggaggtgtggagggagaggcaggggtgggaactggggctgcgcccggtgcttgagggccagcgcgagttctgggtgggcttgggctctgagggacctgcactcggagcggccccaggcagtgaggggcttagcacctgggccagcagctgctgtgctccacttcttgcagggccttagctgcctcccggtggggcagggctggggacctgcagcctgccatgcctgagcctcctcccctctcccgctccccacctcaccccgccatgggttcctgtgctgcctgagcctccccaacctgtgctgacccctgctccacagcaccctgtcccatccatggcccaaggaccgaggagtgccagtgcatggagcaggactggcaggcagctccacctgccgcccggtgcaagatccactgggtgaagccagctgggctcttgagtctagtgggaacttggagaatctttatgtctagctaagggattgtaaatacaccaatcagcactctgtatctatttaatctggtggggacttggagaatctttatgtctagctaagggattgtaaatgcaccaatcagcactctgtatctacctcaaggtttgtaaatgcaccaatcagcactctgtatctagctcaaggtttgtaaataggccaatccacactctgtatctagctaatctagtggggacatgaagaacttttgtgtccagctcagggattgtaaacacaccaatcagcaccctgtcaaaacagaccaatcagctctctgtaaaatggaccaatcggctctctgtaaaatggacccatcagcaggatgtgggtggggccagataagagaagtagccagcagtggcaacccactgaggtcaccctccaggctgtggaacctttgttctttcactctttgcaataaatcttgctgctgctcactctttgggtccacactgcctttatgagctgtaacactcactgggaatgtctgcagcttcactcctgaagccagcgagaccacgaacccaccaggaggaacaaacaactccagacgcgcagccttaagagctgtaacactcaccgcgaaggtctgcagcttcactcctgagccagccagaccacgaacccaccagaaggaagaaactccaaacacatccgaacatcagaaggagcaaactcctgacacgccacctttaagaaccgtgacactcaacgctagggtccgcggcttcattcttgaagtcagtgagaccaagaacccaccaattccggacacggtaagactggggcaagaggtggaagagatttgcaagattcatttggttttagaaacattctacaaaggataggatgcagcttatcctgatgtggtatatcagacctcagtaaagaataaattgtattcttatcagacaggcagcagaattcatcaagtaccagctgtgtctgcctcttgctgaattagacatcaatgtgtgtggtgactaaactaagagtttgaaatgccttcaaattatttttcttcctttgcaattttatgacttattcaggatcataatttccacttaagttaccttcgtccttcataaaatctgattaaactgactcgaacttcagcatgaaagtttcaaaaactatgatagctattattttcatgagaaagaacaatgaatatgatgcaatgtaagtagcttgcaaacattaaggacaagaaaaaaatgttgcccagagagaagtttcatgaaaacagtgatgtatttttagtcatagtcttgtactttgtttgaaagtagatttcttcctttagcaatagccctgacttaattcatgttggtttcttggcatctactcacttaactaaccccttttgtgttgggttctgcttctactactctattgcctttactattatgaatcacctaatttaac

SEQ ID NO: 4485 - DNA, 6000 bp, Homo sapiens
ctttttatattatttggtagagatggggtttcaccatgttggccaggctggtctcgaactcctgacctcaagtgacttgcctgccttcgcctcccaaagtgctgggattacagacatgagccaccgcacctggccttgttattcacattttactgcatgaaaactgaagtccagagggatgaagtggtttgcccaatgtcacatgtctagtacatgatcttggattggagctcaagcctatgggcttgcagggagttctcatttcagagtaccaactctatgctaatgtcagagctagcattttttcaccaaatctaaggtataaaatgcaccattgttttatgtaccactcaagatgaaatacaaactatgatatgccattgaatgaaggatgcactcaatatcagagatatgaaagtgttagacatagttttataagaagcataaattttatttggactgggcacagtggttcacacctataatcccagcactttgggagaatgaggtgggagaatcacttgagcccaggagttagagaccagcctggggaacatagtgagaccccatctctaaaaaaaattagaaaattatctgggtgtggtggcatgtgcctgtagtctcagctactcaggaggcagaggtgggagtatcgcttgagcccaggaggtcaaggctgcaattagccatgattgtaccactgcaccccagcctgggtgacagagcaagaccatgtctcaaaaaaaaaaaaaaaaaaaaaatcgaatatttgtcttggacctagatacagtctatttccttttgttaatatatctgaaaatatatagttcaatattttctctccacaaataaagtattagcttaacaaatatggtgcctcataaaccttttcttaagaactgctgtgagaaacatgtaaacagtgaaaaggtcatgttatcgtgttaagataataatgggcataagggatgtggcaacaccgggcaggaagtgatccatcccattgttgagggagaagaggcatgagtgacatttatgctcaggaaattgaggagtgacactgggacagaaatggcaaagcaggtattgaagcatcagaggaagtttgtcctggatcagtgattccaaaatgtagtctgggggccagtgctactctagaatgaccccccaccaaaagagtgttttcattggtttgtagcaaaatgagaaaagtaagaaaaaatattatttttcataaaactaaatttattcaagctgaaaatttatatttattttgatactttgtctttcctgtgctgtcattgagatatatatatatcttacaaatatatatatatctcacaaatatatatatatttgtgaaatcagttgtatttctatatataagcatcaaacaattagaaaataaaatttcaaaaatatggcatttataatagcatcaaaaatgtcaaacactgccagcatggtggctcacgcctgtaatcccaacactttggaaggccaagggtgtgaggattgcttgagcccaggagtttgagaccagcttgggcaacatagtgagatcccatctctacaaaaaataaaacaattagttggccgtggtgatatttacctgtgttctcagctacttaggaggctgaggtgggagaatcacttgcctgggtgacagagtgagaccctgtctaaaaaaagaaaaaaaaagtcaaatactaaggaacaaatagcaaatcatacacaaaatccctataaggaagctataagatacgaaaaagcaataaaaacacaaataaatgaagaaacaggccacactcaatattttaaagacgtaaattatttctaaatgatctatagattcaatgtaattccaataaaatcctaaagggtgtgtgcatgtgtgtgtgtgtgtgtgtgtgtgtgtgtgtgtgtgtatgtgtagaggtaaacgaccaagaataaccaaaaaagaagagcaaagtgagaagccttgctctactggatatcaagacattttatcaatctaaaatatttggaacaatgtggtatgggcacaaggaagtgctgatttccatcacagtcaggccagtaattacctttgggaagggagaggtctgttatctggaagcagcatatgggaagcttctgggtgctgctaaagtttcatttcttagctaggatgataattacacaggtatttgcctttcttgtaatttattaaactgcacatttaatgttttatatctttctctgtatgtgtaattttacaacaaaccttctccaagtcactggagatgtagatgtggggctggagtgagttggtggtgaggggctttcttccacactcttctatcttcatgcacatctatactgtcacatacgtacctatactctcagcactttgggaggctgaggcaggattgtttgtgcctaggagttcgagaccagcctggccaacatggtgagaactcgtttctaccaaaaatacaaaagttagcagggtgtggtggtgtgtgcctgtattcccaggtgcttgggaggctgaggtgggaggatcacctgagcctggaaggttgaggctgcagtaagctgagattgtgtcactgcactccatccagcctgggcaacagagtgagaccctgtctcaacataaataaataaataaaataaaataaagagaagctgctgtcaagcaagcctggatcttgccctctctctcgattttctatttcatgaggtaatagatttactttttagaaaagccactttgagatggggtttctattagttacagctacaaggaaccagactgaactaaataaatgtccagggcagtggggtttggaggaagttgtgtggggaacagattcaagaggaagtaggggtagaatcaatgggacgcaatcactgattggatgatgatggttagaaggggtaatgtccttaaaatggatgtactgttttcccagtctattagatggcatcatgtaccattaaggatgagatgcataatgatattaaagatgtcaaaatacaaaaaaagtgtcttagaatcaactaaagaaagtagtataagtgtatattttctttttttatttttgcaaatatgttactgttttattaagccataaagttttcaggtggttagttacacacagtaatgaacaactgaggggatgtttaatttttttctctagatcttgggcccttggtgttaactttatatacatgtatttactattgtgaactgtaaacttagagacctctattttttttttttttttttgagatggaatttcactcttgttgcccaggctggagtgcaatggtgcgatctcagctcactgcaacctctgcctcccgggttcaagcaattctcctgcctcagcctcccgagtagcttggattacaggcgcctgacaccgtgcccagctaattttatatttttagtagagacacggtttcaccgtgttgatcaggctggtcttgaactcctgacctcaagtgattggccaccctcgtcccctcaaagtgctgggattacaggtgtaagccgcagcgcctggctgagacctctatttctaagaggttgttgtttgtaaatatgaaagctgggtatgttcattttgttacctatactgatgagttaatttagtttctaatacatttaattttatttaattaattattttccagatacacagagcaaatagcttctaatagattttaaatttacaaaagtataacttttttttgcagtttttcttcttgggtgctattttattttcttctatcaatatgtgagtattttttgcaaatcagtactttgaaccaacaaataggaaatattagcttaacaaaaaagatattcacaatctttgtaagaaaaggttgcagtattattaatgctataatgacattatgtattaaatgtatgatatcactggggaagaactgagtaattctattacagctgcagggtagcatttgagaacttcatgacataggagcaggaataagacaggaggttcgaagcagcagagaggtttcgtattgattcagtttcaaatgaatcctgtagtaaattttccctcgtttgtggcaaaatgacaaaattaaagacaaagtagtgagtctttgtgtgaaactaaattattcaaactaaagatttatatattttttaaaacttttctattcgtatttttttgtgtgttttgtatctctttcccctccattcctttttaccaatttattcagaaatgatcactttcccattttgttaaaatttcctttttctatttctatgaattgataattatggccaatgattaatttcatttatttatttattttgagatacctaagctgaagtacagtggcacggtcatatttcactgaatcctctatctctgggacttaagttacccttttgccttgcctcagccccacctgaaactataggcaagtaccaccatgccatgctaatttttttacttttatttttagtagagaagaggttgccctatgttgcccaggctggtctcaaactcctgagttcaagtgatccttctgccttggcctcccaaagtattgggatttgagccaatgtgccaagccaacagatgcttaatttagagaaagtttttattttgcaagaaagaaaggcacaaaaacccaaaaccaacaccaactcttgttaatctcttcgtctacttcctacttgacacaggtccatgaaacccccagatccaggaacaacgctagcaggtgattcttaggattggttttttctttagaacctgttaattccactgtataaataacctccccgagataaccagaagcctcccctgcactgggcattgtgccaggggagggtgaggctggaaaccttggttggccccactgggcttcctccataaagctttctgcacctcattccacatcaggagcgtttttggagaaagctgcactctgttgagctccagggcgcagtggagggagggagtgaaggagctctctgtacccaaggaaagtgcagctgagactcagacaaggtctgtgagttgggggaatcctgttttcagcttaggtctgcttttggtctcagagatgtgtgaagtttaaacaaaaggcaaggggttttggagtctttgtaagactggacaggggtggggcagggatgtagagaaaaatgatggccaagatggtgaccttcatcttgctttctttagattacaatgaaccaactcagcttcctgctgtttctcatagcgaccaccagaggatggagtacaggtgagtcacgctgctagggacagcagttccttcagctggatgacttccgggatcctggtctctcccaggacacagagcatgtccttgagatgcacagcggctggcttgcatgtagactgagtgccgatttctggtctctggcggaatctggcctgtggcagtgaaggtattgcttgaggcatgtcctgggtccaggctctgtgcttttgtgtggccctgagggggctgtggcaagaactgtgtcaccttccagccactgcccactcctgtggccttggctgtgggatttccatgggaactacatggtctgctttgtgcctggagaatgttctctccacagttttcctctctacaacaagaataacaatgacattttaaaatttatatttttcttcacgtctaaaaattttttttttaaagaaaaggctgtttcgaaatatcttcttacttcatctttgcaaaagcactgtttattaactgtgttttaggtatgaggaaactgaggtcagtcacctctgacctcacagctttcccctagactgttcgaatagtttgcagactttttggagtagagattagtctcaccactccctacttcacaccccatgtttcagccatattaagcagcttgtagttctacagctggactacgctgtatttttttttttttctctaggcctttggatatgctgttttccctgccttgga

SEQ ID NO: 4486 - DNA, 6000 bp, Homo sapiens
actgtgttggtgcttcaatgacttcatctgttaaccagggagggcaagacttattttacaccatgatgcgaggatccagtgacgtggaattcataggctctgagcaaaagatgcagggatttttatgtgaattttatgccggtttcctctatcctgtgctttccagctatgttttttttttttttaacacaagtaaaaagcacttaacccaatttgctaaagccaaaccaagctcatcacagaatcatcagttcaggttgccaggcaggcaggtagaagcaatgccatgagcagtgtatcttgatttctgaaagacagtgataaaagtctctcaagaaatgcttgtagacatgatgaagacatgtggactaggcaccaacacccatgactgcctgaacagtcatacaccaaaacggttaacatcaataaggagagacttttcctattatggaggtagagctctagaatatggccctatctgaaggaagatggctttttaaaattaatcatttgaactaagacagaaactatgcttagtgaatttggaaattatgcaaaaccaggacaaaagcaaaaatagcaatatttcaacaggatgaaaaaatggaccaaaatcatcacactgttacagtaaaaatgtaaacacctatacttggattaaaaaaaaagagagaacatagctggaaagcacagaatggaggaaaccagtaaaaaattcacacaaaaataaatttaaaaactacacttaaaagataaatcagtgtgagtcgttggtgcaatctggctgccaaaactaaggtaatcttaggctgcattaataaaagcacagtgcccagaaaaaaaaagaacaaattgtttcaataggttctaatatctactcaaactggagtctttctagagagaaaataaccaaaataatgaagagtttggaaggccatgtggtttgagaaacagttgaatataatggagataaaagatgaagaaagtgggctagtgatgttgagaaagaggatatttagaaggtacttaacctttttttttttttttttttttttgacagagtctttctctgttgcccaggctggagtgcattggtgtgatctcggctcactgcaacctctgcctccccggttcaagtgattcttctgccttatctttccaagtaactgggattacaggcgtgtgccaccaggcccagctaatttttgtatttttaacagagacagggttttgccatgttggccaggctagtcttgaactcctgacctcaagtaatccacttgcctcggcctcccaaagtgttgggattgcaggcgtgagccaccatgcccggccagtacttaactatttatctttaagtgaaaggaatgaaactctccgtgagaaagtccttagacatattctgtgtaggactgtaggactggacattaaaaggtgactttaaaagtagaccctaaaggaaatatattttagttagataagagaaaggactcatggtcataagatggctgccacagctcctggcacttttgaaacagcccctataaactttataaaattaaccagggaagaaggaaagggaagaaatgaaaataaaccaagttcacagcacattcagcagtaatcgtgaggtctacttgctctctgacctgtttcctcatagttactctgtgcctattgcctcagaatcacatagatcctgttaaaagattataaagccccttaactgttctatagaaaacaacttgaacattatgaaacattatgttttccctttgagatactcttttgggtcctgcatactgatgaagctactgactcagctagtttgaaggaccccatgagatcctgactcaccaaagaaggcagtttccacatcctgatgatagaactttgttccatcgtcttggcccaaccaattaataacctcaattttttagccactcactctccacaatccccttaaattaaaacgccagcccagagctccttggagagatggattcaagggtctcctcccatctcctgacgtggtgccctgcaatcatcaaattctttctctgctgcaaaccctgctgacatagtgtaattggtctgttactgcacagcgggcataagaacctgttggtcctataacactttgactgtggtcaaagacacaatcaaagacaagaagtgagggaagagtagcaccagaaaggtcctctctcctatttgtttcttttatcaggaagcaaaatatcttgtccgggtggttacccctagctgtaaaggagactgggaaattgaatgtctggcacaggggtagctgggacttgcttaaatcaattatgactaggtcaaaaagccaatgctgtaagaataatggagtggaaaatggaaagagcttgggtcctcgctgacatcactgagttgctgaattaaattttaaacagccaagcttgtcttcttagagtgggataataaatgtatatttgactgagacattcctagaaggattttctatcacttgcagtcaaatgcaccctaatggatacagagatggtatttataaaggtaactgagcctacacccagttggacaattcgtaatttccattcattcaaccaatatttatttagtgtccactttgttctaggcactggttaaactctgaagatgtaatggtgagcaaaactaacaaggtccttgccctcttgaatttatagtctggtggggaagacaggcacccccaaaacaacccacaaaggaggaatataaatatccatctctcctgcttctatgaaaaagaggtacatggtattatgggagcatttaatagagaaattatgctggtggtggagtcaaggaaggctgccctgagaagtgagcagccatctgaaatatgaatatgcacattcaggattatgtctttgcccagaatgctctctttctctcccctgccatggccccccctcccatcatgttgccttatccactgttttgttgaaacctcccatcatcccagtcatcttcagtatcatgctttcatgaaatccacactgacctttccactagaagtgacctattccttatttaaaccccatgagatatgttcttactctgcctcacaatttcagtgcttgttctgcttacctcctgactcccacgcccactttgtaagatgtggactatctcatcttcccattaaatgtctagcaacctagcttgttgtcttgcacttaatcaacattcaatgcttactgtaattgattttttttttttttttgagaccaagtattgctctgtagcccaggctatagtgcagtggcggatctcggctcactgtaacctctgcctccagggttcaagcgattcttctgcctcagcctctagagtagctgggattacaggtgcatgccaccaggctaggctaatttttgtattttcagtagagattacaggggtgagccaccacactccgccccttaactgaattttaaaactacactttatcggtggggcacagtggctcacccctgtaatcccagtgctttgggagggcaaggcggatggatggcttgaggccaggaggtcgagaccagcctggcaacacggcgaaaccccaactctagtaaaaatacaaaaaattaaacgggcatggtggcgtgcgcctgtaatcccaggtactctgaaggtcgaggcacgagaatcacttgaacccaggaggcggaggttgcagtgagccaagatcatcccgccactgcactccagcctgggtggcagagcaagactctgtctcaaacaaacaatcaaatacaccacattttatcaatgtttacccccatatagtttcagaaaagatttgatagcttacacagaggagggtgtgtgcatgatgtccccacaaacctagacacccagagcattgaatttttgtccataaactgaattttttgaagattaaaatatactaataagggttattattatacttatgtcaactattacttatatgcgctagtttccttagtttattacaacccttattcctcagcataagaagcaaggtgtttgaatttcccaagggtgcataatatcctttgaaggggcctggctctgttcaatattccgagtgacagttgtccaggatggcacagtgcccttccttaaattcacatattggtaatcttcactgtaggtttataaaaggttgtcctcagtaattgagggacatagtaacataattgcacactattgaaagtggactccctcttagagataatctggtaacagagacccggagatttgtcccaaaccaggaagacaggaagagctgttccctttggtaatcatttatcaggcagtagctttccccatggggactcgcggagagtgtcggagatgtacagtcattcccctaactttcaacgtttacacaactcaggacacactctaggaaggaattcaatgattttcctctgggtggaggtattactaggttctaaagccgtggcaggcaagcagctaccaacggcgctaagttcaaagctgcccgagaactcgcccagagttaagtcagggaaaagaaacgcctgggaacaaacgcgccttctcccctgccccaggtgtgctaaaggacgatgccgcagatccctaactagctcagccttggagcgagcgctgggtgcctgcgatggaaagtcgctcttctcgccaagaatggtcgaaccccaaaacttcagggacgccgctcggagtaacttctcttcactcacttgcgatcagatgagaagaaagtaaagcccttccaacgtcaccctcagccggcgcgcggcagctgagtcccagcggggacggggtccgccgggtacccctccgcccgagccctgtgcgcttccaggtcctcctcctccgcgcggtcactggctgcatctccgccgccccggcacaatagaggctccgccctccttccgcgcgagctctccgcggctccctagcccagcagccctcgcccagcagcccgcgccgccaccgcctcttccctccccgtgtccggtccccgtgcgtcccgaggctccccgccgcccgtcccggcgcgcaccgcgggcgtctgtccgaacgccttccagccacctgagccctcctgcgggcgactcgctcagctagcccgtgcccgcctccaccttctccgtcatcccctcttccttgcgtccggctctccactggggctgcacagtcgagggctgctcgcgtcgggaaggagatgcccagagtctctggggcgcaccctcccgtcccgctcagccgcacccagctttagaaggtgctctcagcagccactttcgggctctagcgaggacaccctctcgcagaagtccttgccgagaccccccgccccagccattctctgaaggggctgaggacactcttatcgcgcccctcatggccaagcctcggctgctagttctctacttcgctctgattgtggttccggcctgggtgtccagcattgtcctcacagggacaagcgagcccccagatgcgcagacagtggcgcctgcggaggacgagactctgcaaaacgaggcggacaaccaggagaacgttttatctcaggtaggatgcagagtgccacgaccgcccttcttgccctggatggtggtgagagccagaagctggtccttgctgaagtgtttgagggcagctgtttttccttccattaccaatggaaagggcttttgatttttcatgtatcggaatattttcttaatggaaggatataggttctcctcgcaaaatcatagggtgcttaaaggtcatcaaatcaggagaaaggagaggtgaaggaagggaagatgccgctcgacttcttgagaagaaagaaaacaaagttgtttttggtttcagggttgtaaaaagtatctcttgtctatgtggctgtctgtcagaattggaatgtgaaaacagccggatatgttgaccaggaggcagatggcatatcccatcgggagatacttt

SEQ ID NO: 4487 - DNA, 6000 bp, Homo sapiens; identical to SEQ ID NO: 3197

SEQ ID NO: 4488 - DNA, 6000 bp, Homo sapiens
ggttagggaaagaggacgaggtatacagggacataagctctgctcgtgggaggtttagtgagaaaggagcgaaatcctgccttgtttgatttggagccttaacaggcttgctactgtttaaagtacacaggaaagtgggatttgtgaagggaggagaggggaggggaggggagggaagggtgacgtctttatgaatggtactgagaaccccggagcagatgccctgttcctgtgtcctgggctgccagccccgttgcctgggctgagacccaccactctggcatcccgcagtctctctcttccattcacaggacttggcccacacactccaggctggcctgtctggaccaatccctttgttcctaacaatgtaggggttaaggggaggctgctctgctgctggggttgcctgacagcatctgctggatgaaggtgaggtacctggtagggagacagaagggaccacattcctgcctgtctatagtggcaagcctgggctcagggcaagtgaaagatgacatgcatcttagagcagagaccaatcaacttggtggtggcatcagtggtctcagctttgggagccaggtacaaaccgggcaacagccagtgcaccatccaaacattgccctctgacactggcaagcaggagcacccttggctcccaagcacaggtccaggcacacatcctcctgagcccacctcccagccgactcaaggcaccgtaaatatatgcatgcacacactctcaggcagcattcccatgctaaacactgatagcttgccaccccccgcctctaaagggaacagacttgatgctgaaagcctgccaaagtgtggctggcttccagcaccaaaaatacctcctgtgatccgaggggctactgtactggcatctatttgtggggctggagctgctgctgtgacataaaggacttcccctagggatgggctagttgcccatttgggcctgtgctccccaaagtctaagagcttgctttccagggccaaggcctgctcccagcctggaaaatgcaggtggcagcatcttagccaaacctgccttccacaggagaaatattcattcttcacaggaaacattctgtggcattccagaatgttggtgccctgtcctctcccacttctctcattctcttgcttaagtaacccatctagttacttagcttgcttctttgacaagcaaagaagaggcctggggcctggaacaagaatgcagaagtgacaaatgactttcaaggtgaggttccaggaatatcttgactagggaaggtaggtaggttggggtgagtggagaaccctgttgagtgtgctatgattttccaatgatgaggatttggcataagataaacatttccccattcattcatttgttcattcatttgataaatatttgttaaatatcgacagcctgctcacaaatatgttgcactacatctatccttccagatggaaatgaggacgaactacaaggccctgacagaggactggtcagtcccaaggggctgtgggcctgatatcagatggacagaatgaggaagaatatagtgaagggcagaaacatacaagaaaaccagaaacctcagaaagagatagatctgaggttatagaatctgtagggttattgccatgctttctttaaaaatatgtgccaaagcagtaattatggactgtatatagttccattaaaggaagaaatttagtaaatttgctcttcataaatatttgcgtaataaatgaatgaatacccagatcaaagggagaaggttaacgagcagatgtaaagactagaggttcaggtataccgctgttgcctcagaggatgtcaaatctaaatacgaaccatgaacccaaggttttggtttttttttaaattctcagagcatgttatggtaattagatgtttagctaataagatccatatttgttctagcctattaggactaaatataacaacaatctttccattttgatgatactattacttcttccaacacgcttacatatatctattttaattcccccagttgtctggagagtgaagacagaaattcccatcttacagatggacaaactgtggcctagagaagttagaggtacttcatccactgtacctcccagtagatcaagttagcgctctttccattgctatgctgaccacaggctcttccatagtctcacaggactcagatcttagaccctgttcagtggcaatgtggaatctggatggcgtcgtgccaccctgtcagccacaatgtgtcctcccgcctgtgttccctctttctctccctttattcaggaaagagaggggaggtgtggggataaaagatggggtgagtggaagagtctgtttcattttatgcttccttgctcttcattctaagatttatttctggaccacaggagtggagggtggcatatgagaaaattatttcaattgtatcataatcttcccaaggtgtgattaaattgaggcatagggaagagaggtgacctcttccagagtcagacaccacttgatttagaaccagagggccctaattttcagcttggagctttatcaattagatatctccaatcctaccacggctggtcttaggtgtagctggccaaactccatgaacaaatggaggaagtgttccaaaatcttctagcatcttcttcaaatcatcttttttaataaattgtggtttagattcagtctacccagagataaaacgatcgactagtctgtctgcatggggagacaagatctacttataaaaataaataaataataacacagggtaaatatgataatttattggtgtgttaccaacaatgaatgctaaagaagtttgaaggaaagaacaggtatggatcaggcaacacagcttagacagattctttgtggtcccacaggacaaaactagcagtagccagtgaaagttacaggaacacaaatttcagctaattacaatgaagaacttttgaagaattcgctgatttctgcagatgttggagtaaagcctagatcccccagtcctgtgttgaatgtgcgattgttcgagatgactggttagtctagatttccttttcttcttcctctctctctctcttttctccggctccctttcttcatccttccctcccttcgtttcttctgccgctactgctctaagaatttggtgcaattgcttttaggtattcgcagtgatttttgttgttttttagatttataccactgaggactgtggccacgagagggcagtagaggaagcttatcagaatacttggacaggagtaaactcgtgtgcgctctaatcgcgagcagggactacgcagatcctgcgaactcgctggggtccagcttgcaggccgcttccggaaagccgtgtctagaggctgcggagttactgagactgtgtggcgaggaatcagtggccttgagggcaccgagacattgtcatccagaatcccgaaacctctcaccttaggttattaaaataagttatcttattgccacccctctgattaccctgccagaaagattctctgaattggatatagaaagctcttctcccgtccccaatgcccccatgcaagtcgggacttaccagatgcccaggatccctatcagggctggaagtttgagattcaattcagagcaaggttcatcttctcattgcaataataataataacaacaacttcaagccttatttgacagcttgttggcctttttctttttttaatttacaagaagaggaaatttgctcccacaaattccaagactctagtctcaaccctaccagacaagccccgttcctccccactcacccctcactcaaattacagatgaagagggaggtgtgcaggatgtgtgcggtgacaggtgatgcgaatgggggggattccctgtccctactgccctcacccactcttcctgtgttctgagctcccccctaaccccaacgctagaccttctattcccccgggggccaagccagctgggctcgcaaggcccgactcgaattcccgggccctggcagcattttccttgcccccttggctacttaaggtggccgatgggtccgggctgagctgggcgcaggacaggcagccgagcggcctccggatgccaaacctgcttctcctttgttgacagcttgcggaggaggaagtccgcgcgggcgggggagggggcagggtgctggcggtggcgggcggtgccagcagcgggcgcggccccagcccgggcggacgcggccggcggggagggggttaacgcgcgcggcctctatgataatgagctgcatggtgaaatagggaggccggcgctcagggctcctccgccgccgccgccgccgccgccgccgccgccaccgcgggagccagagctgccgggaggagcggcatccgcgccagactggagcgggagggcggcggagggcagttgctgggaatttttcagccgagagggcgagcgatccggagagagaccccgagagcttgggagcggtagggcgtgcgagcgccgcagccagcggagcaaacctcgaaatagatctggaaagccaggctcccggaggaaatgggactgtgaacgaaccggagagcaagaagggaaggaagcgccgggattgctgatgtcagaggagcccggaaagtcgcgctggaaaaatctgaagacagccggggctctgcttcttcctcaggagagacaccgccggccgcccccacacgccccctcggcgcctccgggtgccccctgagagccggcgacagcgcccagccgggctgctgcggggcgacggaggactgaggggcgcgcggagcggagaccgaggagcgacttcaggaatacagataagtgtctggtggcttgacgtggattttaatgaatttggactccatgtggatttggtcgtctccctgattccgagctgcgggcagggagaggggcctcgcgccgccctcagcagccggcggcggccgaggtagaccgagcggggacggaaggacagaccgacgtcgccgagctgggtaagcggcggctgggccgggcgctcggagtcggcagcgccctccgccctctccccacaggcgcgcacacccgtggcggcttctcccgcgcccgcctctttggggtcccggccccagaagacccggcttggccgcggcgggcgagtccccgcgtgggctcggccactttcgcgggctggagcgcggcgtgcgcgcgatcgcaggctcactggagccgctgcctcccgccgagggcttcccggccggcagcccgccggcttcccgaatgcgggctgagggcggcagcagcgctccgcggcgcgcctccaccgcgcacctgccggcgctctgcggctttggggagctcggggcggcaaggctgtcctgagagctggagcccaaagagggcctcggtggcaccagcgagacagcccaaagccacactggccagcgatcgatttgggggcgttcactccagtgccggggtccctggtggccgccggctctcccttccgatcggggactggagatcaggggaatgggaaaacatcatttgcgcgggttccataaggctcagggagagattcctaggcactgaatgggtctaagtgtttcatctcccggggctccctttgcggtgtatcgcccagcaggggtccagccccttagtttgagcaccacaggagtgctgggggttgaaatgggagtttgcttagggtcccagaggctccttatgaaccatttgagaatgtttccttccatgtgctctttcttgccccaccccacaagtgaggtagggatcctagaaaattctagccctttttatccatcccacaggtagtctctataatgccaatcatggtctagatgcccagagagtcaccagaaactaccattttagatccccgaaaaaagtccacctgtttggaatgacccttgccctagtgggagctacctactcaaactcagctctgctcaggag

SEQ ID NO: 4489 - DNA, 6000 bp, Homo sapiens
tcctatatcacaaacatccagctttttgaagttgagaggtggatcataaatctccatcccagacgccctctgacctcagccctcccagctgaccgctgaccctgctctctttgcccacacagagctcagggcgactgtgaccctgaagcaccaatgaccgagggcacccgctgctgccgccaggagatgtacattgacctgcaggggatgaagtgggccgagaactgggtgctggagcccccgggcttcctggcttatgagtgtgtgggcacctgccggcagcccccggaggccctggccttcaagtggccgtttctggggcctcgacagtgcatcgcctcggagactgactcgctgcccatgatcgtcagcatcaaggagggaggcaggaccaggccccaggtggtcagcctgcccaacatgagggtgcagaagtgcagctgtgcctcggatggtgcgctcgtgccaaggaggctccagccataggcgcctagtgtagccatcgagggacttgacttgtgtgtgtttctgaagtgttcgagggtaccaggagagctggcgatgactgaactgctgatggacaaatgctctgtgctctctagtgagccctgaatttgcttcctctgacaagttacctcacctaatttttgcttctcaggaatgagaatctttggccactggagagcccttgctcagttttctctattcttattattcactgcactatattctaagcacttacatgtggagatactgtaacctgagggcagaaagcccaatgtgtcattgtttacttgtcctgtcactggatctgggctaaagtcctccaccaccactctggacctaagacctggggttaagtgtgggttgtgcatccccaatccagataataaagactttgtaaaacatgaataaaacacattttattctataattttgtaattttctattttattttaattaattaattatttttgagacagagtctcactctgtcacccaggcgggagtgcagtggcccaatctcggctcactgcagcctctgccttccaggttcaagcgattctcatgcctcagcatcttgagtaactgggattacaggcatgtaccaccacgccaagctaattttttgtatttttattattattattattgagacagctctgtcgcccaggctggagtacagatggcgctatgttggctcactgcaagctctgcctcccgggttcacaccattctcctgcctcagcctcccgagtagctgggactacaggtgcctgccaccatgcctggctaattttttgtattttttagtagagacagggtttcactgtgttaaccaggatggtctcaacctcctgacctcgtgatccgcctgcctcggcctcccaaagtgctgggattacaggcgtgagccactgcacctggcctaattttttgtatttttagtagagatggggttttgccatgttgcccaggctggtctggaactcctgacctcaagtcattcggcagcctcagtctcccaaagggctgggattacaggcacaagccactgtgcccggctgtaattttccattttaatcaaagctctgcaaattgaggaaggagcagaaagttctacagcgattaggtcaacctgattgtaaaactaaggaaggagcttgagttggccaagacttggtaaagatcttggttaggtaatacatgaaactaggattaaaatgctttcagggccagcacgatggctcacttctgtaatcccagcactttgggaggccgaggtgggcggatcacttgaggccaggagttcaagaccagcctggccaacatggtgagagtgcatttctactaaaaatacaaaaattagctgggcatggtggtgtgcgcctataattccagccactcgggaggctgaggcatgagaatcgcttaaacccaagaggcggaggttgcagtaagctgagatcacactactgcactccagcctgggcaatagagtgagattctgtctcaaaaataaaataaataaaaataaaatgcattctgattctagaatctatggtacctgccctcccagaattgatacagaaatttctttttttttttttttgagacggagtcgcccaggctggagtacagtggcaggagtgcagtggcgcgatctccgcttactgcaagctccgcctcatgggttcacgccattctcctgccttagcctcccgagtagctgggactacaggtgcccgccaccacgcccggctaatttttttgtatttttagtagagatggggtttcaccatgttagccaggatggtctctatctcctgaccttgtgatccgcccacctcggcctcccaaagtgctgggattacaggcatgagccaccgcgcccggccaatactgaaatttttttgttcttgacactttgactttcctgggcatagtgactgggctttattccaatcctacttgcatcaaaataaaatctgtgatcaaaattatcatctatacttagagaagaaaataaagcttcagaggatctggaatttatagctgtaagagctgtgcagctgggcgcggtggctcacgtctataatcctgaggatcacctgaggttgggagtttgagaccagcctgaccaacatagagaaaccccgtctctactaaaagtacaaaattagccgggtgtggtggcacatgcctataatcccagctacttgggaggctgaggcaggagaatcgcttgaagccaggaggtggaggttgcagtgagctgagatcacaccactgtactacagcctgggcgacagagtgagactgtgtctcaataagtaaataattaattaaaaattaaaaaataaaatagtgattttacaagcacttcacacaactgacataacaaaggctgtggctatctcaactcacatatcgatccatcaaggccttctcttgattttgaaataaccttaacctactcaagaacaaatttagaaatcctttctctctctgaaatctttgtcagtggctccagcattctaattaccaagaccggaaccttgcacttgcctggacccatggcacagaccagacaggtgggggcaccattcattgaggaaggaaggaggacaggcaggtgcgggagtggggagtggaagaaagattggacagggacagtctaaggagccaacggggagtccaggggccacacccaggactctgcagaccgtcagatgtggaggtaagagagcagggaggggggatggccaggcgcagctatggagggacaagggcagagatgatactggcggggggcatagaggaaaaaccctggaaaataactagtggctagagctttggggagagaaggggaaagacagatgggacagaaaagaactgagagaggcaggaagagaccctccccaccccactcctggacagccacagactggcgctagaatcagggacagggaggtaaggaggaatttttttttttttttttttttttttgagacagagtttcgctcttgttgcccaggctggagttcaatggtgaaatctcagctcaccgcaacctccgcctcccaggttcaagcgattctcctgcctcagactccctagtagctgggattacaggcatgtgccaccacacccggctaattttgtatttttagtagagacggggtttctccatgcgggtcaggctggtctcgaactccagacctaaggtgatccgcccacctcggcctcccaaagtgctggtattacaggcatgagccaccgcgcccggccataaggaggatatttttatgccgttacagaaaaagatgaaagctcagaaatggaagggaggtcggagaacctgcaaaggcatgcatgtggggtgaggactgctcagagctcagagaggggtgctggaagggacctgagaggaagctttggtccaaccactcatttcacagatagggaaacaggggcctgcggacgggttggtttgctccttgattcccagggcgcgcggtcctccccgaacccagcctcgcttcccgcgcagcgcccagcagtccctggcgcggcgggccggccctgccctcgcgagcttgcggtccggttgtggaggccaccggctccctggaaacatttggctcccggccgggaggcatgccgcgctctcggacctgggctggagtaggtgcccttggcggccctggctcgagcagtaatggactagccccagggggcgttggaaatgctgcgacccgcccccacatttttgcccgaacggagaccctccgggctttcacggtccggccttctacagcggcgggggagccgtggcctcttgcagggcgctccgcgcggttcccgactacccggagccgaggtgcgggctgaatcctgctgagctccccatgctaccacccccgcaaccccactctcccggggcgggtctaagagctcttcggggaaattcaaagcactacagggaccaacgtttgcagatgctctccctgcgccgcgaccaccctgtgcttggcccagttctcccggaggcgtccagagactgggctcgtgccgggggacggaagagggtgcgccccggcggatcccttcttggagcctggacgtgagctggccggtccggggcttgcagacctccgggaggagctgcggggctgagcggcgaccaggaggccaggccggggcagaggaccgccgagggccaccgcgggaggcgcagtcagctgcgtacaggcttgcgccgccgcgggccaagactccaaattgggaaaggggtggccgcagctctgcgcatgtgcaggaggcgccggagtttcactttgtaacttttaagtggtcggaacacgccccgcgctgctgggtcccgccagacacgccgccgccgcaggtacaggggacagggggcgtgaggaggggcaatgcaccctccgcctttcccgggacgtgcgcgccaggtgtccggttccggaacggctcccagcctacgcagaccccagagcccccgaccccaagcagggggtgacgacgcgggattgggtgggaggagagggtccgggcagcgcctccattccagccctgcgctccttgggaattcctggcggcttttcaggactttcctctccggcttttcgctttcagggctggtatctccttcttccccacccctctctttgggatttgtcggcggagtccgacctcccacctaactaggagtgcagctatgggctcctcggaccctatacgaggccgggctgggaaagggccaagcgtccgactctcctgacgccaggaaggcagaggccacccctcgggctgttcctgggtgaccacttcctgcagccttggcggagtcctgaggagggaggctggggactcggggactggggggaagggcgggggcggaaagggtgaggcgagctctgctaagaaaccaaatccgcaaaggttccagcacctgataagactagctacctgaggccctggaggggccttggtcattcagccccaggcaggtggtgtcctcttcaagggcaggggtggacagcgtggcggacccactgaccctcccttgacacctctcaggtcatcctcaagtctgctgtgccttcaagggggatatgaacggaagccgaggctccttttcccttcacacgcccctctcctttgtttagtgtgggggcaaaggtctctcctagctgttcgttgggctctaacagagaagacgtcaggtgggatcctgcccttgtgtttcccattagctggaggggcgacttaaaataaaggcagacagcttctaattgcttgctagggccgggtcctgggctaagtgctttacaggtgttgtttgggatctgtgcctcccaacagctccgtgagagaaagtcatcactcgcatttcctggcgaaggaagccaaggcacagagtggttaggctgcttgtctgaactgcgtggtgctgagaccctaactccagagcct

SEQ ID NO: 4490 - DNA, 6000 bp, Homo sapiens
ccatctacctagccatccatccctccctccctcccttcattccatctcatttttggatgcatttttgagacttctgaatgtgaggcctgggccaaatggcactctcttctctcctttgcagtaacaggccctgccacacacacaagcatacccccacctctacatgtaaaccccacctgcgtacacaccatatatgacttacccatgtccccacatttatacatgcacattccatgcacatattcacataaccacacacgctcatctgtgcacatatacctaaacacccccccctccccaacacacacaaactgcccacatatacactcacagaagaccctggacatctgtaaggaaagcatctggagacctttgggaatcctcagacctgtgactgtcgtggagccggtgccaggtcctggctgtctcctccatacatttctggcaagtgccagaggctcccttgagctacctacctcagatgtcctaccttttccactcttacccatcttctctctcaacccctagtcacttcctacaaaggaaacggattccttccagagtgttactgttatgggaagcaaatcccacagaccatccactccatgcaggctgggactgtgtctgccctatccacactgcattcccagctcctggccccctgtggctaagtgttgattggaaaaaagtcaccagagcagcacagaggcacatacactgggcagccacaggggtacctccaccccacacagttacgtccatgcacacagaacaccctgtgtgtgtgtgcatgctcaagcttgcatcactgtgtgcctgcacacatatgaacacgcatcgtgtctgcctgtctccatactttccagatagagtcccttccaggacctgggtcctttcacaaaatcacctaataccactgtgggctcatctgctgacatgtgagatccagatgtggccccatgactgctcagggctcctggcttggccctgaacatctgggcgcaggggtttagagcaccagctttggaattgcattctcctgagaaaacctgggttccaccctggctctgcacatgatcactgtgcatgttccccgtatgatttatgtacaagttacctaacttcttggagcatcaatttccttatttgctaaatgggggcaatagttcctaccttaaattcatcttaaaggagataatctcagcagagtgcctggcatgttgtaagctcttaaaaatgcttgctatgaatatgattattgttactttagcctttgctctgaaatcccatgcacgctttgtgaggaaggacagccttggttggggggtgtttatggggagagcagagtggatggtgcgtatgtgaatacctctccccagatgctcccccaatcccaagctctcattatcttatatgcatattcataagggatggccctgctctgtaaatgggtcagaagcaggaaatagaggccagtacagacagcgaagcccaagggataggagggctcaaagccggcacacatctgagtcctcatggacgggaggatggtaagaggggatggggagagaatggattgggggcactgaggcgggggcaggagttcgttcctatgttgcagatttgaaaactcaggcccagtgagatcagattagagaaccttggggtgggtggtccaagaagtcagagtctgcttcctttgggaactggagttgagcatctgtctgggctgggtgatgggcacagggcaatggaccaaatgacccctacatgtttatttcaagggacatggtttacatagcattgggtggagaagctgaatcctgaattccaaccctccagtgaggctcagagtggttgggtgacttgccagtatcacatagctgctgactgtgactgtgcttttgggggtgcaagagacagagctactctggccccatgcaggaggttcaaatctgggagtaaaggctgatgggctggccaggacaccaagaaatgaagctctttatccatgtcctcacttcatctcctcagtagtcccctcagatagctggggtaaaaaaacttatctttattttacagatgagaagcatgaggctgagagaggaggagtcacccggacccagccacacagtgagttatgccttccatgctgggcgtgtgagagcccagccggccttggtcttgggcaggcaggaggccaggacagtggcagcatattaccttgctctggaaaattttagcctgaagtcagagtggctatccctttacacatacagtcatcttaatccctcgttccttgcagataactgcttatttctgagagtgtctttgcagatgctcacacatgctctgtgaggttaaacagaataaccctacctatttccgggaaggggatggacggacaccccttgtggggtgaagtggccccccaaggatggcatggggcatggtcatctgtggcagaacaagaatcccaggggttgatcctcttggtcttgggtgctttctactgttctaggtcatggatagggaggggttgggggtgaaaaattcagctcttagagcagaagtgtccaagggagctgaccctgggacgggagcatgtgaggagggctcacttgagactgcttggtggcatttcagtctaaaggatttccgtgcagaagatgactgtgtagggtatgtttttggatcagactgtcagtcacagaagaaggaggaaagtggacttatggtaaaaggtcagacattcatccagtaagcattcactgcttgactgtgtgccaggccctgtactgtgctctgggtaggagagggggtggccagagagcagaccgttcttgggtggctcacagtcccctaaaggcctcgggttagggaaggactgaaatattgctggacagaaaaataggaagactagatattgtcacctctactttttcaagggaagcagtaggacatcagggtgaaagccaggccaggttgcctttcagctctgtttcttctgagctgtgtggccttcagcaatagtaacaacaaccacagtgatcacagtcaacgtttattcgacgcttgatttacatttcgcgtgtcactacttctttgtttctcggtttcctcatctgtaaacgagtgggtggggaattaatcgacttctcagggctgttgtggggctcaaatggtaccacgggggaaagttgggcatgtgctcgggttgtttgtgaggccataagggaggcccatattgtttggaggcttgggggaatcaggaggatgttcattcctaatggaaccaggtagtgggttgggggtgagggtggtggctctcttcactgagaggtatggcatgtgagcaagcttcaaaggggagaaagagggataaggagaaggacctttaagaggagggcatctgccaggtgcagtgcctcacatctgtaataccagcactttgggaggccaaggcaggaggattgcttaagcccaggagttcgagactagcctggacaacataaggagacctcatctctacacaaaatttttaaaaaattagctgggtgtggtagtacacactggtggtcacagctacttgggaggctgaggtgggaggatcacttgggtccaggaggttgaagctgcagtgagccatgattgggccactgtgttccagcctgggtgacagagtgagaccctgtctcaaaaaaaaaaaaaaaaaaaaaaaaaaagaggagggcattgtgtgggcaaaagtgcggaggaggaaaagtatagggtgtgtttgtggaacagtcctggtgcaattaatggctaagcctggcgcccagtgaatcagccaaggatgcagtcaaccagctctttggccctggggccagcttcgaggcacagagacttctttccctaacattatcttgtccagaggtggctgaggacagggctaagggtgaagggagactaattacagagccctacttctgggtctctcacacctacccctggaaagccatctgtcaggaatgtggccgcccctccccaccttctgacctccttagctagggaccagtttgggcatccctagggagtgataagccaccaagcaggggtggctgtagggagtgtgtagctcccagcaggctgttgggagtcagtggagtttgaagaacagatggagagaagggaggatgggtttagagtgagaggctggggtcttagaagaagcagtaggtgggcatggtggcatgcacctgtagtcccagctactcaggagcctgaagcaggaggatcacttgagcccaggaggtcgaggctgcagtgagctatgtttgcaccactgcactccagcctgggtgacagagcaagaccctgtctcttaaaaaggaagaagaaaacagtgacgatgggggcttacatttgtcaagcacctaccatgtgttgtaaccaccctgtgaggtatgtatcctcactttacagaccgggaaactgaggctcatagaggtgcagtgacttgccgaagtttctttatccagtcattcagcattcaacctcagcatctacgtattgagcagaggccctgcgccaagcactgaggagtcagcggtgaccacctcttggcttctgttcccaagggtgacagtgtcctggggtcacacgggctcaaaccgaggtcgatttccgaacgctcactttggagcaggatgcgagcccgggccacgattgggtcaggttgcgccgctcgcgtggccgcgggaatccccgaccggccccttccctagggtccctcctggcgcacctgccccaggtgagtctggggaggccccgagcgccgccggaaagcgtcgagcggcttcggtaggtggggcggggccggggcggggccggggccggggaggggccaggcccggcacccggatcccgaggtccgcgccccgcgcccggcgccgggcgcccgaagccgggagccgccgccatgggggcctgcctgggagcctgctccctgctcagctgcgtgagtcccgaccccggcgcccgcccgcgcgcgccgcccgttcctgctgcgggccctcactttcttctgttctgctccgagtagtttcttctttttccttcctgcaaacttgtctttctgggccggtgccccgcctgctcgccctcctggaccttcactcggcacccggatcccgctgcccccgtccccctgctcagtcctggccggcaggcgccgggcagctgcggtcccggctcgggtttccgcgggcaggaggggagtgccctcggcgggcgccctcctgggacctggagagactaagcctggagcccggggtcggggcagctctgtgggccctcgtcgccccacttggggcggtcctcggggtggcctctgtccccgtcccggacgccctggttctctgtgtaggtcgcccgggccccgtccctcctggcgagtgccctgccctacccctctggccgcctgccagtccgcctgttcctgtcgctcgggctccgcctgtccgttcgtatttgtctggttcctgtctgtgtccgtcgttcgtccgactgtctttgtccgtctgctgtcttctgtccgtctgcccgtccgcccgtccgtccctcagtctctctgcggtccctttaccgtcctcagtctggctcgcgctgcctctcaggcacttccccagctcgccccggatcatctgggccccagcgcggagactgggatgggagcggagggagccccggactttcttagctgccctcgagtgaggcgggtgcgggtcgtcacggaccaccgggcggaactctgggttgggagagcaggaatcgagggaggttcgggtgtgcgcggggagtgcccggtcgcgggttcgggacctgtggggaggccaacctctgttctgtagctgcagccgcagaggggaggggctccagcaagaccccggctgggaggcccgttctcccttccctttccccagcccccctctcctttcctcttcccctcattaaatc

SEQ ID NO: 4491 - DNA, 6000 bp, Homo sapiens
cttttgggctcaagtgatcctcctgcctcagcctcctgagtagctgggactacaagcaacacaccaccatgcccagctaatttttttttaattttttttgttgttgttgtattgacaagatctcactatgttgctcaggctggtctcgaactcctgggctcaagcaatccacttcagtctcctaaagtgctgggattacaggcatgagccatcatgcttaaccctgcatggtatttctgaggaatgatatgatgaaatctgtattttaggatgaccagtcatgcagaacagattggagtgaggagttgggagacaagaaggaagagataaattggaaatttgttgaaggaatatttgacagaacttgtgctgtaattaaatactaaatgaaagaaaaggaaaaggcagaatacaactccagagtttgctgcctaagtggctgggaagatgacaccatcaacaaacaagaaaaggggcaggggactggaaaaggtagtgataactcgccactagcactttgtgggcaagggccatgagttaccagttatataatcctgcagtattcagctggacatacaagaggtcttcacaaagtttatgaaaaatgtgtattatgaaaaaactatgcatagatttcaaaaaatttttgcaccaaaataaatttgtactaacttgttataacatgtctgagcaggatctactttgaggcactatgaaggataagacattagtttgaaaagagcccctataagagtaacatgaattctgctaaaattgaagcaagaacaaatatcaagtttatggttaagcttgggtggaagaatggtgagatcattgaagctttacgaaaagcttatggggacaatgcctcaaagaaatcagcagtttacaaatagataaattgttttttgttgttgttttttgagagggagtctcactctgtcacccaggctggagtgcagtggcatgatctaggctcgctgcagcctctgcctcccacgttccagtgattctcctgcctcagcctccctgggtagctgggattacaggcgcctgccaccacgcccggctaatttttgtatttttagtagagatggggttttgccatgttggccaggctggtcttgaactcctgacctcaggtgatacacctgcctcggcctcccaaagtgctgggattacaagcatgagccaccgcacgtggccagataatttgttttaagaagggatgagattaggccgggctgtgcctctactacagactcctagtatttattttctttaagaatacttggccaggcgtggtggctcatgcctgtaatctcagcactttgagatgctgaggcaggcgaatcacctgaggtcaggagttcaagaccagcctggccaacatggtgaaaccccgtctccaccaaaaatacaaaaattagctgggcattgtggtgggctcttataatcccagctacctgggaaggctgaggcaggagaactgcttgaacccaagaggcggaggttgcagtgagccgagaccacgccattgcactccagcctgggcgacagagcaagactccatctccaaaaagaaacaaaataaagaagggatgaaatgatgttgaagatgaaacccacagtggcagaccatccacatcaatttatgagaaaaacattttgtgtcctaactgaagtggattgacaacagcagaaataataatcaataccataggcatctcacttggttcggcttacataattctgactgaaaaactaaagttgagcaaacattccacttggcaggtgccaaaccatcatgcccagatcagctgcagagctttcaatgggaattttaaacaagcaggatgaagatcctgaagcatttctttgaagaattgtaataggagatgaaacatggctttaccagtacaatcctaaagacaatgcacaatcaaagcaatggctaccaagaggtggaagtgtctggtcaaagcaaaagtggaccagtcaagagcaaaggtcatgtcattcgtttttttttttttaatgttcaaggcattttgtttattgactttctggagggccaaagaacaataacatctgcttattatgagagtgttttgagaaaactagcaaaagttttagcagaaaaatgcctgggaaagcttcaccagagtcattctccgctataacaatgttcctgctcatttctctcagcaaacaagggcaattttgcaagagttttgatgggaaatcattaggcatccaccttacagtactgatctggctccttctgacttccttttgccttttttttttttttttttggagacagagttttgcttttgttgcccaggctggagtgcaatggtgcgatctcggctccctgcaacctctgcctctccagttcaagcgatgctcctgcctcagcctcctaagtagctgggattacaggtgcctgccaccacacctggctaattttttgtatttttagtagagacagggtatcaccatgttggtcaggctggtcttgaactcctgaactcaggtgatctgcctgcctcagcctcccaaaatgctgggattacaggcattagccactgcacctggcccttgttttctaatcttaaaaaactctttcaagggcaccccattttttcttaggttaataatgtataaaagaggctgccttatccttacaagcagcctgccctcaactctctctcagagtgttaaaaaaaaatgtataaaagggccaggcatggtggctcatgcctgtaatctcagcacattgggaggcccaggcaggaggatcacttgagcccaggagctggagaccagcctgggaaacataaagagatactgatctccacaaaaaatttttttaaagaattagcttggccgggcgcagtggttcacgcctgtaatcccagcactttgggaggctgaggcgggcagatcacgaagtcaacagatctagaccatcctagccaatatggtgaaacctcgtctctactaaaaaaaaatacaaaaatcagctgggagtggtggcgcacacctgtagtcccagctattcaggaggctgaggcaggagaatcgcttgaacctgggaggtggaggttgcagtgagccaagattgcaccactgcatttcagcctggtgacagagtgaagctctgtctcaaaaaaaaaaaaaaaaaaagaattagctgggcacagtggcatgtctgtagtcccagctacttgggaggctaagcaggaggattgcttgagccctggagtttgaggctgcagtgatctatgatagcactactgcactccagcctgggtgatggagtgagaccctatctcaaataaaataataattataataaagactgccaggcacatggtggcatgcacatgtggtcccagctatttgggaggctgaggtgggaggatcaccagagcccagggaggttgaggctgcagtgaactgtgattgcaccactgcactccagcggggcaatgggagtgagaatctgtctcaaaagtaataattatatatatatatatttatatatatatatatatatatatatatatatatatatatatatatgttctagtattttcctcccatacctccaatgtataatatctcatgcaccctgtggtccaccccccaaagacatacacacaacactttagagtctctgatgtagtcaaagggagtcattggaggttctggaacagatgacaggcatggtagcagttgattcacaaactgaaagctgagacatcaaagaactgcgactgccttggaatgtttcccatgtgctagccaccgcctcagtgctttatacataaatcagttaatccctatagcaagcctccattgtgaataccataattatcttaacagacgaggagactgaggcacaatgaagttaagaaactttcctagagtcacacgaaattggtgggggcctacttttttttttttttttttttttttttttttttttttttgagactgaatctagctctgtcgccaggctggagtccagtggcgcgatctcacctcactgcaacctccgcctcccggattcaagcgattctcctgcctcggcctccccccactagctgggattacaggcactcgctgccacacccagctaatttttgtatttttagtagagacagggtttcaccatattggccaggatggtctcgatctcctgagcttgtgatccgcccacctcggcctcccatagtgctgggattacaggcctgagccactgcgcccggctgggggcctacatttgaccccacgtggtggtttgggctcatagtccatgtgcttaaccactagtgggtaggcagggagccagtgttctttctctcctgtgactttggtgaagtctctcaccactcagtgttgtcgtgagcatgctaggcagagtgcaagaaaggagcaagaactcactaatggctaggccttccctgtgtctctgtaattgatgggtttgggttttttttcctttctctctctctacctcctctctctcttcttcatcctctctctctcactctccccctgagataaggtcttgctctgttgccagggctggaatgcaatggaatggtgtgatcatggctcactacagcctcaatctcctgggctcaagggatcctcccacctcaacctcctgagtagctggaaccacaggcatgcaccacctcgcccggctaattttttattttttgtagagaggggagtttcgccatgttgcccaggctgttttcgaactcctgggctgaagtgatcttcctccctcagccttccaaggtgctgggattgcagacgtcagccaccgtaccaggccaacgggctcggtttctatggttttgtggggagacggctgagggaaggtcggcttccggcgtcgcgctgcaaacgtctcgctgaggtcatcctttacggcaggcgtccgcgtcgctagctagtcgttctgaagcggcggccagagaagagtcaagggcacgagcatcgggtaggtaggggctgcttatgtccgcgcggcagcttagcttaaggaccttccttccgaggtctctttaacagatttcctcttggcttgctgtgtgtccccttctcccagacctgaactcagggcgtgttccctgccctcccaggccgcttcacctccacagctaatggcaccgaagcctggagattgccgctctctccactttccacatttgtttaggtttttgccggactaatgttttggctttctgtttcttaacctaaagtctacgatccttatcccagctttccaggctctgcgtgatttcggccccgccggcctcctgagctcatttcattcttttcaccgtcatgcacgctgcgctccattgtcccccaaacatagccagcacttccggctgtaactccgggctgttgcccaactggaacactctgcccactgatcttcacttggcgaactcgcaagccatgttaaaggcattttcaagtctccgggcagagttcgtgcttcctccttcgagctcttacccactcgtgttccttgcagtgtattcgcaattccgagtgtgtgtctctggtgcttacgttggagctgctttcccccgcatctgagtgcctggaacgtaactactcagtaaatgatgactgagggatgggaaggaacttaagaagttaaattcacctttttgttgagatggagtttcgctcttgttgcccaggctggagtgcagagtggcgcgatctcggctcactgcagcctctgcctcccggattcaagcgattctcctccctgagactcccgagtagctgggattacaggcatgcgcccccacgcccggctaattttgtatttttttagtagagagagggtttcgccatgttggtcaggctggtcttgaactcgcggcctcaggtgatccgcccgcctcggcctcccaaggtgctggaattacaggcgtgagccactgcgcccaacta

SEQ ID NO: 4492 - DNA, 6000 bp, Homo sapiens
caggtactcctccggaggctgaggtgggaggatcacttgaatccaggagttaaaggctgcagtgagttatgattataccactgcactccagcctggctaagagcaagattctgtcttaaaaaaaaaaaaaaaaaagaaggccgggtacggtggctcacacctgtaatcccagcactttgggaggctcaggcgggcagatcacatggtcaggagtttgagaccagcctgaccaatgttgtgaaaccccccttcactaaaaatacaaaaattagcctggcatggtggtgtgtgcctataatcccagctactctggaggctggggcaggagaatcgcttgaacctgggaggtggaggttgcagtgagctgagatcatgccactgcactccagtctgggtgatagagcaggactctgtctcaaaaaaaaaaaaagaaaaaaaaagttagcaatacaaagaagcaggaactgtgggaaaactttctggggatggggacagtagtagtagttctggtggcaccatccagtatgttgacactttagaccttattttgctttctgatggcctttgccagggaaacagacaagagattctctatacttaataataattgttactactcattgagtgtttactgtgagccaagtgttttattagttttctgtcctaattcctatcaaccatttaagacggctattaatatatcctctgaggttaaatgaggataactccaagatcacacagttggcagagttgggattcagtttcagagtgaccccaaagccagatcttaatcatatttctatattgcggctatttcttttgccaactcctaatttttgggcctgatcccctatctgaggctgaaatctggggccatacccttggaggggaagaaagatagggtcacatagactgttgtctgtcattagcccgtttggcagggggatataggctctgcccaaacgtagacaggctctgagccaggttgcacagatgcaggcagtcctctgagtcaggctgggaaaggctccagatgaaccgccagacttctgtgtctgaaaccctgagagataaagaggaaacttgggtggctccctcagagacaaagtgattctgcaggttcagaatgtgctgaaatccaggccataagaaagtggcaataatacatgaagagggggaatgtgtgagaatcaatcaactctctgctggcaattcttgcttgtaaattgattaattgaattctttcttctccttctcttcccaggctggattttgaggactgaggctcaaaacccccaaacccagatccaatcctttttacaccttccatttccccacatgccaagtctcagagccaacttggcccctctcacccttttcatttagtcaatttttactataaatacttattatcaattttgtgccagacaaacaaggacttattgggaggaagcaacttacaggagaggaagctattaaaagataagtgcacaaataatgaatgaggattgtaatacctgccaggaaggaaaagcagtattgaatgagaatgtgtcttaattcattcctgctgctataacaaaatacctagactgggtaatttataaataatacaaatttctttctttttctttcttttttttctgagacggagtcttgctgtgtcacccaggctggagtgcagtggcgtgatctcagctcactgcaacctccacctcctgggttcaagtgattctcctgcctcagcagattcgagtagctgggtttacggccacgtagctgggactacaggtgcccaccaccatgcctggctaatttttgtatttttagtcgagatgaggtttcgccatgttggccaggctggtctcgaactcctgacctcaggtgatccgcccacctcggcctcccaaaatgctgggattacaggtgtgaaccaccgcgcctggccgattcagattcttattagatctttgtgcttatcttctagcagttctccctgcctcttttgttgcccactgaaggccatgccctacactgtagctagatttttatttctaaaatacagtatgactagtgcctcctcgctttcacattaaggtttgacctctcttgcctagcatagtttgctcaacctccttttcttcagccttatctcctacttttctcctgcaggaacctctcacctcagtccagcacagattcccatctccactactgttcattcatgtttgctctgcaaggatctatctgtccatctctgcctaggaaatgactattctgaattcaaggcactcactgaacatgtgctagatgagaactcaccatggatgaagcactgggtactggacaaggggcaagatcagcgaggaggaaaaagctggaagacagaaggcagcgtatcttctgatgaccactccaaatggaaatatcatttccaaaatagactgtaagctccatgagagcagtaacagggtctgacttgtccactgctggatccctagttgtgcttggtacaaagtagcatagcaattattgaactcttccaataattgctactatgtagctcaatagttttttttcagtgcataaatacatgtgacagatattcttttatttatttttttgagacagagtctcactctgtcgccaggctagagtagagaagcacgatctcagcttactgcaacctctgcctcccgggttcaagcgattctcctgcctcagcctcccaaatagctgggactacaggcgcatgccaccacgcccagctaatttttgtattttttagtagagacggggtttcaccatattggccaggctggtcttgatctcttgacctcgttatctgcccgcctcggcctcccaaaatgctgggattacaggtgtgagccaccgcgcccagcccttcatgtgacggatattcttaaactatcttcccatctcctactggagttacaaatgcatggatctagacttcttaaaagactggacattccttagggcaggggttgtaacttaagtcgtgtgtgcattctttataatgaagcattttacaaagtggtttcacatacattactgcttccgtttctcattacagccccattaatattccccacctgatgaggaaactttcttcattctccttcctgcttcctcttctctctcctcttcctctagaatgcgtgtatggtctatgttccttctgtctctaatccagaaagagatttagaataactaaatgcagagtcaaagattatgtccaaataaagttagagtttgtgtgtgtgtgagacagtgtttttagttaaatgtcaatatttaaaatatactatgacttttataccatattttttcatgttgtcatgttcttttaaacatgctgggagccataaagttaggaagaggcccagtaacccgtccaaagtaacctgaccaaagtctgacccctagtagagggcctatgccagcactggaacccagtgtctccagatccagaggcattcaccacctcaaatctgcctcaaatgtctgcagtatggtctatcacaggggctaattaagctcatgggatttagagtcagacagatgtgtttccttcaaagtttcaacagttactttctgaccttggcaagttattcagcttcctcatttgaaaactagagggcataatggtacctaccaccgagagttgctattaggagtaaatgaaaatacgcttgaagaactcagcatgggcctggcaagtagtcagcgtgcagtaaatggtagctgttattttaagaactttatttgttgaatgattgactctggcacataacgcctgcattcaacttgaaacacggagctgtcacagtcgttcagctgaaggggcgggaactgtggcacttgccaattttttctagaaataaatctttgtgggaggataatgaccggttggagagtgtgagtcttgagggaacaaagatcggatctcccggcccaaggagtacggaagcgaagcctcccctgcgcgcggcagccaccgtgcgtaacctcccctgaaccgagtagcagccgcctgagcccacccagccctgggcgaggctgcctcagaagccggatttcagcagagtgggtgcaggatctgctttaattctgctcatcttattctcggggaccacaccctgcgcgccgggaggaagggctccaaaaccacagggcggaggcttccgcgcggccccagacttgaccatctatggtcacagaacacaccgaccaaacaggaagtggggtgagagcggagggttccctaccttcccagccccgcgactgccagccgggctggggctgacccaccgcgccctcactgacccccacgccctgcgcccagtctccgcaagtcctcccacaacaatgtccagactaattgccttcccacgtcacaaacggggaaaccgaggtatgcacgcccagagacaggcggagcgtggcctcgatcaccaccgagagctgacggccgcccggattcccgccctcagagaatcctggcccccagtcgttccaagaccctttacggactgcagcttaaaggaaccggcctctgccattgagaccaaactgacagaggaactggtcactcttctgttctttccagagaggagcttagccagggacttctgcccttcctgggcccgggcctcgggggcgattccgggtaggtaaagcggaacgagggcgtggcctctcttgtgagcccgccctccccgtgtcgctcccgccttgagggcggggctctttcccaagtgccctctgtgagagccgggccgctctctccggggcgtggcgaagaggggcggagtcacgagcggggcggtgagacttcctgcccagtcgcgggccagcctagcgcttcagccggcggctcatttccggtgggggcgccgcgcccagtgagggcccggaagtgggtcgcgcggagattgctgggcggttcttgccggaagcggagagcggctgatcgcagtccggaggtgaggcggaactctgaggtgagggtgtgcagcttggtagggattggggtcccttccggggcccatcggcccctggtggtgttaatggcccttctggcctacgcgcgtgtcatgaaccctgccgagagggccggggctgaggccctcaggccgacccggactcttgggcgcggtctcttgaggtggggccggggtgagcagctgagtccgggtgccccggggaggcccctctgcccgatttcgcagcgctgcccatcagcttcagcggaggcctgattcctgaggtgctctgactggaaggaacctccgagatcggagagtcttccctgtctcctgttgatgctcccattgcactgataggtaaattgatccctagagaagaggctagtctgagatatatagcgagtgaggaaaagaatcggaatcatgatcctggtgccttagataaccagccccagttcttcccgtgttgctcggaacctctctaacttgggatggtcttccggtcggtgttgccccgcaggctgctgcaggttaaaggccagcgctgcgtggaacttttttttttctctcctcccaaattgagccgtttgaaatgcctagggagtttttaaaagaaaggcgggcacatccttgtatttacaggcagatatcctccctttcctcctcggctgctgctcttactttgacaagccaggctaacattgaaggtatgtacttctggacctgaaatcagacggctcaggtttggtctggcctcagtgctgagtgtctgtggccataggtgccttaaacttctttcagcctccttttgttcatcttttaagtggagatctctgctgaccccacaagattaaattcagcgtaacaaattgtgtttattctgtgccagcattttcccagatgcggggaatgcagctttaaaacaaaacaatgtagaccctgcccgcgtggagctagcagtgtttgcagggatgtttaagaagtaatt

SEQ ID NO: 4493 - DNA, 6000 bp, Homo sapiens
acaacctacagaatgggagaaaatattcgcaaactatgcatctgacaaaggtctaatatccagaatccctaaagaaattaaacaattcatttttttattatactttaagttctgagatacatgtgcagaacgtgcaggtttgttacattggtatagatgtgccatggtggtttgctgcacccatcaacctgtcatctacattaggtatttctcctaatgctatccttcccctaacccaccatcccagacaggtccccatgtgtgatgttcccctccctgtgtccatgtgttctcattgttccactcccacttatgagtgagaacatgtggtgtttggttttctgttcttgtgttagtttgctgagaatgatggtttccagcttcatccatgtccctgcaaaggacgtgacgtcatccttttttatggctgtatagtgttccatggtgtatatgtgccacattttctttttccaatctatcattgatgggcatttgggttggctccaaatctcttctattgtgaacagtgccacaatgaacatacgtgtgcatgtgtctttatagtagaatgatttataatcccttgggtatatacccagtaatgggattgctgggtcaaatggtatttctggttctagatccttgaggaattgccacactgccttccacaatggttgaattaatttgcactccctccaacagtgtaaaagtatagggaaaagaaagagagatcagactgttactgtggctatgtagaaaggaaagacataagagactccattttgaaaaagacctgtactttaaacaattgctttgctgagatgttgttaatttgtagctttgccccaaccactttgccccagccactttgacccaacctggagctcataaaaacatgtgctgtatgaaattaaggtttaagggatctaaggctgtgtaggacgtgccttgttaaaaaaatgtttacaagcagtatacttggtaaaagtcatcaccagtctctagtctcaacaaaccaggggcacaatgcactgcggaaagccacagggacctctgcccttgaaagctgggtattgcccaaggtttctccctatgtgacagtctgaaatatggcctcgtgggatgagaaagacctgactgtcccccagcccaacacccgtaaagagtctgtgctgaggtggattagtaaaagaggaaagcctcttgcagttgagatagaggaaagccactgtctcctgcctgccccgggaactgaatgtcttggtataaaacccgattgtacatttgttcaattctgagataggagaaaaaccgccctatggtgggaggcgagacatgtttgcagtaatgctgccttattattctttattccgctgagatgtttgggtggagagaaacataaatctggcctacgtgcacatccaagcatagtaccttcccttgaacttaattatgatatagattgttttgctcacatgttttttgctgaccttctccttattatcaccctgctctcctactacattcctttttgctgaaatattgaaaataataatcaataaaaactgagggaactcagagactggtgcttgtgcaggtccttggtgtgctgagtgccggtctcctgggcccactgttgtttctctatactttgcctctgtgtcttatttcttttctcagtctcttgtcccacccgactagaaatacccacaggtgtggaggggcaggccaccccttcataaaagcattcctatttctccacatcctctccagcatctgtggtttccagactttttaatgattgccattttaactggcatgagatggtatctcattgcggttttgatttgcatttctctaatgaccagtgatgatgagctttttttgctctgttttttggctacataaatgtcttcttttgagaagtgtcgtttcatatcctttgcacactttttgatggggttgtttttttcttgtgaattttgtttcggttctttgtagattcgcgatattagccctttgtcagatggatagatcgcaaaaattttctcccattctgtaggttgcctgctcactctgatgacagtttcttttgctctgcagaagttctttagtttaattagattccatttgtcaattttggcttttgttgccattgcttttgatgttttggacatgaagtccttgcccatgcttatgttctgaatggtattgctgaggttttcttccaggctttttatggttttacatcttaagtttttaatccatcttgagttaatttttgtataaggtgtaaggaaggggttccagtttcagttttctgcatatggctagccagttttcccagcaccatatattaaataggaaatcctttccccattgcttgtttttgtcaggtttgtcaaagatcagataattgtagatatgtggtgttatttccgaggcctctgttctgtttctttggtctgtatatctgttttggtaccagtaccatgctgttttggttactgtagacttgtagtatagtttgaagtcacgtagcatgatgcctccagctttgttcttttggcttaggattgtcttggcaatgcgggctcttttttgttccatatgaaatttaaagaagtttttctaattctgtgaagaaagtcaatggtaccttgatgggaatagcactgaatctataaattattttgggcagtatggccatttttactatattgattcttcctatccatgagcatggaatttttttccatttgtttgtgtcctcttttattttgttgagcagtgttttgtagttctccttgtagaggtccttcgcatcccttgtaagtggtattcctaggtattttattttctttgtagcaattgtgagtgggagttcactcatgatttggcttctgtttgtctcttattggtgtgtaggaatgcttgtaatttttgcatgttgattttgtatcatgagactttgctgaagttgcttatcagcttaaggagattttggactgagacgatggggttttctaaatatacaatcatgtcatctgcaaacagggacaatttgacttctgttttcctatttgaataccctttatttctttctcttacctgtccagaacttccaatacaagcaaaaaacaaacaaccccattaaagacacagacacttctctaaagaagacatatgagcagccaacaaatattgaaaaaaatgctcgacatcactaatcaacagaaatgtgaatgaaaaccacatctcacacaagtcagaatggctattattaaaaagtttcaaagcaacgtatgctggctaagctgcagaaaaaaaaaaatcatgtgtatacattgtttgtggaaatgtaaattagttccgccactgtggaaagcagtttggagatttctcaaagaacttaaaatagaagtactatttgacccagcaatcccaatgttagctatctatccaaaagaaaataagttgctctaccaaaaagacacctctactcatacattcatcacagcactattcgcaatagcaaagacatggcatcaaccttggtgcccatcaatggtggactggataaagaaaatgtgatacatatacacagtggaatactaggcagctgtaaaaaaaaaataatgaaatcatgttctttgcagcaaatggatgaattgggaggcaataatcctaagcaaattaacacagcaacagaaaaccaaataccacatgttctcacttataagtgggaactacatgttggatacttatggacataaatatgggaatgatagacactggggactactagaggggtaggtacagatatgagtaaccattggaaatttgactaatatataccatactcactacctgagtggcagaatcatttgtatccaaaccttcagcatcacacaatataccagtgtaaaaaacctgcatacgtacctgaatctaaaataaaagttgaaattataaaaagaggaacaaaaacaatgctcatgcacagatatgcatgtaaaaatgccagggagggttaattcatagcaatagttactatttaacctactttacttgaggttgacaaagaaatcattttttaaatattaatttctgtttagtacagattgtccttagtcagggctcctaaacagactgcaaagttctgattgtataattacatactattgtaggatgaaagagaattggtaaacaggctcctgctgtggctatagtactagactgaagtaggactaaaattgctctaggactttctctggtagagaaggtagacctatcaatgggggaaaaagtcataactaacatgatgtagaatttttttaaattgtcatgtatatgaattgagaaaaaaatcatgctatggatattatgagaccagtctccccaatggaataaaataaagtacttgaacagctgccatgttagcatctgtttgtccatatcatcatccagttaatagaaagacataattcccactcctcactcaatatatagatggaagtggtttttatggtaaataaaattagattgcaataagacaaaagtaatgattcagggcttggttaatgttaagtttaaatatacatatcatgttgagaattttctttgaacacataacaaaaaaaaagtgctactgaatgaacattattgcaatgtagtaaagcagaatgcaaattccttgaggtcagcattcaagtctgttttcctcgcagcggtgcccacacccctagcatactgcctggcacacagtaaatgctcattaaatatttgtgaggtacatggacaggggaatgtggtagacagctgatgaagctgttctcccactgttcccctaggtggatcatccaaagtcaatcgattctgaactctgaggtccaagttctgccctcccccttcactctccccacaagtgggcgggacaatcctcccatgacttaagcacaggtggacaggggtggtcagagagaggaaggggcactcagagatccagcaggtgctgcaccatgagtgtctctgtcctgagccccagcagacgcctgggtggtgtctccgggatcctccaagtgacctccctgctcattctgcttctgctgctgatcaaggcagctcagctctacctgcataggcagtggctgctcaaagccctccagcagttcccgtgccctccctcccactggctcttcgggcacatccaggaggtagggaggaactcagtgggggagtgggagggcaaggagggatgcggctctgagaccctggtcacaaaatccatagagcaaagccttgttttgtaacaaacgtgaggcctcataggaacacccagcctacctctctggtttcagcttgtcccagtcatgaggagctcactcctcccatgaagcccatcctgctggtcctcagctctatcacacatgccctccttctgcagatatcaagtgtgtcttggcagtcctgcacatggagggcaatgcctgattgtctccagactgattaccccataagccttggcttttctcaaagaacaaggcttctagatgctccctgtccagtcactcaatgccattgtctctgcctggccctgcatttgcctgggagcacagacacccatctgaggactctgtgccatgaggagttcatggtctgtgaagaatacaggcaggaatttgagaaggtgtcagactgcaggaaaagagctcactctgctggggtggatatctgaggcagagatctgctggtgtaggggaccaactggctaagtaagtttccccaaggctcacggaatttccacaacaggtgatttaggacctgaaaacctgacaattgtgggtacacatgaagggggcagcctgcacaatgtcctccaagtgaggagactggtgtttgagttgcacattgaacagggtgtattgacctcctggctctcctcccacgcacccagactgtgagctccctggaggtgagcatgtcatccccttcctgtgc

SEQ ID NO: 4494 - DNA, 6000 bp, Homo sapiens
ggcaagtgcctataatcccaggtacttgggaggctgaggcaggagaattgcttgaatccatgaggcagaggtcgcagtgagccaggattgcaccattgcactccagctgggtgacagagtgagattctgtctcaaaaaaaaaaaaaaggagagacagagagaaaattaacctattttaacctattgctatgcagatagtaacagtttattataattattatataattaagctacttcttgcaaatgtgaagattctctattccctcctcctgcattttaatacagaagaaattaagaggaaagtgcaatgaacttactaccattatattttctaggaaataagtgaaaagaaaaatagttatagccagaataataaagtggttttgatacactgactatttcttgcctctcttggagttcacaacctctccctctaccagctctatctttattttatgtatcatttctctcgggataaaaccaacttcactcatcatgaccagaggccttccagtcagattggcagctgtattcttggatttattttagtctaggttcccctctttgaactgatttatgcctttttgtgttgatgccttcagcagttaatttcatagtttaactactttttctataagaaaatactatctgaacagtttctagaaattacatcttcttctggcaaaaactgcttctggtgaaattacttctacttctggtgtttttgtgcacaaaaatacccaaccatagtaagtgtaatacaaacaccttgaaatactacctatcagtacctttctctctgcaaggtgtagaaggatggctattccactttcttccaaggctgatgaaaaagaaatggaagtgacttccacttgaaaatcatcagctccatctcactttgaataaaacacagttgatcttttaggggcttacgtgtagatttgagcctggcctagatgcctctttgctggcacctattaaataaacagagtaattaaatgataggtaaaaggtctagaactcaggtgtcattactgaaaagtgttctctttttccccttcactttcttctccatagaaattccccaacagcaagttggatatgatagaagacttagctttactttacataatatttaaggttaattgtttttggatgttttcccagttgttgttgtttttaaaggctaaggaaaagaagcaacagagatttttccttgttttgaatagagaagacatataacaacttaaacaggacagaaaacattgcaagtagatgcctttcccacaatggagctgtgaacttatcctgtaatgtacacttcatagctgtcttatttgagcaaatcctcctgagccctaaaattgatttgttgtattgcttccacattttttgccaacagttatttagacagagctgaacatattaaacactggttgagttccccattgtcctgtctggcactctgtttccatccataatgtacactggtgtacattagatcactgaggggctcattattactgaattccagccacgacttcattcctaaaaaacacatgtgcctgcttggtattgcttgtaagctttaagctctacttttccctctctctgtgtgtgtatgtgtatgtgcatgcatctatgtgtgtgtgtgtgcatgtgtgttgttttcagataataggtacagcataaaatctttttagattataatttttgtttctattgcacattctcttatggtgggggaatttcaggttaaaaaggaaaataccaactctgtctaattaatgtcaaaatttaggtgaagtaggtgaggagaggttgaaaatttgtggtaagtagaagagtatgaataaagttaactgcaattaaaaccacttaacctgtagttacatttcccaaacccaagtggcagccttaaaactgaccactgaattatggaaactgaacggaaaaaggctttgtttcattgcatcgaagtatttttcttttcccattttgggtgcattgatctccctgtattccctggggttgctggaaaaacttggtcaaaaaggataattactttttttatttagttgcatgctcttcaaaaggcaacagcaagtattcattaatttccatctgatagagccgaacttttttttgtggttaaacaattgaaacaggaaatgacccaagatacagtttccatgacaccctgtcacttggatccagttttccagaagatgaaagaccaaagccggcttttgatagtgagtaactaattggactggctgatagtgggagttttttaatgtgaaaaataaaggagaaaaaactggaacagctgtgttttggtacagttgtctaatccccagataaaacactccaaggacattgaaattgaataatgcctttagttaaggggaaaaatctaaaatctgtcaaagcactggtttactttagagaaaatacagaatatatttacatggaaaacccaaaacaaaacaaaacaaaactccaaaaatttacagagccaagatactaagtcatgccttttaggaatcatctttgttcatacaaagtatgatttcatatttttaagatgaattcttacatgtgaataaagagagtacttgctagactactttttcggtcaacattttcaaatgctgtgtagcatggtgggtagacctgaagagttttgttagaaggatgaaaaagttttgtttaactcatgttaaacaatttgaggcatacagttagaagtgtttttactgatgatcccccccatacatacataaatgtaggttccaattgtttatattttgtagagcttctttagagaattaaatgtgaataagccagggatttgttagactaatgggtaaaacttcctgtatactaatggggagatcattgttttgggctctaattctaggccttgctagccatcagcatagtgacctgtgacgctgtttcccttccttttgtaaatgaagaggttggggatagtccttatataatagctcttgtcattctgcctactttggaaatgtaggacaagcactgacctcttctaatataaaggtaatcctggtggacacaatggagatgcacatgaaaaggtgaaaatatttttatttttttgagacagggtctcactctgtcaccaaggctggagtgcagtggtgcaattatggctcactgtaacccccacctcctgggctctagcgatcctcccacctcaggctcccaagtagctaggactactggcgtgtgctaccatgcctggctaatttttgtattttttgcagacatggggttttgccatgttgcccaagatgatctcaaactcctaagctcaaaccatcccacctgccttgtcttcccaaagtgctgggattacaggcatgagccactgcacccagctgctgaaaatgtcttaaaaggagaagacacctattttacttaaatgtgacacaacatttaatcactggaacttaatggtatgcattagaactgtttcttgaggaacacagtctctgacttaatgaattttctagcaagtctcaacctttctcttttgggtgtaccagaattctctcgtcagttttccattagttggatttacctgttgggtttaattctttcattttgtatataggtacctctgcttggtttcattttgctttcctaagcaagggagtagaaacagatgttaagactgaaattctactatatttaggaagaataaataaatatatcttccactatggtataatggaaagatatactgacctgggcatactcatgggcaacgtacctgttgtaaatcccctcctttgcaaattgtacctactttgaggtggactgcaagttctatgaggcctgggacctccctgcaacccttttacaaagccggcagtgtagtgctatctatgcctatctgattgagacactgatcagatgtttgaatggattgtgaagacggtgcgaggatgtacaccaggagcacacagtggctgttcaagaaatggtgatagtttttgtttatattttcatttccatgaattgatattttgatattgataacagcagtctttgagaccaagacttccaaacttttttctggaaataatttttttcttcctcacccagaagaacatttattttctggatgtagttcagatttcttctaaactttatctcacttggtgtgaaactagaggtatagaggtaactttttattataccaccacccaattttaagctccggatgaccgtgcaggaactgcttttgttttcccaaggccaccatccccagtgcagatggaaaggaacaagatacaggagggcagtcaagagcctctggggagcccctgtactggtacctgctcagccccgggagccacaggcattactgtcagggtggctgtctccttattgctcgtcttgcaactgtcactatgctgcgaggtctggaggggaggggaggggaggggacattcctcctgctgcacccttggaggctgcgggctttcctgggcctcggagagcggctcagcgaaggccctcagctcaggagcctgattaggtgcataaaatcgctgtagccagaagggacctccccgcccccgggccgcgccccgccccgccccctcctctggggcacaccccgccccgccgcccctccccctccctgggcacaccctatgccgccgttcctccccctccctgggcgaaccccaacacctccacctcttccccctccctgggcgcaccccatccacgcccgaccatccccctggaccccgccgcccctccccctcttggctgcgccccgccccgccttccgggcgccctccttccccggtctgccttctccctgaccctcctcccggtcgccaggaccccgcggcccgcgaggcagctctttgttccccggcctcgccccgccccgccccgccccgccccgccgggtcccccgcttcgtccccggccgcccgcttgtctctcccctcgctgttctgcccctttgtcttccacgcctgccccttcaactcctcttgccctgcaaaccccgggtcgccacctccacatcccttccacttctacctgcctgccttggcctgcattttattttcaaccaaggttgaaatggtagccccacgcaaaatccgatggtgtgtggaggaactgcccagtcattgcagtctgcacgccttcttaagtgccaggtgcgagcaaggccgaccaggaactgccgatgggcttcacctgtcagactggactgccacctgccacacattcattgaacttttaataagcactgccgctgtgcttggcgttttgctgggctccagaaataaaaaattcagagaggccaaagttcttcagggatgcagacaggtgatagaaccatcatttattgagcacttgctaagtgctaaatactcttacctgcgttatcttgtgtaatcctcacaaccacactcaacgacggcctattgaatgctctctaggtgtctggcagtgttccaaacagtttatgtgtattactttgtttgatcttcccaaccaccaatgaggtaagtactgttattttaatgcagaggaggattatggagggacagagattaaatgactcagagccacatgctcatgacagcagagccaggagtcaaaaccaggcaggttgtagtgggtatactgagagaaaatacgtgttttttttcctagctggaattaagtggatgtgtcaagaaagattcagaggacgtgattcttatgctaagtatctggtgtatcttgtgtcacggttttgttcttgcccgttacttactgtgtttagagaagatgttcaaagagtacctagaaaattgttttaaatacagttaaagctgttcggtattttcacttgcgtttttctgtgtaatacatcaaattgcctgttcttcgttcaagtagctcccccattagagcatgttttttggaacagttaggaacctatagttg

SEQ ID NO: 4495 - DNA, 6000 bp, Homo sapiens
gggtctcagattgaggcctaacagcatttaaaaggagcaactggtagaacagatttggggaaatatttatgggtagaagagaatgataagtgagctacagaaataggtagaagcccatctaaatatcaggtaagtatcaggggggttatggaaaatgctttggtacccgaaagatactgagtgaatgctatttgaaggaccaacaggagacagtgatggtgcaggggaatgtttagagatggcagagagaaatgtaagacatcaagatcagtacatattgggagttgaaacttcggaaaaatctcttggggtccagtgtgaaatgtgagaggtcatgtaaacattcagaggcccaaggatctggcctggcttctgaatgaccacctgcttcttccccctgtgtgtgtccccaggttccggaatgaggactacaccatacatgtgcagctgaatgactacgtggacatcatctgtccgcactatgaagatcactctgtggcagacgctgccatggagcagtacatactgtacctggtggagcatgaggagtaccagctgtgccagccccagtccaaggaccaagtccgctggcagtgcaaccggcccagtgccaagcatggcccggagaagctgtctgagaagttccagcgcttcacacctttcaccctgggcaaggagttcaaagaaggacacagctactactacatctgtgagtgcctgtgaggggacagtgtctgtgtttcttttttgccattacatacatgcttgggtacatgcttggtgtagagtccagcagcagagggccccttccgatcttgaattctattttcattcatctacatcccaatgtgagtgagcttctactatgtgctgggcactctgtttagcgctatgagcacaaagataaataaaacactacagagcccctgtcctcaaggaagctgggaagaaacacacataggttaagagacccttagaacagtgtgctacagtagacatgaacacaggggccttgggaaaatgacctgggcacctgccaggctatggggctcagagaaggctcagtggggaagatggtcccagagctcaggacaagcagaggagctggccaggcatgaaggcacacgtacaaagggagcatgacatcttcagggaacttcctgtggctcagcctggctggagttggagggacacaggaagtgaggagatgtgagcctggagaggtggacagaacagaccatgggggaactaaaaggtgataaggagtttggactttatcctgagggctctcgccactgatgggttttattttattttattttattattattattactcttgagatggagtttcactcttgtcgcccaggctggagtgcagtggtgtgatctctgctcactgcaacctctacctctcggattcaagcaattctcctgcctcaacctcccaaatagctgggattacaggcacctgccaccacgcccagctaattttgtatttttagtagagatggggtttcaccatgttggtcagactggtctcgaactcctgacctcaagtgatctgcccgcctcagcctcccaaagtgctgggattataggcatgaaccaccgcgcatggcctgatggattttaaaagttatgagatcatccagcactttgggaggccgaggtgggtggatcacctagggtcaggagttcaagaccagcctggccaacatggtgaaaccccaactctactaaaaaaatacaaaaattagccgagtgtggtggcgcacttctgtagtcccagctactcaataggctgaggcaggaggatcgcttgaacccaggaggtgtgaggttacagtgagccgagatcacaccattgtactccagcctgggtgacagagggagactccgtttcaaaaagaaagttatgagatcagctttgtataagatggatctaggactctgtcggtgggggctaggcaggagtagtttttgtttttttgttttttttctgagacagagtctcgctctgtcgcccagactggagtgcagtggcacgatctcgacttgctgcaacctccacctcccgggttcaattgattcttctgcctcagcctcccgagtagctgggactacaggcatgtgccaccatgcccggctaatttttgtatttttagtagagacggggtttcaccatattggccaggctggtctcgaactcctgacctcgtgatccgcccacctcggcctctcaaagtgctgggattacatgtgtgagccaccgcgcctggcctaggagtagtattaagtggcccaggcaagaggaacatattcagactcggaggaatgaaggatgaaatgtggggaggggcagtgtctatgctgagggttatttccaaagaatgagaggctgggctgaacattgggcaggaagttagcaaaaactaaggagggtaggaatcaaggttagagggaagagaagaatgaaattgagtagggagctgagaaagcagggcgaggggcatttggacttacattttcttccagcaaaggtttcttatttaacccctgtgggcttatcttgcagccaaacccatccaccagcatgaagaccgctgcttgaggttgaaggtgactgtcagtggcaaaatcagtgagtgtcagagccctgtgggcctccttcctccatctctatgctgggtgcggtctagtgatctaggatggtatagaagtcttgcagcccagcccactcatacttacagccctctgcctctttgatacagtacctgatctactaccactcttgtctttcagctcacagtcctcaggcccatgacaatccacaggagaagagacttgcagcaggtgggtagctggagcaaactgggcctggggcacaggaaggggtctgcttgaagaggttgggtacaggaggtggctcctttaccaggctgaggctgagggaatcctgttgggctgagagccagtacaaatagtggagccactcacactggtggcctttgccctctcaccttgcagatgacccagaggtgcgggttctacatagcatcggtcacagtgctgccccacgcctcttcccacttgcctggactgtgctgctccttccacttctgctgctgcaaaccccgtgaaggtgtatgccacacctggccttaaagagggacaggctgaagagagggacaggcactccaaacctgtcttggggccactttcagagcccccagccctgggaaccactcccaccacaggcataagctatcacctagcagcctcaaaacgggtcagtattaaggttttcaaccggaaggaggccaaccagcccgacagtgccatccccaccttcacctcggagggatggagaaagaagtggagacagtcctttcccaccattcctgcctttaagccaaagaaacaagctgtgcaggcatggtcccttaaggcacagtgggagctgagctggaaggggccacgtggatgggcaaagcttgtcaaagatgccccctccaggagagagccaggatgcccagatgaactgactgaaggaaaagcaagaaacagtttcttgcttggaagccaggtacaggagaggcagcatgcttgggctgacccagcatctcccagcaagacctcatctgtggagctgccacagagaagtttgtagccaggtactgcattctctcccatcctggggcagcactccccagagctgtgccagcaggggggctgtgccaacctgttcttagagtgtagctgtaagggcagtgcccatgtgtacattctgcctagagtgtagcctaaagggcagggcccacgtgtatagtatctgtatataagttgctgtgtgtctgtcctgatttctacaactggagtttttttatacaatgttctttgtctcaaaataaagcaatgtgttttttcggacatgcttttctgccactccatattaaaacatatgaccattgagtccctgctaagtgcgaggctctctgtgctacaacagtagcaactgggtttgaatttctttctctccaaagaatgtgtgcccctcacgaggccaaaagggtgggatgtttcctcctctgagggctgtccaggaccggagtgctcctgacagctgtctctcgggttctgagctgcactccactctggaagttcttcctatccgacctctaccccactcccactccgtcaccgcagggctttggcatactaccattcaggtactcacgctgtttcggtgagtcagggaagctgggaacgccagctgaggcatgcggccccgccccacagccacactagcagagacgtgtgggaggctgggagggaaagttcccagtaacaagtgggttggaccgggggtcagtgatagaggcgtcagtggattggccacgtcatgtaaagttgacccgagagggagggcaaaagaggaaggcttggtgattcctggtaatgtgttattttgagaaaaagcttcggcagcacactccagaaaaaaacttcccaaaccctgggcaactgaggttctgatgtggagctctggatggaaagcgtgctgaagtcttgttaaactagcaagcttttgtttggaggtccaccgccgaaggcgcacaggcctgtgggaacacgagcgttgagactgggggcgtctagatgatccaaggggtaggcagagtgtgagcagcggcaggtatcggggacacacccgcggagccctaggaaggggactgaccgggacatggaagaggtctggaccagggtactgggaaggcgctcggaggagaggggcgcgagttccggttcggcgtcggagggagggtggggcttcggcgcagtttccggagggacggcccgagcgtgcgggggcggagccgagtgcgcggggcggggctccagagccgcaggtctgggctgcagtaggtcccggcaaccgcaggctcgcggcgggcgctgggcgcgggatccgactctagtcgtaatggaggcgggcggctttctggactcgctcatttacggagcatgcgtggtcttcacccttggcatgttctccgccggcctgtgagagtgcggccgggctgggttggggaggactaggcagtcaggaaaggagagagaggggacagagacgtggccacagcacctggctcgtccggaaccgggatcaaagtgggatcgggtcgaggggaccggggtacaagggcgaggctggtcactaggcctgaaggagaaggcaggatagctggcgggggggagagggggcggggtctgcggtggtccggaaaggatgacaggcattgggcatccccctctagcactctgcttctcccttcccacccccacccctcccttcggggccccattacagctcggacctcaggcacatgcgaatgacccggagtgtggacaacgtccagttcctgccctttctcaccacggaagtcaagtgaggggccgacggctgcggtagtgggaaaggctaccagagggaggtgggggcggggcaggaggagcaagagtgaaagaggtttggccgggcgcggtggctcacgcctgtaatccctgcactttgggaggccgagacgggcggatcacgaggtcaggagatccagaccatcctggctaacacggtgaaaccccgtctctactaaaaatacaaaaaattagccgggcgtggtgccgggcgcctgtagtcccagctactcgggaggctgaggcaggagaatggcgtgaacccaggaggcggagcttgcagtgagccgagatcgtgccaccgcactccagcctgggcgacagagcgagactacgtctcaaaaaaaaaaaaagagtgaaagaccctttgggtcctcctctcacactgaaccctttgagccatgtccatcccctccaccctgcagcaacctgggctggctgagttatggggctttgaagggagacgggatcctcatcgtcgtcaacacagtgggtgctgcgcttcagaccctgtatatcttgg

SEQ ID NO: 4496 - DNA, 6000 bp, Homo sapiens
gcgagtgtgcacaagctctctggtgtctcttcttataagggcactaatcccatcacgagagccagccttgggacctcatctaaacctaatcacctcccaaaggccccatctccagttaccatcatattggggttagagcttcaacatgaactttggagagacacagtctggtccacagcactcctttctctctcaccctcatacctaaaccttcagtaaatccaacaggatgtaccatctaccttccaaatacatccggaacctgaatacttctcctcttcgccactgttaccatgaccatctgctcttgcctgggttattgcagtgacctcttgactggtcacctgcttccactggctcctacagcccatgatccccaggcagccaggactttaacataacaaatcggatcatatgacttctctgctgttgaccccttagttgctccccatagtcctcactgtgaagtccctgctcctcactgcgccctgggtgcactggcccaactgcccctcctcccggcatgcccctctcacggctcgtataccagccacaagctgctcagagccaacagctcttgccagaccttgaggactcatcatctccatcctgtctcttcctaccctgtgtgtgctatctggcacacagtaggtgctcactcaacacatgtttgttaaatgaaggaaggctttgtcttcctccaaatctcctctgttcaagagttgttatggactggacacataattgcagcacttggggaggctaaaataggaggatcatttgagctcatgagttcaagtccagcctgggcaacatggaaaaaccccatctctacaaaaaaatacaaaaattagcccagcaggtggcttgcgcctgtagtcccagctactcgcttgggaggctgaaagtgagaggatcacttgagcccaggacattgaggccgcagtaagccaagctgtgatcgcaccactgcacttcagcctgggtgacagagtgacacccagtctcaaaaaaaaaaaaaggtattatgtcactggggctgctggtctgatggtccttcctgaatgtgtctatcctaggcccccagcccctgctgccacctccctccagtcaatgacaggagaatgcatcaagactctgcctgccccctccatctgttcctatcctcagagacactatcaccctgtagtgtataggagccagccacccatttgcccttcctgctcagccaatcagaacaagaataatcagcacatctgctgaatgcttacaaaaatgccagtgatctacctcaattatttggaatccttatacttccacaaaagaactatgttattactcctacagataagaaaaatgagactcaaagagggctcaattacttgcccaaggtcatacagtaaagatgttggatggatgggtggatggatgaatgaatgaatggatggatgaacaagagccttattgactctggtgctttgctgtttttctctctttccaacataaacactgggggtggctccatgcaactaaaggagccaagtggctttggggattcctgagccaagagagcaggaggttgggaggagttgaccctggtagaaatcagctctgagcagccccaagttactcagtaacctcaaatacttggtccccagggacaaactggccaatcttggccagggcaggcagcagacactggttccccttggccacccttctgttgctcagctggtcacagctggaatctggagatggaaggtcaaagatgggacagacctcaggccaggcagaatgagagctgatggtggggtcaggggcttctcagaggaggcctggagtggaaggaggagtgagagatgaagccctcaccattccttcagagctaccagggccagaggaggcaggggaaggaccaagggccttgacatcacttcacaatccaaaaggaaaccatggactaagcctctccatagtgtttggtaggtggtggtccagggggccctctaagatcctctcaggtggcagcctggcaggggagtcctcagacaggtgggagccagggaggggaccctcagaaggggagggctgcctgggtcttgctctctgctggaccagggctgataccagctcagctggtgctcactggctgttgaaataccaagattatcccattcaagttggcaagtagctgttgcccaaaggtctctaagtttaccctccagagactggcccagctctcctgggccagggggattcctttagatctccccataatccagcaatgaagaggttaacacctgccaggcagggggccccaggaccgagccctgttttataacttgactagaacctgtggttgtagccccagacctggcccaggattggtgctaaatgagtatttgttgagtgaatgaatgagcaacagaggagagagaatcagagacccagaggaattaaaagagactaagggccacaacaggtgacaaagagatagaggaggctggaatcagggaggcagttcccagaagatgctgggaaggcccagcctactcctccttgttttccctggtttgcagcttttgaaggctcttcccatcccagggcctgtccagtccctgattggacagccctgagcaaccccccactcccaaacaggacttaggcagtgtcttggggcagaaggctgggcctgggtggatcctccagatgctgaatcattatacaaaggattctgacctgatataccttttgccccaggaagggctagaaagcaagcttcctgctgagcaagtagggacagagagtctctctgggacagaggccactgagggtcagaaagcccgcctggccagccgggcgcagtgctaccagagtctgccacccagagtcggacccctggctggcacctgagttagggaaactggatacctagaatccaactgtcctccagagcccactgtgtgtcagaggctggagcccctgaggggaggtagaagtgagctggggaaggggcaggaggaaagaaaaggaagaggttaggggctctactcttgaccccatccctgcccattcctgagaagcagccctaccctgcatctgttctggggggaggttgtcccctggggacctaggccatactcatgggagtggcagcttttcctttggactggggtttgtgacaccattacagacactcacgggttccttccacactatgactccctcagacaggcgggcctgggatgggctgccgctgcagcgtagacagagagcctcccctcccaccagccccatggaatacttgccttcaccctgtggaggtgtcaggtgtcagaaccaatagtgccagggttccacacctatttagaacccttcagtggcccagaacccactgagtagaggccctgtgccttagcagggccttcagggccttcccagcaccacccccagcctcccccaacctgagttcctgaacacacgggatgcttacactgccaggctcggtctatgttggtcccacttcttataatgtctcctcttccttcttcacttgtccaattcatagattgtccttccagatcaccttcatacattcattaccttctcaggaagcaattctccatctcagtcccctcccttacccctatccctggggcctctgcggcccctcctcctggacccctgcagtctctgttcttctctgggttggtcgcttatcccactggtaatcaaatttcctcctaagtgtctgtctccacaccagacagtggttcctggaggaaggggctatctggttcatctccaaagcctgcctcacagtaagtgttcaataaatgtctgtctcctccatgtctgtctaccgggcccccagtggatgccaatcttgcttgggtaatgaggaactctggacttggaattgagaagccctccttgcattcagcctccctccgctccagctgcagaggcagcccaggctctctcacatccacagtgggcacacagggaacctgggtgtcagtgtggcccctgcccagcctgcttccctgtggtgtggtacagattgggggtaggaagggggagagtcccttaccttacaccgcttggagcggtgtaagggactccactgcagaggcccagacgccccagcctggttaatcatcagtgcctggagagcactatttatctctgttttccatctctgctttttcagtagggaaaaagattaagtaaaccctaactctctcttgtgttaaccctagaggggccagaccagagttttgtttgtttgtttgtttgttttctgacagagtcttgctctgttgcccactctggagcgcagtggcacgatcttgctcactgcaacctctgccttctggattcaagcgatcctcctgcctcagcctcccaagtagctgggactacaggtgtaccaccaccacgcccagctaatttttttttcttgtatttttagtagagacagggtttcactatgttggcctggctggtctggaattcctgacctcaagtgatccacccaccccggcctcctaaagtgctgggattacacgcgtgagccaccatacccagcccagaccggggtctttaagggccatttattctttgggagacactctaaagtaacatcatgtatgagggtgcgggttctcccacccccaggtcccacagctgtgccctatcagggcagaacacatggcgcctttccagggtcgcgtccaaggacctggcaccgtaacagtgccaggatcagcgccaggactgtgcgactcccttccccaagtcttggccctaccttgggccgagggtccaggaccccccgacgccccgctcctggtccccggggccctgggcctgcggcaggtgagggcggggcctccgtgagcagggcctctgtgggcggggctccgtgaaacctgccctgccgccgggaattgtctgccaaagcctgcgagcgccagccgagatcgcagcccaacccatggccgggtctcctagccgcgccgcgggccggcgactgcagcttcccctgctgtgcctcttcctccagggcgccactgccgtcctctttgctgtctttgtccgctacaaccacaaaaccgacgctgccctctggcaccggagcaaccacagtaacgcggacaatgaattttactttcgctacccaagtgagtgcggggtgagggcgcgcgggaagcaaagaccccaagatttgcaaagaccctccggtgtcttgggagggagcatttgggtgcccgcatttagctgggcagccgtctcgctctgaggtggaggggctctgggtttaaaatctcaccctttcactagtgcctgctatgatccagggtaccgtgctgatacatatgccttatctcacttagtctatgagttagacaaaggtggggaaactgaggcttggttaagtggctgattcagggtcacacagtcacaagtcagggagttgggattggaagccagatctagagccccagctttaaccatcctcttgtcccacatctcagttggcctaattgggctttgctgggctgttccagagactgcctttcctaggggctccaccctgagcatgggaaagagaatcctgctgggcagggaaggtaagagtggggttgtgagcggtcataatggcaggtgttaggtatgaatcgcccacacgtgtaggcagccaagaccagttgggatcaggcatttcttccctagtccctcaaagctggtcctttcagagacaaagagaaaatgaggcaactggccagtcgtggtggctcacacctgtaatcccagcattttgggaggcaggcggttcacctgaggtcaggagttcaaggccagcctggccaacatggtgaaaccccatctttattaaaaatacaaaaattaggccgggcgcggtgcctcatgcctgtaatcccagcactttgggaggccaaggtgggtggatcacgaggtcaggagtttgagacc

SEQ ID NO: 4497 - DNA, 6000 bp, Homo sapiens
gggaagaagggggagaccaggagtgggagggaggaaaggatggagcctcaggcagcctcgcagtccggccacagtgtgtgaaggggattgaccagaaggaggtatgggataccctccctctcttgccactcctgccctagtttgcagtttgccacagtgattttaaaggcagcatcagaagccagacaccaagccctagggcctcaaacctgactcctatagctgggagtgggggatgaaaatcaaatttggagcagagaaaagagccaaggccaaggggctgttaggagacctttactgctggggactgtgtcagtaggagatgccatggccaggaaggggtggggtggggagagggagcagttattcccagcccagagtctgtgacccacctctgagaaccctcggtgggtctggctaggagaagggtgaaggggagaggcctgagccttaccaagaaaggaggctcatggagaaaggaaaggcaggcagaagggagggaagcagaacggccagaagtgtaagtgggtggagagagggtgaataggggtcagtaggacagacatggcgggaggacaccgcaggacacagactccagagatgcctaccttggctcttcggggtctggggctggggcttccaagaggagccttgacgttgcacatgggaccttgaccgctggcaggactcttccggcgtaggatgtgagccccaggtcccccagcagagttaggggtgcctccctccaggggctggaggtggagttcagccccccgatattgtaacacgcctaacagggctcccccatcccagtgcagagatgccaccgactccggatctccattgatggtgccagtcaggtaggtgccaggctctgctccacccagcagctcaggcgcctggcccaggtactgcactgtcagcccctcgacctgcacaccggagtcctgctccagctctagtagcagcgtctccccaaaggcctgcaagcggcacaacagcctggcaggggcgcccgagccaggcaggacgctgccgttgagcttctctggaaacacgatctcctcctcccgggggagggggctggccagccgggctgagggcaggagagaggccagcagtagcagaagcagccacaccagccaggagagcggcacaatggggagcaggaggcagggttgggctccccacagccagcgccctgccaagcccctcccgggatgcgagcctgtctgggacatggcactggtactgcagctgggagggactgaggccgtctagggcaccaagtcctccacaccctagctttggaaagctcctctctgtagcctgggggcttggactcctgccaaggtcagaggcaaagttttcagaagggctgaggaccgttaaaggaaatggagaaaacttagtccttgggcttgggagaggtgcccaggggtctggcttctccaaactctcctcctgagccctcctttcctggatctttgtctctccctgcctgtgtcttctgcagcttctctggcctctccctctgtaggactctgtctgggccgcttctgtgcctgccctgtctctgccttcttccgctgtgcctttgtctctgtctctttcctcctctgtctctctcgtgcatatgtgtctgtgggtctccctgtgggttctccccagcctctctccgcgccagctcttttaagcatggtgagcctctgcgattgattggctgatctctaagccactcagctgagctctgtcggtgggactcagatgggtgtatcatcgcttcccaaaaaaatgggacttgcccaggggaggggaatctctagcagccgaatggataataggcactgggccagctgatgacatagccttttcccaaaccccacaatcagccctcagctgtctctttccctttttggtgggacagagccccaggagaggcagagagtgagggaaagggcctggccggcatgcacagataggatcacggtcctgggagaattcctgctcttatagtctaacctaccatggcttctcttttctcaaggctccctcatgctgccctttggccctagtggctggtttccagggctgaggggactgagtgagctgcctgagaaaagagggtagggaacaggtaaggaggcatcaagagggaagaacaaataaaagaggtagcttgacatggctcaggatagaactgagcagctgggaagagtaaaaaaggcagaacattgggggaggcaaggagacagtgatcagggagttgactgcccaaaggtaggatgatcctgcttggaatgaacataacagaggcggcagatgacaaggcaggaggggttaacgacttttccttttatagaaggcggatccagggtggcacctcctcttttctaacgtcccttctctccctcaggatcccccttcctgagttaccactacccaccccctccaaagcccagaacagccattccgcctccatttccccccagggttccccctccccacttcctgactccccatttccctggcccagctcccagtagcttcccccaggcttttggccctgctcctacccactcccaactgccctaaaccctcccccagcctcaagtcagccagcccccagcataggcaagacttgctctcaggaacccagattcacccagtatcaatctgggagaatccccacctggctcccaccatccaccccaccttgctctgagaacccagtggttcctggaatatctagtcatcttttctttttaattctccctggggcagggagagggtggagacagcattgtgcatatagggaaattagggtactgggagaaatccattgcctggggtggggaaagtggctggggaggaagaggtggtgttagggaaaggaagcaaattattcctttggctttggataggagggaactcggaaaagaggtcttgggtatgaactctcaaggcaaggaagggttcagaagtaggggcaatttctgctcaccccatcctctggctgcttgtttccccaggaaatccccaggaaggagagtgcagtcagcagtctctttcctttcccagaagtggaccacctcctcttgcctctattcccctattcactctgctttgtcacctcctgtcccccgcatatcatatccgtcagaatacttcctttccccctcccttcctgctcaggtcggtaatacctgccctggtgcctatcacttcctggatcacccacccccttgtgactgccagacccacctcttgacccaccacttgcctgaccctggttctaagccaacggggctgggactagaggagtcggacaaagggtgggagaccagaaggggcaggggcaagaggagctatcaccagagaactctactgcccctttccactcccctatttgagatgaggacaaagggggtgactaagcaatgaaagacaaagggctttagagtggctgcagcagtgtgtgtgggggtgttggcagcagggagaaggcacaaaagctgcagtgtcctaggcagcccctcaggagccccccaccccagtcccagctcaagctgcctccagggccaagcagcccaaagtctatcctgacttctcccaggctggatcaaggcaaataaatgcagtccttcccatcccccaccaccatggccacatttgctgtgtttcaacaatagaaagaaggcccagggaaagagcaaggaatgaggacaacagagggaccaaacctctgccctggctctgtggcagctgccttgtctagcccaggtcctggtcagttcccacagctaaggatctggccccaccctttggtacagttcccattaggtcaattcccaggccagaagtctggctttcccctctttctctgcagtgaagaattccaccatctctgcttcctggtctgtctgcctcaccctgctgcgctgctggtgggctgtgtccctgggatcctgtctaggggatatctggggaaggcctctttccaggctcagagttggagagttgtacaaactctacgggtgggtggcccagctggagttgggcttagaggcagagggagaaaacaggaactagcctctaaggctggaagaatctttgtccatacagaattgtgatcagactcctggtgctactacatttccgtgctgttggccattacccaggagggctatagcagggtcagaaagacgttagggaaaagaggctgacgcaagacggaagtggggtgtgaggcatctctaagggcgcttcctgggtctgtgattctgtaggttcgggaagcctggaggatgtcagggtcacccacagaggacctccactcccccatctgggatgaggtggctcctacacaccccgacactcccctccgcaccaccaatgccggcggccttggcatcctattcttttttgttttggtttggcgggagctctcagacccgcccagccccacttaggctcctttctccaatctcaatttatgacatctggaaattagctggctttcccaactcctgtcttttggattcagtgatgggaaagtaattggcaaagcctggggctaccctataagggcagggctcagatacaatccgagagcaggactaaagcatgagggcggccaaggcggaagggagtagggaaggaagcgccgcgcgtttccaagatacgcaggcgggctcggcgagagagcacgaagtatctgccccacgcaggaacggcaattttcccttgctcgctcctagaaaagccagccaggagctgtgggaggaaacgccctcagtaaagatgaccgcggtcactgttatctaaacgcaagtgaagccgagtcacaggacccggatgttgtcagttcgacggtaaacgaccctgccagcttccaagagggcggcttcactgtgcgaataggtgagaagccaagaaggaggcgcgctggagttacttccgcccggttctccttcccgcagtctgcagccggagtaagatggcggcgctgagggctttgtgcggcttccggggcgtcgcggcccaggtgctgcggcctggggctggagtccgattgccgattcagcccagcaggtgagatcgagggcagctctcgacacactttctccaaggctagggtttctcaggttggggacgctttactcccccagaaaataataacccaagcctgtgaccccattgtccatccctgatttcttgggctacgggatgcagtggcgcccactctggcgagggaggggagagggtctagagttcgttcgtgccgaggtgaaatcagcggagtgggagactctgctttttagcttcagtaatttgaatgcacctctcctgtcatacctgagtagagctcagccaaagagccagaatgctcgctgtctctctgtcgttgaccttgaacaaacacttttctcacgttcatattcacctggttgataatatcaatatgatgaaaatatgaagaagctaggatcccaaccttgcatgcccaggggtgatgggtggagttattccaggaataatttgttagtaggaatggaacctctagagttccagcttgttttgccgaagctacattaacttcagatcagtgacttggcattaaaaaatccaggacattggctgggcgcggtggctcacacctgtaatcccagcactttgggaggcctaggcgggcagatcatctgaggtcgggagttcgagaccatcctgaccaaaatggagaaacccccgtctttaaaaaaatacaaaattagccgggtttggtggcgcatgcctgtaatctcagctacttgggaggctgaagcaggagaatcacttgaacccgggaggcggaggtttcagtgagtcgaaatcacaccattgccctccagtatgggcaacaagagtgaaacccagtctcaaaaaaaacaaaaaacaaaacaaaacaaaaaaacaggtcatccttcctgggtccccttgagagtgaatgggaacacagga

SEQ ID NO: 4498 - DNA, 6000 bp, Homo sapiens
gtctgtttctaatatataaggaaaataactttcttttgttttatgctacctaagtgtgtggtgtctatccaatatgttactagggtacatgttcactgtagctattcatgatagccaagatatggaatcaacttgaatgtccaagaaaacatggtacatatacacaatggagtattattcagccatcaaaagaatgagatcctgtcattagcagcaacgtggatggaactagaggccattatgttaagtgaaataagccaggcacagaaagggaaatattgcatgttgtcatttgtatgtgggagctaatttgcactatgtagacatatatcaaagcatcacattgtacactttaaatatgtacaatttttatttgttatgcatcaataaagctgggattggggatgcgatggtataaaaactaactctcctctctacttgtgcaagtgcaagattctcatctggacagttgtcttcagacttttttgtgtcctcctcaagaatgtttagcctcttacagttaaaaaaaaaaaaaaagctaaattcgagactatgtttgggtttcaccagttcttactcatgttgatttcacggaggtagagaactgaatgatggttaccagaggctggggagggaagcgggaagggagatgaagaggggctggttaatgggtagagacacacagtcagagaaaatgaatcagttctagtgtttagtagcatggtagagtgactgtaggtaacaataattcatcatatatagttgacccttgaacaacataggtttgcaccactgagtccacttatacgcagattttctggaaccaaatgggaagggaaccagcagtgttctcaggatgtcaaacctgtgtgtatagggagggccggcttgtcctatgcttgggttccacagggctgaccgtagaacttgagtatgcacagattttggtatatgcgggggtccaggaaccagcttcccatgtatgcttcaaaatagctagaagagaagatttggagtgtgaagaaatgatcagtgtttgagggaatggtgtcataaaccctgacttgatcattacacattgtatgcaggcatcaggacatcatatgtgccctgtaaatatgtacagttatatatcaataacaagtaagtaaaattaaaacaataacttactggggtagcagtcagatttacttgctccaaatagattttactttgcttctgatatgctactagagaaagtttactttgaagtagtgtatttgtaagcaacccagctgcaatgaaaggaggtatttccattaaaatatgacagcatgacttacagaagcctttaattataatttaccatttctggccaggcacagtagctcatgcctgtaacaccatcactttgggaggctgaggcgggatgattacttgagcccgggagttcaagaccagcctgggaaacagggagacccctgtctcttaaaaaaagaaaatcaaaaaatgagccaggcatggtggctcacacctgtggttctagctactgaggaggctgaggaaggaggatgatgagcctgcgcagtttaaactgcgccacttcactccagcctgggtgataagattatgtctcaaaacaaaacaaaaaggccacatcacattgtacactttaaatataaacaatttttgcttgtcaattataactcaataaagctggggcaggtaggggacacggcagtacagtaaaaatccctcacctatctgcttgcacaaatgcaagcagatttccatctgggcagcttttttcaaacttttggcagttgcatcctcacaactgccttattacttaattacataatatttaaccccttatgcttaaaaaaaaaacccacgaaactacagacttcatcagtctttgcactaatgtcctcttgttgaggaagaatctccttcagggtgggacgatgcacttagcagtcacatctctgtggccacaaaggctgcttctcatttataccgggagaaacgttgccagcacagctgctgtgcaggcttaagcaaattgttttcaccctgtgagcctcaggcctctcttctataagatgagaaaacacccttgtttgggaatatctaataagatactgacatgaaaaggccttatgaacgcaaaagcgtgacacacctgtgtgttctctcggtgctgctgggatgtgcgtttgctgaatgtgtgtcatctacaagctggtcaaggatggaaaatgccttccctcctaacattcagaagggaatgaaaaccctctttcctcctggaatacagaggaggaaagaacttcatctttacacccaagccaaggcaccagagattcttgacatgttcagatacgacttggggatcataaaatgttcaggaaaccctgcaggactgacttacagttttttttgcctatagtttgtgggcacccggggcccagccaccccatcgcctgggcagcaggtgcaggtctgaggcctccgggcccaccatcccccaggccttgggagatggctgtgagaacacccccttcagttaaactgcacccaggatgccagcccacccagctgtgaaagcccctgggaggagggctcatggcgggacatccctgtggaagctggcaactcaagggacacagtgacatttgctttcctcaggaaattgtgtctgctcctcctccacctgtacccctttgaacagacagcagctccatgaaagttctctttgcagtggattccagccaggaataggcaaggtccatggccagccactgcatcctgtggcctcccgtggtgtgaaggacaccctgggcacagtgcctccggaagctctgtagtgtgaatatcccactgtcttcaacaaatacgttgcagggaaataaggaacaacaggggtcctgtgaaggaggcagaaaatccagcctgaaggctggcagtggtgtttggagatgcagcggagcaggcagcagtgaagagggtcaggagggcaggccactcctggaggctgtgggggcattgcttctcccaggtccaggaggccctgcaaggggctggcccgcacagccatcttctctgcaccctccacggccctgtccgggagggggtggggcacgtattcgagcacacacaatgcacacacacttctgcatggctggggcagctcagggccaagctcctggtgggggagtgggctctccttccagcctttcctttctccctggtgctgtggactgaatgtgtgtcccggagattcacacgttgaaatgctcacccccaaggtgacaggattagaacgtgagcttttggaagtgatcagtcatgagataaggctgcagaatggcataaccgttactccagagacccctcaccctccttctgattgaggacacatgagagatgttggccattgcccggaagagcctgaggtacgctgtgaggacacatagaggcctggcactggatcagggatggggcgaagcctggaggcacagagcagattctgagcacccccatcttccccaccctccctcctgccacagcctgagctgtcctcctgggcccagctccagatcctgcccggccggccccttctttggctccctggtgctggtagctggggccctgttggcagcacaccgcaggataaatgcccccaggtgcggggtgcagggtcccgcctcacatgccgtcctggctccctcctccctccatggaggcctctgtgggtagagactcggctcctcctctggacctgggccctccatggaaaggcacagggctcccactgggtggccctctctggctgctcttcccccgttggggcctgcccagtgcccggtccacacttcttcctggccagggccgtggggacagggccagcccctcttgggtatgaagcagggtgccatcagcatcccctccccagggctggtccctccccccggtcaggctgggttctcacaggacactcctgtgctcccatgtaaggatgactctgagacccagctgagtgttccaggagagcccccgggtgggcagtggcctgggcctggccaagcagggtgcaccaggctcctgcccccatccctccaccgctggccctcaggtgggtcctgggtcccctctgggggcagtactggggctgcctcaagatccatcctgggctcctcttggggtggtcccttgtctccctcagagccttcctgggtcccccaggctccttcctgccccacatgccaggatgctggtttgaaggggagagtaggccagctacggcccctggcccgcatcactgctaaggacatggggtccccccatccctggctgtggtccccagcccgcatcactgctaaggacaagggtctctcggtccctggctgtgggccctggcctgcatcactgctgagaacacaggcaaccctggcctccatcactgctgaggacacagggtccccccgtccctggctgtggcccccggcctgcatcactgctgaggacacaggtgttccctgtccctggccatggcccccgaccttcatcactgctgaggacacaggtgtctgttccccatccctggccgttgccccctggctggcatcactgctgaggacacagggtcccccatccctggctgtgacccctggcctccatcattgctaaggacacaggcatttgtccccctctcccttgctgtggccccaagcatctgccctttgcctcccacagggccgagggtgaaactgaatccgggacagtgacacccgggctattttggggctgggctgggccggcctggccggcacagggggtggggtgggggcgggcccaggcttctccagctgacagtgtccgcctgtccttttgtccccgtccagtttgaggagcggccggagtgtgggctgctggtaggcagcctgctggtcctgggccctcggagggaggtgagacccggcagcccctgcctcccagcctgtgcccccagcctgcgtgctgcccagagcccccatagagagaggtgaggagacagagccgggcagggtgggggctgttctgtgccctggagggtggctccactaaaggtcatgtctggggagtggggaagccttcagggtctggccacagtgcagctccctgtggcggggctggggttccagcctctgctccctctgagccccggagctgggctgctcacatggggatggagccactaggctggcctggggctgcggggtagccggggcggtgccctgcacccaccgtcccctctaccccggagttgacccttgctcagagagcggcctgggggtctggctggccctgcccccagcactgctgagatagatgcccgctgacagctggggctattttaggcctgttggctcagcagaggggacagccagaggggcgctgacacctgactccaggaaaaaatttccccagaacgcttgaagcctccggtggggtctaaggtgaagcacagccctggggcgctgcccttggaacttcatgctggaagggcacgggagcacaggctgcccaggttgtctgtcagtgtaggggtggggagggccagcgaggtggcaccctgggagctgcctcccactctggactcttccctgtgatggtcccgggcccctggaagaccagagtggcaaagttctgcaacagtcagggtggaggggctgctgaggggtgggcggctgtgggtggggcctgtcacccggggcatggtttggtggggggggggggagcgtcccacagcgttggaatgaggcctcaaggggctgaggagcccaagtgtggtccatggtgggtaaaaggctttcctgggaggctgaagtctccccctcctggggaagctcgtggggtgcccagacccaaaacgtggcagagaaaaaagacagcctctgcagatgtcccagtgcccgatggattcctgggagccccacgggtgaccgtggtggcccccttcctgctcggcctgtttct

SEQ ID NO: 4499 - DNA, 6000 bp, Homo sapiens
gaggcagggagaactgcttgaacccaagaggcggaggttgcagtgagctgagattgtactactgcgctccagcctgggtgacaaagcaaaactccgtctcaaaaaaacaaaacaaaacaaaaacctgcagctggaatccccatccgagaggctccagacccctcccgcttagaaccaccctgcctgccacagaccgctatgtccccacaggtacaaaaatgacacacggattgatccccgcctctttcgtgccggaaaataccgaatcaccaacaactacgggctgctgtccctggagattaggaggtgagactggagacctggagagacctatgaccccagaccctgccaccgccgaggccagagcaggatcccaaacccttcctcggagctgaggcccaagttcacctccttcagaagtctctagggtgctggtcaaaataccgattcctgggacaggacagaccctccccccacccccagagattcagattaagcaggtctggaatggagcccaggaattaatatttaacacacacacccaccatgtgattccgatgccttgagatacacggtgagaaatttggactcagaggctggccgtgaggactggatgctgaactaggcatgctgggaaggctccttgtgggggagagaaaaataccataatatgcacacatatgcacctgtgcacacacatatgcatacatgcacatacacagtgctcacacatgtgcttatgtacccaaacatacacatgtgaggggaagcagtgacatgggagagagttcagcctttcaggagatggtgcgtcctaagcatggttttgagggaagaggcaggatgcatgctgggaggccacacgggaatataagagtgcagtcctccccaaggcctgtgtcactcatcattcatatcagctgccacacgctgagttcctcccaggtgccaggccctgtgctgggtgcttttcacatacgatccataatccctgccaccatgcttgagggaagcaccccatgtcgcaggtgatgaaacaggctcagaaagttaaggctcttgtacagctactatgcgacagggcctggtgtgagccatttctctctatctgggttgtttcccaaacaccaaaccctccacctcaaccaacccaggcctcagagacacaaagataagcagaacactcatcttacccttcagaagtggggagacataaatatctgaccatataagggaggtgccccatggactccacagtcaaggaaggtgcgcaggcccagggggacctccggggcaggcaggactggccctggaagcaagaggggttcctgtgctgagtgaccaggggcaaaaaggaggcaccaaggggcctctgcttgctaatggggccagaggtgccacatccgaccacctcctctctgtcaccagggtgcccctgggatggagctggcccaggcttccactgggaacatgacagggttggcctggttggtggtgagacccacacctaagactgggaacacctgggtgtctggctcagttctatccagattgcagcctgccttgaccaagtttgtctgctgctctctgagaaaggaggaggctcccgctccaggatccttgtttgaagctgagttgagttccatttgctctgtgactctgggaaagtcacttaacctctctgatcctccacagtcagcaataactgcaatgtggcatgtcatatttttaaagcactttctcctgagacggtttaggtggtgtcgtgtccccagtttttcagaggacaccgaagcatggaaaggtgcagtggccaaccagaaaacacacagcttttcagagataatgaccaaagtctcttcctggcaccgtgaggctttccttagttccagcctttcccacccacacaggggacttgtgtttcccatggagcccagcagtcttgggaggaacttctccctctctccttttcagatgcgccattgaggactcagcaacttacactgtgcgagtgaagaacgcccacggccaggcctcctccttcgccaaagtcctcgtccgcagtaagtcctcccaaccccaacaggcactccgggccacagcaaacccaagctgggcagacaaggacatgggtctgcgtgagacctgaggaagggccataggcacaaggctgttcagcctggcattgggtgaccagggcagccctggagactcccgcttccctgggggccttcacagcaagcgatagtctcctccatcagcctgggctgatggtggaaggtgagtgaggcaggatcacctgtccctgtgggttggtgtcaagagcagctgggagatgggaagggaactgacctctcctgagtcttcactgtgtgccagacacccttgatagtacctgattccatcctgagccagccggtggcagggctgggacttgaactcagctctctctgtagagtcatcactggcatggtgggcacctttgtgtgaactgaatggatgaattagcgaaaggggccccttttctgcaggcaggtgcagctcccactccagggcacatggcttggcaaatggaaaacagactgaattttagcccccaagttgctctctcaggggataactttgcacagagcacaacctacacagttattcaaggcgaacccacctgcccgccatgccaaagagcatgcttggcccaccggattgcgcttaggttgggatccatctcagggcctctgggagggtggtctggccccaccaaccctgctgaggggtcctcagggacaaaagccaaaccccagcaactccccacctgacccccactgccccatgtgggtccttttgcacattttccagctgggcttgggcccctcctggaggtcaccccatgggcatctgaaatcacagcataaagcaggtagacactcaggagtcagccagacctgagttcacatcctggctctgctgccaactggctgtgtaaatctgggaagccacctcacttccctgagcctctatttcctcatctgtgaaagggagaatcctacaatcctaccacctctctcagatgcccgagttgattaaatgagatgatacgtataagccttggcatgtggtacccattcccatgaccagggcagggcactgcccaagggggtcacacctttgggcccagaagaatgccgtgccctgagttccaggacccccgggagagagaagcccacgtgtgcacacatacacacacacacacacgtgcactcatacacacacgcgcactcatacacacactcctgaggcagctgtcttgggcagtagacaggtggatcccaggccaccctccctgcctctcatcagaccttgttaaactgtcctgcacagccctctccacccactgtcctgttccctaaatagctcttaggaggcagatcctgctgccaggccaagctcttgtgcagaaatttgagctgtccccacagtccatgcccagagtcaagcccaaggtcagggactggggccctgcctccctctgcccacccgtccttcccaccactccttccagatccctgtccctctctccatcaaggctggcaactccagggtccaccaggcttgctcttggccccagactccagccaaccctctgcttctcctactccactcaccgccactaccaccctcttctctgctttcatctccgtagccacttgggtgattttagtggcctgggggacaggagccctgagttccaatcctgactcttccactgacctgtgtgatctcgggcagcctcctgcccttctctggaccttgctcaggaagggcctttccagggaccagtgtcatgtcatagcttcaggctgctggggtgttgtctggacggctgtgcctcagttttctcttctgtttgagaggataataatagtaccaactgacagggctgttgtgaagatagaatgagtcaatgtgtttatgtgtttaattggctcgttcaatcctcagagcatggggcgagcactgtgtgagtgagagctgctgttactattctctggtggtctgtggcaacattaccttggatttcacccttcagcccctggatgcctctcagtgctgcccctcccccaccactctccctgatcccaccagaaatccccgcgcctctgagcgggcttgaccgctgtgaagacagtgcataatcctgggggcaagtttgggtagggaaaggaaaccagcatgtattgagaacctgccatgtgtcaggctatggctggtggcttgattcatgtgaacccgctcgttccttgctccaggtaggaattactgtcccattttactgctgaagaaactgaggcacagagaggtaaaagaactttcccaaagccacaaggggaagccaccaacagaccaggactcaaactcatatccaaagcccatgtccccaaaatagcataggaatgtgggctctgaaccttctccaactctgtttgcctttggtttttcagcttacctggggaaggatgctggcttcgattcagagatcttcaaaagtaagtcggctgggggagaacgggacctgggattctttgttcaggctttgctccccgacccccacagtccctgtttagaatatagccatcccctgcccataaaaggacgtccaccggggtttgtctatgagctggtaatacctgcacctgacttctaaaggccgcagggtaccccagagctgtccccagctgctgagctgttctctgacctaaactgggtttgaaaggcaaagccagaaaaaccaacggacttggccttgggatgtttgctctttggctgctctgaccactacctagataagtctcttcccctcctaccccaaggccaggtccccttctcctagtcaagacccagaagagaagggatgccccagaaatttcctcactcctaagtcccaggccaggctggctgcctcaaaaacttctgccccaaatttcattcccacgccaggatcgacgtttggccccagcgtggaattcacctcggtgctgaagccagtctttgctcgtgagaaggaacccttctccctgtcatgcttgttttcggaagatgtgttagatgctgagagcatccagtggttccgagatggtaaggacccccagtcctggcccccagcctccagagctggcccctccaaagctcaactcagagccagagaggacccctagcggacagagactctccccaaccagtaccaactgtgctaaagtgctgaagaggcagaggagagcgggagtgcagccaggtgtggtcagatcatgccaccccataaatggccaccaagcatctgtggggtgccaggccctgggttagggctggggtaaatggtaggggcagatgtgcatgagcccagggggctgtgtccacctgggaggagggaggaagccatcagcacaattgtagccgctggcactgaccaggcacctgctcagccatttgcatgcatcattacctccctaagagtgagggagggaggccaggcgtggtggctcacacctgtaatcctagcactctgggaggctgaggtgggtggatcacctgaggtcaagagttcaggtctagccaacatggcaaaaccccatctttactaaaaataccaaaaattagccaggcatgttggtgggtgcctgtaatctagctactcgggaggctgaggcaggagaatcgcttgaacccaggaggcagaggtcgcagtgagccgagatggcaccattgcactccagcctgggggacaagagcaagactccatctcaaaaaaaaaaaaaaaaaaaagtgagtgagggcactcaaagcaatgggaacagagccccaagatcgggaggcaggagggcaccacaagtgctcagggcaggctgcaacagttgcatcggactttgcagagtcagggtggtggtgcagatacagttgctgacccgtgggctgggaggcctctggggatgtctcaggcgaggcctt

SEQ ID NO: 4500 - DNA, 6000 bp, Homo sapiens
cttgttgggagagctggctttacaaagactagtcaagtaataagaaaaaagtttaaaaatcataacacacacacacacaaaaaaacccactaatataatcagtctggtctaaatactggtgctaaaccatgaacctactgttgaaggtaaccaactaaagaaatcaaaagaccatgtaggaaactggttgagtcttgagtcctgttgtagccattgggtaaaattttatgactgggttgaattacagcagagaatgtccagctctacaacagggacgatgagtataatttgaacaaaagattatgttagaattatgactgaaaacatactcgatttctatgaatttatataatttttgaaacattcatgtcaacatgtacataaatgtaactaaaagaaaatctagtatcacttatttgacgatgtttttatacaattcaccaaataagcctagtcatctctacaaaatgagaaatatgtcttttaaggttttccaggagcctaactgaaaaaatctcaaagttaattttaggtcaaaaagtcttaaaataggatttgacctgggagacatttgtcaaagatgttaaaaggttcaaaacagaatcacaggttgctgtgaaataacagttattcatttaaccagtgtcataatcaaaagacttcaaaagcaataagaaagtcacatggatttagaaaccttaacccttttaaaactcatttttttttaagtaatcaaaagcctaataaaggtaacatagaaagttagtttgctaaaacataaaatctttgtttcttagactcgctaccaaaaacgtaaagaaagccctcttcggtgtgattgtttttcattatgggaagctcattcagataacgtggaagttgaacctgatgaaaagggaacttgaatgtcatgaaacacaggaagaatatgtccaaggttataagtatacactatattatagaggaatataaacaagaaaactagtaccttgagcagggaactacatggttcttagtaacagcatgctgttacttaccacagtaacttttctggttatatggaaaaattcagacatatcaagaaaagccaagagcacaaaattaagttatactggagaaaaacgctgcttttctacgccttcaagataaatattctaatgtcaggccaaaacagcaatgttagaaccaaaaaaagccaaagaggagaatgatcatctcaggccttctccaggggagaaaaaaatgaaggaaatgacatattgacctgcaaatcatgtacagcaagaaactgtaaaagatgaacttctgcaatatgaatttgagaaataaaaaaaaaaaaacaactgtacctcaaggaatgaaattaccactttaaatcaagaagacaacatttttaacccaaaactaggaaaattaaatagatgtcaaggagaagatacctgtttaaaaacagagtataaatttaaaaatcaaaaccccttaaaattttattaaaatcagataatacttcaagaaatcttgttgttttaaatataaggaaccagactctggttctgtatcagtgcctgtcccctggtcccctacctgagaacgtttaatttttagaaaaacacacaaacaatttgtttttaattccagccaagtcaataacacataaaacttcttttattagctcatcctttattagtcctcttcaactttagaccttttattttcctaacccctacctcttagtcctataatttttctttttttaaaaatgtgggataaccaatcattttatcttatctgactatgatacagacatttattttgtatatatgatttaacataaaattttaagactttaaattacatgagttcatttataaacatttatttcatttacagttaatttattttttaacaattatacctatatttcttacaaaaattgagatattagatggagctggtcattatttcaagtttttttaaattaaataattatatagcctgttaacatgaggtgtttacccacataagagccataaagttaaatacatgggtatctgtagataactcagaaaatacaacttttgtttttttccttacaggcaaaggctcactctgttgcccaggctagagtgcagtggtgtgatcatagctcactctagccttgaactctgggctcaagggatcccccctcctcagccttaagagtagctgggatcacaggcacatgcctggctaatttttaaatttttttatggagattgggtcttgttatgttacccaggctgatctcaaactcctgggctcaagtgatcctcccaccttggcctctccaagttttagcattgcaggtgggagtcactacccagccacagctgtttttgttaaataatattaaattaatcttatttatcaaagaattgcataaatatatatcactttgctttaggcctggtttatagcttcatgaccttaatagcacaggcaaatataaaactgaccagtgctggtgctcagaaactgatatgccaaaacatggtatttgacacgctaaactaaagaagcctcaaggtctctctgacttttcctccaaccccaccatccttcccaaagaagctgaagttcctttatctgcctaacaaccagacccaccaaggagagcaattgttggttctcctcctcctgttatctcatctgttaaagaaaagaagaccaaaatgtaaccacacccaagcagacctttatagaagtacaatgactgcctccaaggattatttaaattccaaagaaaactatttacaagttaatatctgttgctcaatccaatcattctctcaccaatcattcattgcccctcaataaattcctcttctcctcccataatctgttttaccagaatccaagccccccattctttctgtaatttcaagactagtgtataaacttctataactcattgagaagttgggtctttattctgaaagctcctgtgtatacacattaaatacatttgtatgtcttttctcttactaatcaatgtggcccatgtcagtgattttccagcaaatctttggggggctgagagccatagcccccacaccagtaaacacaggcaaaaatatatattgacaattagaaagacgtttttaattttattttatcaacaattttaaaaccaattacttttttaaagattaagttacatgaactaaaaaaattaggttaattactatgtttttgtgtgagtgcccatctatttaaaccaatcagattaacatttcttaagggatttttggcctaccacactgaattttattatgtagacataacatacaacataatacatgtacatatgtgtaaatatatttaaacaaatatacacataaaggtcttctagcttttattttagaattttagttgtgagatagtaaaacatataaacttgctggtttatagagaacagttggatccaaattatttttctggtaaaatgagataaaggctatgaatcaaattttggtaaaacagtttgagttaattaccagtgcagggaccaaagggaaacttcagtgaaggctcactgaaaaatcaacctgcaaaaggcagattaattggagaaaaagcatacaaatgtatttaatatgtatacatgggagcctgcagaatgatgacccaagcatatagaggaaattgtctatttttaacttaggattaataaaatatagacagcaatgtagaaatatgattggacagaaagagtatgagctaatgccaataaaatgagtggggaaacccagtgaaaaaagccaaactctgtaaaatatttagaggtttattctgagccaaatatgagtgaccacggcctgtgacacagcatcaggaggtcctgagaacatgtgtccaaggtgtttggactatagttttcttttatacattttaggaagacagaagatacaggcaaaaacatcagtcaatatatgtaaggtatacattggtttgacctggaaagccggtacattttggaggaggaggggtttggccagtggtggcaggagggaggttgtggaagccagggttcttgttacatatgtgaagcctgtaatatgcttcagaaagaatagatggcatatgtacctcaaaaggtaaatgaccttaaacggtgtcagactcttagttaaatctctcccggatcagagaaagacctggaaagggaaggagattgtccacagaacacaaatttccctcgcaaaagatagctttgcacaggaccattccaaaatatgtcagaaatatattttggggtaaaatactttgatcgcccttagggctgctacctgtcatgtgatgctataccagaatcaggttggaatttgttttgagacaggttctcactttgttgctcagattggagtacagtggctgtgatcacggctcactgcagcctcgatctccttgatgtgggaggctcaagtgatcctcccacatcagcctcccaaatagctgggactacaggcggccaccaccacactgggctaaatttttttaaagtagagacaagttctccccatgttgcccaggctggtctctaactcctggcctcaacctccttattctctaggattacaggcgccaggctagacctcacaggtctttagacttctacgcaccaggtacctggtagggggagggattatagtggcagaagagcagtaccagtggcccacaccacacaccctggcctcagctggctggggcacacaaaaccaggtgctaccgtcaacgactaggcccatagggtactgctgtcaaaacctgctgccaacaacttccacacactccccaaaacgctcggtaggcggtggtgcgcagctttcaatgcatccgccgccaggcgctcacaggcaagggagaaagaagccagacggagctcggagatgtggagggcagacgcaggcgcatttggaaaagggactggcggtgggaggcgcagagggaaaaaggaacgacacaatcgggcttcctagccgctggcggacccgatggggcgtcctgcgagggttcggcgagggttctgccaggatagtagcattgcgcccaaggagtgagaggcacccggggctactggagccagaccctcaacccgccctagtgggaggcgaagaacaacgaaagcctcgtattcccatttctctaatggctaatgacattaaaggttttcatatggttatttgccatctgcatatcttcagtgaagtgtctgtttatgtcttctgactattttctaattggatttttaaaaataattgatttttgagttatttacatattctagatactggttgtatgccagatatatggcttgtaaatattttctcctaggtaaaccttttcagtatcgttacagggtctttcacaaagcaaaagttttaaatttatggagtctaattcatcaacatttctttttaccggtcttgccactaatgtcaatttaagaaccttttgcctagccttagacaatagtttgttgttttttaaaaccgttttgtaattttactcgtcacagttatatctagccacttaatttttatgtaagggttatttttggcgggggggaatctatagatgtcctgtcttttcagtatcatttgtggaaaagattatctgtcctgcattaaactgcttttggactttcgtctaaaatcagttggaccggtttttgttggcaaagttttgcctgaagcttattccaacaggtgagaaaaagtccacagtttaacagttcctccccaacctgtaaccccgccttgaacttctggactagcccctcgattgttgtagatgccaagcggacctcgcgccgctctgcgttgggccagcccctcacagctggtttcttaccacgtattgcgcaagcggaatctatgcctgttacccacactccctgcgcccccgcaccccgctcctgtgcgcaagtcggaatataaaaccgcggaggagtgagctctt

SEQ ID NO: 4501 - DNA, 6000 bp, Homo sapiens
gttttccattaaatgtttccaaaaatcttctgctctcagtaaacttaacactgccctctattctgttatgaaaagcaactttctttactaagttagttaaagacctttcatataaacttgcttagtatttccctttcttgactatgaaacaatggtctccatctttcctccttcctttccctacccattcctttgatgctcgtctgtcagcattacttgtgtgattgcatctctctctctctccatgtttgaaactatcgtcaggttttccacatcctaaggaagacttcagcaaacattgctgatccctaacattgtttttgtttttctgtcagtttttttcttcatttcaaaatctttctatttatttatttatttatttatttactgtggagagatgaggtatcgctttgtttcccagacttttctcaaactcctgggcccaagcaatcctcctgcctcggccccccaccaaagtgcaggaattgcaggcttgagccagcacactcaaacactgagccctcaagacatttttaataaataatctatgcattttgacaaggttttctcattactcacttcctagagtcagactattgccttttacttctactgaagtgtgaaggaagaaacatctcttaaaaattcatgtatatctgcatcaaacaatctagtttttattctcaaagtggattagttgaagggtttaatgatgggaatgatgtaaaatcagatacatgttttagaaagatgattctggctgtagtatagagaatagtttggaggcaggaaagattgaatttattgtctttaactattgtgatgaaaactaaagacagatcagacagatagagatacacagttttgtctcgttattgtgaatttacagaaaaaagtcttccaacaaactttcctttatgccatttctgctgtgaatggggtctggctccatttctttttaaaaacatactaggttatatcttagcacaaaaaaagtgccacgtgaacagactgtactctgataagtccagtcatttttctttctacttttagagttacattcttacaaagagtagttgtgtttgtttacaaatgacaatttaattgtttttataattagaaaatttaatattgtgctaagcaatgagatacaaaggcaaaaaagtattgttgttttataaaactaaatcggacaatttaaaaaacaaattcaaggctcctacaagagtctatcaaattaattgtggatgtgataattgttgaaaagactggacagaaaaatatattggttcctgctgttgtgtagcatattactacaattacattttcttttaaaataaaaactagttattatcttaaagttatggagatcagaggttcaaaatcaggctcaaagggctaaaattaaggtgtcaaaggaccatattccttcaggaagctcaaggataaaattttctccttgcctttttcaactgctgaaggctttccatgttttttggctcacagctctcttccatcctaaaatccagcaatcacgtcatttgggcctctgcttccgcggtcacatctccttctatgaatgactctgaccttactacttttatcttataaaaacttttatgattacattgggcccaaccagataatccaagcttatctcccagtatcacaacccttaacttaatcacatctacagagttacttttgccatgtaaggtaacaattggaaagttctagggattaggacatagacatctttgggaggggctttcagcataccaaggggataaaaacaaaatctgtaagcattctgcactcaaaactttatgttctccatggaaaaaaacaaatccaaaagcacataatgaatgtggtttataggaaggaaggaaccaaatttcaattcttggagcacagtcagaagcctcaaagtcattggttatataccaaaacatatggattttataaattaaaatcaaatatattactttgtaatccttcagatcttctaaaaattttgtctgtatagcatcattccttgttgacctataataatctactcgatccagagacagtgaacgatcattaaaatacgtccctaagagttttcctacttctttatcactcctgtcaacaccccacttccctactagggatggatcagactctgcttgttgaagggcggcaggaaaagtgggagaaagagaaaatataaacctgagaaatagagagaaactaaccactctctcctctcatatcttattgtaaatattccagcctgaaacaggtctgagtccagggaaaacgtagcttaacacaaaattaaatccagatccttagttaatattttagacatgattattatttcttagtgaattgagagggtgacataatgactgcctattttctgtgaataagcagagaagtcaagaagcatactgcatatttcatccagtagcaggggaagattttccttactaaataaagttagaaggaattggtgggagacagaatgtaaagttgtatcttcatcacatcctgaattgctttttattaaatcattaattatgctctgtcaacataccatattctaaaaagagggttggtcccatcaaacaaaagaaggatttatatttcattttaaaatgttcttcattaacagtctttactcaaatagcctcagtggagcatagtaccatataaggaacaagcatatggaatcttaagactgtaatggccaaatgtccatgatcagtagagttaattaaacaactttatttcacctgtagcaaatacaaaacacatggtatgatgttgtatacttatagaaaagtacttttaaagggaagacaaaagataaataaaaataaaaacagagtgacaaatgataaacattgcacaatagaacaaaaacatggtaattcgcataagggtggttgcttatgatatgtatctttattccccttatctattgactttgttttgatcaaaagcaattgccattccgctaacctagcaaaacttttaaaaatcgtttcatgtgctactttactgctgaagttgcttgcctcttaaatatttctagcatttattgagagatacttggattcatttgaatttctgtattattccttcagcaataaaatgagcaataattaagtaaaaataactttataagtgaatataaatgtatcatgatactaaatatgaatgtaaaaatgtgtatgtgtacatgcacataatattttatttgtttgttaccttaataagatgtgacactttagtttgctttcgtaagtatgcagatagcaaaaaccttactttaaaagcttttcagttacaccatcattagcaaaaagttacaaagccagcatgattaccgacctaggctgtttttagtatcttcccagtatgagtagttcattgaatttaaatgctattttctcccattttataggcacatggtcagagttatagcatatgttatttcctgttgctaaatttcttgtaaaatagcaaaactacagtatttatgctaaattggcactttttttaatgtagcattttaatgttgaaggtcacacttataaagaccatggagctttcttattattggacttctgaaatttttaaagtataattgaattatgggggggttggataaaataccagctatatcatttaatttatcatgcaacatatactaaattttttcatcatacaaataaaacattttataagtatacttctttcctaaatctactatagcgttctttgtaaggcaggcttgattgagagttgttgagaaacttaaatgtgtctttagttttctttagagtaagacatctcttctagcgatcaaatactgcttattagagttgcagagtcagcataacaattcaggtgggagccttaggattagataagagatcatgagaaaatagatgggcagatggatagacagatattaaaacatatgtaaagaactaacatgtatttaaagcagcaatataatgttgttatacctcattaaaccaagtagtataaaaacagaatgaaaacctgctataaaactggtagcaatttctaatttgacttctagcattcattttaatggatctctgtattaggaggtccttgaacctggttgtttacaaatggccctagagtaagcagtgccagttctttgctgtgtttgaagccagcatttgctgtttctgaaacaatctgagacaaaggtctcagttatgtgattcttcattctgaattaaccctatctcttactcttttggccatttaaaaaaaaaagtctacagtcttctgagtttctgaaaataaatttaaaaaaagaagtctcctaaaaactttcctgaaatcttggtgaattcaaactgtatgagattattttatttggtgcaaaattgcaccctgaaataggaatacatacctagtaatttggttttattttaatttgccaaacttcatttggcacagtttttacattccacatttaccattgaacaatattttaaaagcattcctttgcattcttcatgttaagtatattatggtctctgttgagcgaatttttgcagctcaatagttcttttcctactgggtaattattcagtatatttgtttattacttaactagttttcactgtgatgaatcttaggtttttattttgttactgattttgttagaaaactacacagatgacttctactgaattcttgctcataaagatgttttataagagacaaagaaaaagacacagtcaaacttatatgctgtgcttcaaatggttgtggactgcaatacgtcccctgtgaaaattcctgtgtccaagccctaactcccagtgtaatggtaaatggagatggggcttttgacagataagtagggttagatgaggtcatgtgcgaggctctggtctgatgggattattgtccttacaaaagaggaagagacactggagctcacttgcacatgaagaaaaggccatgtgaggacacagagagaaggcagccatctgcaagccaggaatagagccctcaccagagacctaatttgccagcatcttgatcatgtacttccagcctccagaactgtgagaaaatgcatttctgttgttaagccacccaatctgtggattttgttatggaagcccgagcaaactaatacaggtatacagtaggcacataattgataagatttaactcttagcttgtttggccctcagaagacgaggttccctatcatatgagacactcatcaaataattgctaaataataaacaaataatttagaactgttttatgtgcatgtgatgaaaactatgccacattacttccataaaactggaacaattgaatgaattgcagttacattaatgtggtcactgttagtccagattatgtactaaaacatctatgttctagagtagaatcaaaactttgaactttctaatacactgaataaatacattgttaacaaagtcttttgctggttcatttttattagttgaggtacatgagttgatagtcttgggtgtttgcaatagtaaaaacggaggaagcactgaaatcagagaaaatcaattttaagcaaaaacaaggacatgcatgtatgtggttttctcagcaggggctagtatagaaagtttatgttatatttctaaaactttccatggggacgttttaaaattaagtattgatttgttttttagttataatcttggatcctttggtggtagctacaattctatgtctgtctttttattcttcagaaacagaaaatcaatcagacagaatttacaagtgcattttaaaaagttactttagtccttaaaagaatcaaattactttatttttgacattatgttatttaaattccaatcttctatgttggcaatgccaaaatcactatttctgttttgtttatatttcagttgtcatgcaatggttaaatataagaatgtttgccacttaagattggat

SEQ ID NO: 4502 - DNA, 6000 bp, Homo sapiens; identical to SEQ ID NO: 3196

SEQ ID NO: 4503 - DNA, 6000 bp, Homo sapiens
caatgaggttatggcacctccttgtcccttattttatttgctctggtttcatgtatgcactaaggccttgggcttctcaaccaaagggcaccacaggactgaacccagcagcaccaaaaagggctcaggaaatcccataccccaggccccatgcaagaagagacccttaactcccaagaggagaattacaacttgcagctctttagtatccagatttctattaaaacaccgacgaaaatatcctattgacattttacctattaattattcattgctgggagtgtcagagtagaggggactcccaaattcccaaggatgtctctaattcacaaaatttataaatccttttctaaaaaagccttcaagctcttccgtcctcatgccaaccaaggatccctaaaataacctaccatatatgaggtcccaacggtcccctttcagctgaaatgagtttattctgagtggatgcagcaggcgggcagggattctggaaggattctacaagcaaggctggtgactgttactcacagccctccaccaaccccttctcctcagactcctccttcaggtatacgggcagccccgacagcctgcggtcccgggccccgatgatcaccccagacctggaaagtggggtcaaggtgtggcatctggtgaagaaccatgaccacggtgaccagaaggagggtgaccggggcagcaagatggtgtccgagatctacctgacccggctactggccaccaaggtaactccccctctgcccagaccagggagtgcttgttaaaggagcacatcctgcccctccacaacacagaaaggatgtctggagtgtgtccttcaagaggacccattcagacagtccaggtacagccagacctggtggctcatgcccataatcccagcactttgggaggccaaggcagaaggatgccttgagcccaagagtatgggaccagcctgggcaacatatcaagacccgatctccactaacgaaaaaaaaaaaagaggacaaaattggaaaaaaaaaaagagagagagagagatagtccagttccctgggcagggcttccaaaggatcaggccaccgctgttctctaccctttggcaaaaatagcaaatatatctttgctttctgcgtacttcttgagactactgtttcacttcagaggagtaactctctccctctggaccccttaagctttaggaaggcagtggggtttcttgctgatattagttggatagatatgctggcctttctatcccctttctggccacaatgggagggaaagcacagaggcctggccctgccagtaatccaaggggaggcttcctcttcccatcccatcccaccccagctacccccaaatgttgatggaagtgaggcttcatcttttagccttcctagcaggtagcaaaataagcctgtaagtatgacaatcaaagagccaatgttttccacgcagggctagatttcaaatattctccccgatggaccctccaacaatggcactgaagttttaatacagtggcatccaacttacagctctcacacttgctcccagagtggcccagaaatattccacgagaccccatgtctccattttagctttgcctaatatgctcagcataacaacaagagaccaacaaagagataacagaaaaagctagaggtttctgctgaccctcagaggtgtgccatgagcctgtaaactgtgggagccaggcccagtcttattcctgccccagagaccctccaaagccctgtggatcagcactctgcctgtggggaggtggttcttgagtctagacccttcacccacattccacattccagataccacttgtctcaggtcactaacatcctaagcctcttcataccttcctaacagactctcctggtcctgctgtgctcctgccaggaggcacccagtcctccagcttgttcctcggacactgtttccggactggcttgcagcctgtgccccctcattcacccatgggaagcccggacccggggcacttcctgtcttcctgtcaaagaccctgagcctacaccctgtgtggaatgtggaatgtggctgcaggttggaggagagattcttccccaggattcacagcccacccagtttctcccacctccccagctaaccaatagtacccttccccaccccgcaacactgcctgcacagcctcgtgtcccagacaaatttccaaggcaggatgggtccaaggcaccatctggtatgcctgtctgctacctgccgtcacccccctccatcttactctcccccacccctcctccagggcaccctgcagaagtttgtggacgacttgtttgagaccttgttcagcactgtgcaccggggcagcgctctccccctggccatcaagtacatgtttgatttcctagatgagcaggcagacaggcacagcatccatgacacagatgtgcggcacacctggaaaagcaactggtaaaccctcggggagctcagcaggaggtgcagcctggagaggcctggagctaagagggatgaggaccaggagatgggagggtgggaggatagcctattctcggctggggctgggtgatccaaagctcctggaacaaacagtgcacatatgctctgcagagcccacacggtccccagctgcctgtgccaagtggggcctgcctggcttgaggcacagcaataggatgcacccttgaattctgcccctccaggttgtgaccagtaccccaagaagagcctcctcccctggctctgagatctctggttctcaggagaagggagctgggggaacctatgcaaagagctgcatttgaagcctgcagcagagcttcacagccagacatcgtggggcattctgagtggggcagttctaaggcacttcctgagatggggaatccctgaattaaactgagacgcccggtgaagttggtcagcaccggagagggagttcacacctgctatagacttgagcccactgacagggaggatttcattgcaaacttgatctcttaaggccaagtgattatcctggcgccatagctttcaggaagcagcaggcagaatgccctgcaggcatgactctctcccctaaagtcatctctgcaaccagaccagcagtgggagaagccctcaggcccctggtatgagactttatcctcatgggttttgaacctggaccacagaccaagctaaggactggctttcaggtcagacaggacccggccaagagctggcatcaaaaggcttcctttgggaaagagcacagagaggggagaggggaggtccaggcatttgggttgggcaggcagcccacgcagctgtctggagttagcggtctcctcagaaaacagagccgacacagatgggcccaggctgttatttgggaatcaaaagtcctagcaaccaacaaaacactttggaaaaagccaaccccagccccatctcttccttcctcctcccgggtcttgtggtcgctgagccttcctcagtctgcagctttgatcacagtggagtgaaacgaacaggctggggtggccctggggttaagagcccacagtccactttgccaggacaggccttccatctgcattccctggacagcacatgcctgtcccctttgctttggagcatccccggcccagcgctgggagagggcacttcaggggaaatcaagagaaagtccagggttatccgcatctctgtgccttctgtgtgctggccagatccaagtaatagaaatggactaccctggcatcgtggtgtggagagagtttccttaaccagacctcaatagcaaatgtccagggaaagattaccagaaactacccaaggctgccagaagaaggggagggtagaagagatgagtcagctctcagctgcagcagcttctcccaggctagaggaaagtgagggatcctgttgtgttttggaagataggcagaaatcatcgtggaagggcttgaggctgggtaaagcagatcttccccaagacctggcactactgagacatttgggaaagtttggggcccatgagagtcaagagaagatgaaggaggggagagaagaagaagctggggagctgggaacatcatctcaggctggaggacaagcctgtgacaggaccggttccacagaggagtcaaaagagttaaagcccagaaggcagctggaagagaaggcaaagctggaaaaggaagtaaaagcagcagctgttctgattttgaaggagagtaaatgggcttatttgctttatggtctaaggagcagagaaaactcattctcctctggttataaattcccgagttgcagaaggaagtctcctaactactgatcggttcctcttggggtgggaaaatctctgagctacagtgagtcattcccaggatgccaacaatggcctccacttctccctctgcccctgcccagatacaagaacgccctggggagagtcatgaaagaacttcccccaggggagcccattcctcggcccagccaggccaggccagccctgggaagtagcttgggcagccgggctgggcggggagcgcaggtggcgccctttgtgcctgctccgaggctgagcctggggctcctggctgccttcttccggacaatggccacgggcactgtgaagggactccaggagcctggtggctttgtgtgaagccctgagaaaatgtgctgtcctctgttcttgggcttgcctaggggcacagagtcctttagaaaagtctcccagaagggaacagaacacacccaggcccacccctcggatgttagagatcagggtcagtgcccccattagggtacaaagtgcctctccttccatttctcccaggtcagtaacagctttggctaaattaaccctggctggacccattttcttccattttactcctttgccccttcaggtggacaatttgacctttgatggggaagaatatcagtgggcagcagaaggggcacggcccgcatgcattctcaagtcttctctgcctttccccacagcctccctctgcgcttctgggtgaacgtgattaagaacccccagttcgtgtttgacatccacaagggcagcatcacggacgcctgcctctctgtggtggcccagaccttcatggactcttgttcaacgtcagagcaccggctgggcaaggactccccctccaacaagctgctctatgccaaggacatccccagctacaagagctgggtggagaggtcagtagcaccctcaggacaggcccatgcccttgtctccctgcccattccccgctctatagtcatcactgactaaggactcagacgacggtgtctgtcatctcttcaggacctcccactcccctccctgccacaccccctgctgcgggaggaagggtggctttgtgcccgtggaagtcagatgattatcatcctaattactattcattgagcatgtgctaagcattcagcattctgataaagattttgtgtgtatcatctcattaaaatgtccagcagagttgtgaagccagtattattattatccccattttactgataaggaaactgaggtacagagagggtaaataacttgccctgcgtcacacagctagcaggtagcagagctgggatttgaacacaaagagcctggtgagagtctgggcttttaaccactctgttgggcaccgcagccacgagctctcggctagatggaatctactgaagaaactctggccttcagcctcaacctcagcatgaagcaagaggccagaggaagccacatcagaagagaaatagggaggcaggagcaactgggtacatcagtgccctcgaaggacctgggcccggggtagctataggtaaatgtttgctgaggcctccaccaaggcgcctatcctgtctctggcagatactacgcagacatcgccaagctcccagccatcagtgaccaggacatgaatgcctacctcgccgagcagtcccgcctgcacgccgtggagttca

SEQ ID NO: 4504 - DNA, 6000 bp, Homo sapiens
ccggcggatcccttcttggagcctggacgtgagctggccggtccggggcttgcagacctccgggaggagctgcggggctgagcggcgaccaggaggccaggccggggcagaggaccgccgagggccaccgcgggaggcgcagtcagctgcgtacaggcttgcgccgccgcgggccaagactccaaattgggaaaggggtggccgcagctctgcgcatgtgcaggaggcgccggagtttcactttgtaacttttaagtggtcggaacacgccccgcgctgctgggtcccgccagacacgccgccgccgcaggtacaggggacagggggcgtgaggaggggcaatgcaccctccgcctttcccgggacgtgcgcgccaggtgtccggttccggaacggctcccagcctacgcagaccccagagcccccgaccccaagcagggggtgacgacgcgggattgggtgggaggagagggtccgggcagcgcctccattccagccctgcgctccttgggaattcctggcggcttttcaggactttcctctccggcttttcgctttcagggctggtatctccttcttccccacccctctctttgggatttgtcggcggagtccgacctcccacctaactaggagtgcagctatgggctcctcggaccctatacgaggccgggctgggaaagggccaagcgtccgactctcctgacgccaggaaggcagaggccacccctcgggctgttcctgggtgaccacttcctgcagccttggcggagtcctgaggagggaggctggggactcggggactggggggaagggcgggggcggaaagggtgaggcgagctctgctaagaaaccaaatccgcaaaggttccagcacctgataagactagctacctgaggccctggaggggccttggtcattcagccccaggcaggtggtgtcctcttcaagggcaggggtggacagcgtggcggacccactgaccctcccttgacacctctcaggtcatcctcaagtctgctgtgccttcaagggggatatgaacggaagccgaggctccttttcccttcacacgcccctctcctttgtttagtgtgggggcaaaggtctctcctagctgttcgttgggctctaacagagaagacgtcaggtgggatcctgcccttgtgtttcccattagctggaggggcgacttaaaataaaggcagacagcttctaattgcttgctagggccgggtcctgggctaagtgctttacaggtgttgtttgggatctgtgcctcccaacagctccgtgagagaaagtcatcactcgcatttcctggcgaaggaagccaaggcacagagtggttaggctgcttgtctgaactgcgtggtgctgagaccctaactccagagcctgctcacataatccctgagccacactgcctctggtttcagccaggggctgtgtcatttcctttgtgctccagggtaggaggtaaacagttgtccaggttactgggtcctgtttggtgttgccataaggagaagtttgtactttactttgcaaccttattctgcatctgaaagaccagagttagctcctgaggcagaaggcctggagctgcttgtagtttcgctattgtcatcacaggattgaaagatttggtgatgataaaattaccctgaatttgtacgggccttcttgcaagaacgaacaatatccatatacttcctgcaacattctgctggtatttctagagcttgtcaagttgaccaccaggccagtccttgctgccaatggagactggcagtggattagcataggtagtttactttggcaaatttagaccagctgttggatttagccctctcccactggccacaatcagacgcttgcctgcacatgggttgaactttgggttgggagcgtgaagtcacctgctgcccactctggctcttgggcctcagcagtaattcttggctttcctaccctcggcatattgagtaggaataaggggatgaatggagaatttctggaaggcacaggtaagtgctaggcattcacatacatctaggatgactgaatattgccaggggttctcagccaggcagtgccacttcaaccacagtgcctagctgctggtttggcctcctctatacagctgccagctgggtgctcccctccccctgccttctcctcagcctggcagcactgtcccatggtgtctgtgttcccagctgcctgctcagagcgtgcctgtttgtgaaaatgcagaggagctgtcccatggagagccagagggacggagctgtttcagggggatctggactttatgtgtctaatgggcagggacaggctgggactgagctgaaaggtctgagagagattgtgggtccccagagctctaccctaacctgggtgctcatcggagagggcagacaggactggccacctgaccttacctccgtctcaggctgatagtatttgctagccacctccctgagttcatatcaaactttgtcaaaccaccctgggaagcctatttggcaagagacaagtaacttagaggcatgactggggctggagggagggggaagaggagccgcaggtgtttccctccgcagaggcctctctcctctgcagcactggcgagggtatgccactcccagcaccaccacagcaccctcccctttccagggacaatgctctctctgtgagcattttatggggatgttttttctttccacttcacatttcaagccttccttgttcatgctgctgtgttcccttttcctgattctagctcttggggaaccctggggagcctccccagtagcattggcccttggggcccaggtgaagtcctttgcttggggccctaccgtgagcccacaacctccagggtttctgtgggagagggctgctcccctagacccagcaggtccctgagccattggcaaagaggagagaggctggggccacaggtggtgctggccgaggaaggaggagtagggtcgcacagaggagcactgatggatggagaaccagttctgggagtttggggagagatcaaggcaggagggagcccactgggcagaacctaaaggtccatatgggcagcatgcatacacaggtgtgtgctggagggtttccatccagacccctacactggaaaagggtggctcccatgtgatgcttggtgtctgtgatccttcaggaaagtctacagtttggtaccccaggactcgctggtcaggaaagccctgcaggacatgagtgttaggcccgacgcctggcccttggcagcttgggaggtggctggggctgcttttgcctttgccagagacagctccaactgaggacctctccaacgggcccatccacagtccttccttcccctagtgtctggtaagtgtggggacaggaaggaggaggggtaggtggtggccttgaagtgttgggctggtgtgttccattgggtggtgccactgggggattttaaagggaagccaagaacatctgtgttccagaggtcactcttgtgacactctgttcagagtcagcagccccatgactctggcatcacaacccccactacctccagccattgccaagtctcttagaaggttgagaaagtcacttggctgtctgtgggatgctcccatgttcttgggctttccactcattcatgcttcctgtgcttcgtgtgtgtgtgtgtgtgtgtgtgtgtgtgtgtgtgtgtaggtaggtaggtaggtaggtaggtgtccatgtgtgattgtccccagcactctaggcctaggggttacccaacatacacacctcaccagcactactggtatccaaacatctgtttgggttctctatatcttttcttcttgttctcaagatctttgtccctgtaacagctagaagcaccagacttagcagaaaaatcccctgggaattctagatttaccagatttgggcaggtaggatcttaagcaagtccaggctgaatatgtgttctggcccttcagccacagcatgagaacttggacactaactcccggtcctctggtgtcaggggacagacactggagatttctattagcttcaccaggggcgccaggagcctcaggaaggaaaggtcaacaacccagcctggagcagtgtttgctttggaaatgctgggccttgcagttagactgatggtacccaggaggggtatgtgtgtgtgaaagcgcagagctaggggacccagaggtccctgaggaggccctgggactcctgactccctccccgtccctaccctagaccaccccctttactttctcctctgtggcaaagtaaaaagagaagtggcatctgagagtcaggatattgggtttgggattcaattctgccctgaccagctccttaaccttaactttggggcaagttattaaacctctgaggcttggtttccaagtatagcagatggacccatctctgaggtcccagctctgacattctgtgagcagtgggagtgaggtgttgtctgtggctcgtggatggaccatcgtgaatacttggatgttcccttcttccctggttgtttatcccggtgttttcctcttcctgcctttgtgtgcctttctccctctcctctgcctgtactctagatccgccagtggcttctgcaggagtgactttcccaacacgagtcctcgaggctagaggaactttaggacttcttaagacagcagctgcagcaactctgtccctcctttgctccatgtcgccccctctggggatctgcccactgtgtcctggatgagccatccactctgaccatctgatcccctgagattgtcccacaatgcagccattctctgtggacactgccaggcacgcagaggtccaatgtctggctctcccggactccttgctgctggctcactgcccgatcagtccctgggaaacgcctgcctttggctctgccagcactggtgggaacctgcaagaaatttgagccctgaacgtctgccttgtcctgttgtcctgtgctccagggaagacaggcgcgatgatggactccccgttcctggagctgtggcagtccaaggcagtgtccatcagggagcagctgggactcggggaccggcccaacgactcctattgctacaactcggccaaaaacagcaccgtgctccagggggtcacctttggtggcatccccactgtcctgctcatagacgtcagctgcttcctggtgagagccctcatgagtcgtgtcccactgcctcagttatttgtttaaatgccccacccagggccttctgggaaacttagatgagaagtcagacatagctgggtttaaatctcaactctgctgcttaccagctctgtgacttaggcgtgttacttagcttctgtgcacctcccctttctgctccggaaatggagatcataattcctatctcagagaattttggaatttggataaggccagaatactcatatagctatgcctgtgattactaccgtgattgcagagctctcagcctgtcgtatctttaaggcccttgggaagggtcatctcaaggggttgagacatgtgactggagagtacggactagaatagagcagctgcagttcccaagtgtcacctcctgttcccctctggcatccctggggtttttaaagaatcagaagctgggccaggtacggtggctcatgcctgtaatctcagcactttgggaggctgaggcgagtagattgcctgaggtcaggagttcgagaccagcctggctaacatggtgaaaccctgtctctactaaaaatacaaaaaattagccgggtgtggtggtcggcgcctgtaatcccggctactctggaggccgaggcaggagaattgcttgaacctgggaggcagagttgcaatgagccgagatcacgccactgcactccagcctgtgcaacaagagcgagacgctgtctcaaaaaaaaccaaaaaaacaaaaaaaagaattagaagctgattcttagagcgt

SEQ ID NO: 4505 - DNA, 6000 bp, Homo sapiens
ttactgttatgggaagcaaatcccacagaccatccactccatgcaggctgggactgtgtctgccctatccacactgcattcccagctcctggccccctgtggctaagtgttgattggaaaaaagtcaccagagcagcacagaggcacatacactgggcagccacaggggtacctccaccccacacagttacgtccatgcacacagaacaccctgtgtgtgtgtgcatgctcaagcttgcatcactgtgtgcctgcacacatatgaacacgcatcgtgtctgcctgtctccatactttccagatagagtcccttccaggacctgggtcctttcacaaaatcacctaataccactgtgggctcatctgctgacatgtgagatccagatgtggccccatgactgctcagggctcctggcttggccctgaacatctgggcgcaggggtttagagcaccagctttggaattgcattctcctgagaaaacctgggttccaccctggctctgcacatgatcactgtgcatgttccccgtatgatttatgtacaagttacctaacttcttggagcatcaatttccttatttgctaaatgggggcaatagttcctaccttaaattcatcttaaaggagataatctcagcagagtgcctggcatgttgtaagctcttaaaaatgcttgctatgaatatgattattgttactttagcctttgctctgaaatcccatgcacgctttgtgaggaaggacagccttggttggggggtgtttatggggagagcagagtggatggtgcgtatgtgaatacctctccccagatgctcccccaatcccaagctctcattatcttatatgcatattcataagggatggccctgctctgtaaatgggtcagaagcaggaaatagaggccagtacagacagcgaagcccaagggataggagggctcaaagccggcacacatctgagtcctcatggacgggaggatggtaagaggggatggggagagaatggattgggggcactgaggcgggggcaggagttcgttcctatgttgcagatttgaaaactcaggcccagtgagatcagattagagaaccttggggtgggtggtccaagaagtcagagtctgcttcctttgggaactggagttgagcatctgtctgggctgggtgatgggcacagggcaatggaccaaatgacccctacatgtttatttcaagggacatggtttacatagcattgggtggagaagctgaatcctgaattccaaccctccagtgaggctcagagtggttgggtgacttgccagtatcacatagctgctgactgtgactgtgcttttgggggtgcaagagacagagctactctggccccatgcaggaggttcaaatctgggagtaaaggctgatgggctggccaggacaccaagaaatgaagctctttatccatgtcctcacttcatctcctcagtagtcccctcagatagctggggtaaaaaaacttatctttattttacagatgagaagcatgaggctgagagaggaggagtcacccggacccagccacacagtgagttatgccttccatgctgggcgtgtgagagcccagccggccttggtcttgggcaggcaggaggccaggacagtggcagcatattaccttgctctggaaaattttagcctgaagtcagagtggctatccctttacacatacagtcatcttaatccctcgttccttgcagataactgcttatttctgagagtgtctttgcagatgctcacacatgctctgtgaggttaaacagaataaccctacctatttccgggaaggggatggacggacaccccttgtggggtgaagtggccccccaaggatggcatggggcatggtcatctgtggcagaacaagaatcccaggggttgatcctcttggtcttgggtgctttctactgttctaggtcatggatagggaggggttgggggtgaaaaattcagctcttagagcagaagtgtccaagggagctgaccctgggacgggagcatgtgaggagggctcacttgagactgcttggtggcatttcagtctaaaggatttccgtgcagaagatgactgtgtagggtatgtttttggatcagactgtcagtcacagaagaaggaggaaagtggacttatggtaaaaggtcagacattcatccagtaagcattcactgcttgactgtgtgccaggccctgtactgtgctctgggtaggagagggggtggccagagagcagaccgttcttgggtggctcacagtcccctaaaggcctcgggttagggaaggactgaaatattgctggacagaaaaataggaagactagatattgtcacctctactttttcaagggaagcagtaggacatcagggtgaaagccaggccaggttgcctttcagctctgtttcttctgagctgtgtggccttcagcaatagtaacaacaaccacagtgatcacagtcaacgtttattcgacgcttgatttacatttcgcgtgtcactacttctttgtttctcggtttcctcatctgtaaacgagtgggtggggaattaatcgacttctcagggctgttgtggggctcaaatggtaccacgggggaaagttgggcatgtgctcgggttgtttgtgaggccataagggaggcccatattgtttggaggcttgggggaatcaggaggatgttcattcctaatggaaccaggtagtgggttgggggtgagggtggtggctctcttcactgagaggtatggcatgtgagcaagcttcaaaggggagaaagagggataaggagaaggacctttaagaggagggcatctgccaggtgcagtgcctcacatctgtaataccagcactttgggaggccaaggcaggaggattgcttaagcccaggagttcgagactagcctggacaacataaggagacctcatctctacacaaaatttttaaaaaattagctgggtgtggtagtacacactggtggtcacagctacttgggaggctgaggtgggaggatcacttgggtccaggaggttgaagctgcagtgagccatgattgggccactgtgttccagcctgggtgacagagtgagaccctgtctcaaaaaaaaaaaaaaaaaaaaaaaaaaagaggagggcattgtgtgggcaaaagtgcggaggaggaaaagtatagggtgtgtttgtggaacagtcctggtgcaattaatggctaagcctggcgcccagtgaatcagccaaggatgcagtcaaccagctctttggccctggggccagcttcgaggcacagagacttctttccctaacattatcttgtccagaggtggctgaggacagggctaagggtgaagggagactaattacagagccctacttctgggtctctcacacctacccctggaaagccatctgtcaggaatgtggccgcccctccccaccttctgacctccttagctagggaccagtttgggcatccctagggagtgataagccaccaagcaggggtggctgtagggagtgtgtagctcccagcaggctgttgggagtcagtggagtttgaagaacagatggagagaagggaggatgggtttagagtgagaggctggggtcttagaagaagcagtaggtgggcatggtggcatgcacctgtagtcccagctactcaggagcctgaagcaggaggatcacttgagcccaggaggtcgaggctgcagtgagctatgtttgcaccactgcactccagcctgggtgacagagcaagaccctgtctcttaaaaaggaagaagaaaacagtgacgatgggggcttacatttgtcaagcacctaccatgtgttgtaaccaccctgtgaggtatgtatcctcactttacagaccgggaaactgaggctcatagaggtgcagtgacttgccgaagtttctttatccagtcattcagcattcaacctcagcatctacgtattgagcagaggccctgcgccaagcactgaggagtcagcggtgaccacctcttggcttctgttcccaagggtgacagtgtcctggggtcacacgggctcaaaccgaggtcgatttccgaacgctcactttggagcaggatgcgagcccgggccacgattgggtcaggttgcgccgctcgcgtggccgcgggaatccccgaccggccccttccctagggtccctcctggcgcacctgccccaggtgagtctggggaggccccgagcgccgccggaaagcgtcgagcggcttcggtaggtggggcggggccggggcggggccggggccggggaggggccaggcccggcacccggatcccgaggtccgcgccccgcgcccggcgccgggcgcccgaagccgggagccgccgccatgggggcctgcctgggagcctgctccctgctcagctgcgtgagtcccgaccccggcgcccgcccgcgcgcgccgcccgttcctgctgcgggccctcactttcttctgttctgctccgagtagtttcttctttttccttcctgcaaacttgtctttctgggccggtgccccgcctgctcgccctcctggaccttcactcggcacccggatcccgctgcccccgtccccctgctcagtcctggccggcaggcgccgggcagctgcggtcccggctcgggtttccgcgggcaggaggggagtgccctcggcgggcgccctcctgggacctggagagactaagcctggagcccggggtcggggcagctctgtgggccctcgtcgccccacttggggcggtcctcggggtggcctctgtccccgtcccggacgccctggttctctgtgtaggtcgcccgggccccgtccctcctggcgagtgccctgccctacccctctggccgcctgccagtccgcctgttcctgtcgctcgggctccgcctgtccgttcgtatttgtctggttcctgtctgtgtccgtcgttcgtccgactgtctttgtccgtctgctgtcttctgtccgtctgcccgtccgcccgtccgtccctcagtctctctgcggtccctttaccgtcctcagtctggctcgcgctgcctctcaggcacttccccagctcgccccggatcatctgggccccagcgcggagactgggatgggagcggagggagccccggactttcttagctgccctcgagtgaggcgggtgcgggtcgtcacggaccaccgggcggaactctgggttgggagagcaggaatcgagggaggttcgggtgtgcgcggggagtgcccggtcgcgggttcgggacctgtggggaggccaacctctgttctgtagctgcagccgcagaggggaggggctccagcaagaccccggctgggaggcccgttctcccttccctttccccagcccccctctcctttcctcttcccctcattaaatctgaggttcattcaggcagccccctccccctctggccccacacaaagaggccctgagagggagaaggggctgcagcggctgctgaatctcgggactcgctttcctttgtccctgacgggttgtgtgtgtgtgtgtgtgtgtgtgtgtgtgtgtgagagagagagagagagagaggagggggtgtaggggagagctgagggtctagagatttactttacagcctttttctgagaatgagatcagcatagacagcacagagaggcaagagagcctctcgcctcattaggcctccatttttcgtgtgtgtgtgtgcgtgtgcatgtgcgtgtgcaggaggaggaatcaagctggtgcctgaaatccctcccagcccaaagaattcaaggtttgggccaggtctctgccaacaagggtttgcttcctggtgagggaggcagagcttccacagtggacctgatttccatcggttgcacctggtgaggcacaggccctgctgggctggcctgggggtggagatgttgaggggcagcctgccagccctgtgtgccttggtcaccccatctggc

SEQ ID NO: 4506 - DNA, 6000 bp, Homo sapiens
tcctttggcgctaacttcccaaaacttaatctagaaagtttaccttttgtaatttgtattgctgtgaacagataagagaggaaatgacttgtacagggaggcctgtggttaagttattttaacacaagaacttcctgcttgtgcaatatttcctgctctttctttagcagaatgactccaatgtaagtcaaatgacaagtgataataaaattcctctctccaaacaattggcaaattggacattttgcacatgcaccagttggaacatagaatgttagcactaaaaaaaaccttggaggatcattttgtttattttcattttatagataaagaaaattaagctcagagaggaaaaggaatttagtcagggtcacacaaccagttagtggtgatactggacctggaacccaggtttccttactcctgttctgtatcctgttgactgtattaccttgcctccccactttcatgtagaagcacgttttaaagaagcctccttctgatgcatggctgattctttgtggtgtgtttgtctttagcaggagcagctccatatgtgcaggcatttgactcgctgcttgctggtcctgtggcagagtacttgaagatcagtaaagagattgggggagacgtgcagaaacatgtaaggatgttttgcctttttccccttcttttaaggactaacagctttcttcagtcagccaaggtcctcatccttggtttaagagctccttgagaagttcctcttggtttggggcattacacatgttctttctcttttgcctgtactgaggagttcagtctagccacagaaacgattcctcatttttttctaggccccttgcttttatcacgtatttatacagaaagcttgcttggtacataaaatatggttctgttcatctttgtagtgaagaatatgcaccagtttgatcccaacatattacataatcaaacctacagtggcttatttaaaggagtcattatcatgacttagcatttataaaactatgcttgatagttattagttatgctaatgtgggttattttcacacttaacccacagcaagaatatgaagtaggcaatgacaggtgcctttcctcccaccttcctttatgcctcctacgtcatcaccaccaccccccacccccaccccacactcacatatacattctacctctatttttgggacccaaaaaccttcctgctagctcaccgaattataaacagtaaccatgcttgggaacttcttcacctaaacctttctcgaagactggttgcttggcttttggaaaatctattttgagcctctcaaataccatctgttgccaatggttttagctctagagagtgggactgggactttaataagggtgtggaggcttgcatttttacttaatacagttctgtaacatttgaaaaaactttaaaacatttatcatttgtattttaaaaatgcaaatccagaaaaaatagattgctttctttgaatttttgtattttaatagtgcttacagtctcatgtttcttaaattcttttgactgcgaatgacccttagaaagaaagaacatattcgtaactgagataaaagtttcacaagatgatatttatactacttctgctgtactttttttttttttaactttttatttggaaataacttgaagttggtgcactgcactcatacttttgttccattaagctcactaaattgatttaattatttattaatgggtcatggtatctggcatttgagagatagctttaatctaaaggagtaaataccttgagaattttcagcagaaatttaggcctttgcctttactcctgtctccaatttttgagaaaagaaaggtgtttttttggttgctgtttgttttattttgctgatgtgaaataggaaggatttttcagtgcacggtatcacaatgcatgtgtaagatgctaacatgacttcatgtaagctaggtgattatccaattaacttcacttccaactctggatatatatccctgatgagttccaataggaacagtagtgtatgtaattctgctctcagtccctggaatctggaatacatgaggaggataacatgaagtgcctgggttgctatcagagtacatggaagtagaggtttcaggttattcttatcaagacttctctagttataatgtgtcatcaatagctgattcttctttctggcaggcggagatggtccacacaggtttgaagttggagcgagctctgttggttacagcttctcagtgtcaacagccagcagaagtaagttcactactagctggtttcattttggtttgatgctcaggacgagttgagagatttatgtcaagctattataacattttaaaatagacctactaggcttttgataatatatgttcataccaagtcccagaggtagagccatacttcaagtgccttaatgggaaggtactattgggtacttaatggtctctactggctttttctctgtcattttgcataggactgtggttatccctgggactttgcttgcctgcctctttgctgagtccacattcatcatagtgtctccaaagccctttaaagatgattctcttgcttcactgtggatgggctttagtagtgctcctgtggagatcttaaaactcctacagtattgcttctctcctcatccttcactggttgggagactctctctttaattttactcccacctcaaaattttatggtgcaagatgtgaaaagttgaattagagaaaatttagatttctcttggagtcaaagaatataggtttccttcttttgcatttggttttcctagttacagaggaataataaagcaagttgtcctaaatgctgtattaaaacccttgaccctcagcatgcctagataatataaaaatagtgcaagataatgtcaaatatattagattctggttaagtgtgctggctcattcctgtaatcccagcactttgggaggctgaggcaggaggatcacttgaggccaggagtttgagaccagcctgggcaacatagcaagacctcgtctctattaaaaattaaaaaaataaaataaataaaaatagccaggcaaggtggtgcatgcgtatagtcccagctacttgagaggctgaaatgggaggaagatttgggcctgaaagtttgaggatgcagtgagccatgaacacaccactgcactccagcctgggcgacagagcaagaccttctctcaaaaaacattgtgtgtgtgtgtgtgtgtgtgtgtatagatgccatctaattctaatatgtagaattagattttaattcttaatctgtcctgaatggttaagatctgagaattgagatgttcaggaaatggagctttggaggaagggtgcaaacacaaacaaaattcatccattttgccaaggtgcctacttgaatgctaagcccctaattgttttttattttatttatgtttaaaaaaaaattttttttttgagacagggtgttgttttgtcacccagactggagggtagtggtgcaatcacagctcactgaagccttgacctcccaggtgtaatgatcctcccacctcagcctcctgagtagccttgactacagtgtgcaccaccatgcctggcttgcttatttacttacttatttatttatttatttctgagatggagtttctctctgtcgcccaggctggagtgcagtggcaggatctcggctcactgaaacctccacctcccaggctcaagtgattctcccacctcagcctcctgaatagctgggactacaggcatgcgccaccatgcccagctgatttttgtatttttatagagatggggtttccccatgttgcccaggctgatcttaaactcctggactcaagcgatctgcccaccttggcctcccaaagtgctgggattacaggcgtgagccaccatgcctggccctaattctttttattatttgtagagacaaagttgtgctgtgttgttcagtctgtcttgaactcctggtctcaagcagttctcctgccttggcctcccaaagtgctgggattacaggcgtgggtcaccatgcccagactaagccccctaattgcatttgattcatcagttctttacagcagctactatatggctggcaatgcattgggggctttcatgatgataaaagagctcgtctttgaagaattaatgagaaagtaaaacatattcacatgggtccattaatagtttgtattggtgagtgataaaatgccaagattggttatgctgacaacaaatgctgtaggaggctggtgtggctgggttggagggccctcatgaagcatgaggaaaatttggattcatgggaaaaaaagagaacatcatgagtaaggcacaggaatgatgtcctgagtgtatgtcctctgagtggaacaaaaaagagacaggtggctgaaatggaggttctgtggtatagctgaagtatgggtcctgatcatgaagaaccatcaggtgcagcctgaggagttggaactctacgaggagagtgagatgatgagcagtattttagccttaggaatcaggacaggactcatgcagtttatttgggtgctcactagagtccatagagaattcttgccttcaggatcagaaggcatagacacctttgtggaaagatgttaacctgaatcttttcttgtatcttttcctagaataagctttccgatttgttggcacccatctcagagcagatcaaagaagtgataacctttcgggagaagaaccgaggcagcaagttgtttaatcacctgtcagctgtcagcgaaagtatccaggccctgggctgggtggctatggtgagcagcgcagattccagggctgggggtgggtatagattttaagagggaaggcaatatagttggagaggtcctgagtcactgacagcttgtctctctctaggctcccaagcctggcccttatgtgaaagaaatgaatgatgccgccatgttttatacaaaccgagtcctcaaagagtacaaagatgtgtaagttcagccttttctctctttttttcttttctgagacagtgtcttgcgttgtcacccaggctgaagtacagtggcacaatcacagctcattgcagcctcaacctcccagctcaaacaatcctcccacctcagtcctccaagtagctgggacttcaggcacgctccaccatgcctggctaattttctaattttttcgtagagatgaggtctcactgtttcccaggctggtctctaatgattctcctgccttggtctccccaaagtgctgggattacaggtgtgagccactgtgcccagccaagttcagctttttctcaaggggtaaaggataaacccatttggttacttgctggagtagcactttggagttactgagggctgcccttagccactgtgctggttttatctcagggctgctttctggagagctttacagatattgtctcacagctgcatttgcaagcaggaaatacttctgcttccacttctgctttctctccttttttggtagaggcccttttagtcttctgatccttacccttctgggtttaggaagttttgctggcagtaacatggactaatgccctttatataagattttgttcctttgttgagaatttgttactggcccaatggcaaagggttcaataggacttaatagaaatttttcatgaagtcagttaaagtgagagtaaggctgcctagccaatgcaggtattacgtagggcagtcattgcatgtctaaccacatacgtctaccagttctgacttctccattgctggttttgagctggaatgattgcaggcaaaatttattaagttgcatatctacacaagcctttcctttcttccatccttcatcaatcaacaaacatttattaactactctttttaaggaaaactacaccttcctgtgagtgaaatgtgtcccagaacaacaggcacttccttatccttctagcaac

SEQ ID NO: 4507 - DNA, 6000 bp, Homo sapiens
acagcgaaagaagctatcaacagagtaaataggcaacctacagaaagggagaaaatttttgcaaactatacatctgacaaaggtgtaacatctagcatctataaggaacttaaacaaatttacaagagaaaaacaaccccattaaaaagtgggcaaagaacgtgaacagacacttctcaaaagaagacatacatcttcccaacaagcatatgaagaaaagctcaatatcactgatcattagagaaatgcaaatcagaaccacaatgagataccatctcacaccagtcagaatggctatcatcaaaaaagccaaaaattaacagatgctggcgaggttgcagagaaaagggaacactaatacactgttggtgggagtgtaaattagttcaaccattgtggaaagcagtatggcgattcctcgaagagctaaaaatggaactatcatttgatccagcaatcccattattgggtatatacccagaggaatataagcattctactctaaagacacatgtgtgcgaatgttcattgccacactgttcacgatagcaaagacttggaatcaacctaaatgcccatcaatgacaaactggataaagaaattgtggtatatatgtacactatggaatattatgcaaccataaaacaagatcatgtcttttgcaggaacatggatggagctgaaggctattacccttagcaaactaatgcagaaacagcaaaccaaatactgtatgttctcacttataagtaagtgggagctaaatgatgagaactcatgaacacaaagaaggaaacaacagacactggggtttacttgacaggagaggataggaggagggagaggagcagaaaagatgactactgggtactgagcttaatacctgggtgataaaataatatgtacaacaaacccccatgacatgtgtttctctatgaacaaaccttcacatgtacacccaaacctaaaattaaaaaaacaaaataaacaaacaaaccaaaaaaacaagtttggaagtattccttcctcctttactttctgaaggaaaggtgttatttcttcctgcagtgtttgatagaattcaggagagcaccatctggacctgatattttctctgcgagcaggtttttgagcatccagtttctttaatagatatagatagagtttcttattttgtttttgctgctgtccttttgtttttgtttccttgttttttagatcttctgtatcctagtatgtcaattttggtaagttgatattttaaaaaagaaatttgctattttcatctaagctgtcaaatttgttggcataaaggtgtttgtaataatctgtatctttttaatatctatcagcaagaagaagagcaatagagccaagtcaataaaaccaaatgctggctagttctttgaaaagatcaataaaatggatcaacttctagctagacagacaaaatcagagatagaatgaatggtaaaatattagtgatgacttattttttcaaaaaatgaatttggcttccttaattttctcttgttttctattacacagatttatgttctttattatttccttccttgtactttaggttttgttctttttctagtgttttaggttggaacattagatcactgatttttttacctttttttcaaatggatgcatttaaagctataaacgtttctcttagtacactttatatacctcaaagtttgacatgatgtatttctatcatcattcagttttacatattttctgatttctcttgtgatttttaaattttgacccatggatttttaagtattttgttcaattttcaaaacgttgtggtctttagatatcttattgttattgatttctaatttaattccattatggtcagagaacatactgtttgatttcaatcctttttaattaattgagacctgggttttatggctctacatatgatcagtcttggtggatataccaagtgaacttgtaaagaacatgtgttctgcagtttttaggtgttctttatgtattaaggtggttgataatgttgttcacatcatttgtgtatgggctgatttttattttgtttgatttttattttctatcatttgttgaaagggatgttaaaatcttcaactgtaatggtgaaatagtattgtttccatttaattctgttcatttttgcctgatatgtctttatatacacatttaagattatgtcttcctgatgagttgtgaattagaacattatgaaatgttattctccagtaatattattctctccttaaagtctattttactcaatattgatatagcaactccatcctttatatacttactgtttacatggtgtgccttttcagaagcatttactttcaattatagatagcatatagatgagacttgtttttttttaaatctattctgaaaatttctgattttattattaggaatatttaggggaaatgtttaataaattaatattttgggttttttttctgttttttttttcattagctcctccttcccaacccacttttgaattttatctgttaatattctatcaacttcacacaaaatctaaaacccttgcaacttacaggttcatttctctaacgctattctttatgctagttatcatatctattacatctgcgtatattacaaactgcacaagaaaatgttatagcttttgctctaaattgccatatttaatgaagttaaaagaaaaaatattgtatattctcacataattactatatttcttatgctctttgtttctttctaaagataacagctgatattgaatctgaagttcctttaatatttcttgtagtgaagataccctagtgacaaatcctcttagttttttattatttcttgtatacagaaaatgtttcttggctacatgcagtagctcacactcgtaatcccagcactttgagaagctgagatgggaggatcgcttgagcccaggagttcaagaccagcccaggcaacatagggagacacccattgtctacaatttttttctttttaattagctaggagtggtggcacatgcctgtagtcccagctattcaggaggctgaggtgggacgattggttgagccaaggaggttgaggctacagtgaactgtgatgatgccgctgcactccagtctggggaacagagcaagacactgtctccaaaaaaaaaaaaaaaaagtttctattttgccttttttcttaaaagatatttttgctttagatagaattctgaattgacagtttgttttttgaacactttaaaaatgttccactgtctgctggactctgtagtttctgatgataaatcagtgaaagtttttgttaccctgtatgcaatgttttttgtttattcatttaattattctggctgcgctcaagatttttctctgcttccgttttcagcaatttgactatgattatgcctccctagacataatggtttaaatattgattctgcttggtgtttgttgagcttttggaatctgtaaatttgtgtctttcatcaaatttggggactttgggaccatgattttttcaaatatattttctgtctcattatttgctctccttgtaggtctctgattacaggtatgctagatcttttgatattttactacaaatccctgagacagtgtctttttcttctctttttaaattttttttctcttggataaagataaagatggtttattcttatgctgcagaatttcctttttttttttttttttttgagacagagtcttgctctgccaccaggctggagtgcagtggcatgatctcagctcactgcaacctccgcctcccaggttcaagcaatttccctgcctcagcctcccaagtagctgggattacaggcatgtgccaccacacctggctaatttttttttttttttttttgtattttagtagagatggggtttcaccatgttgaccaagatggtgtcgatctcctgaccttgtgatctgcctgccttggcctcccaaagtgctgggattacaggagtgagccactgtgcctggccctatttgtttctttttaataattctgtttctgtactgaaatttctcattttattcaagcgtattatctttgcattcttgagcatagttataatagctgctttaacatttcgtctgctcattttaacatctaaaaatggtttgaggtttatctctgttgactgtcttttttcttgagaattggtcacactgcttttttcttcatatatcaaaaagttttggttgtatcctggtattgtggaaaaatctggattctgttatattcttgtgaggagtgtttgtttgttttagcaggcaattaacttgactggaatcaaactgctaatctattttttagacaactgctcaaaactcagctcagtttatctttagatagagtttgccctgcacacatacagttcagggatttaagaatttttctgccccacccccacccagtactctagtatttaaaatatattctgacagacagttttttggagtatttttctgagttgttatttgataatgagaattttacaggaaaggtttaaaatttgatgttttatttctccaaatatctgctgggacattgtaaaggagaagcagtttggttttataagaaaatgatacttagcaggtattaatactccaaataattattttactcaagtatacactcaaggctctagacatgaagaattggaaaaggtcaaagcaatgaactagaattcacctgaaagcaagatatacttccagatgtagaccttgcatgaaattctatccttttgttcatatgagaataaagatgcctggtagcagaacaacttacatgtggcctacaaacacagaatagctctttctttaaagaaattttgaattgagggtgaaccttaaagagacagcactttatgtgccccgatgtgaatcatcagtcctaactaaggtgatgttttagaattttggagctggtatactcagataccatggagacaaggccaaaggggttaggaaacttttctctagtcttttttggacagcctcagtaagggtagtgtgggatacagaatcaaagagcctcatcttttgagatggaaaactcaaggtccaagcaagactctgtcatttactgtttgatttgtaacaggtatttagcctttcagtgtctacatcaattttatctataaaatgtagataaaagttgtttaaaagattaggtggttgcctactctgtagtaggcattcagtattttgtgttctgcttccagattacaaaagggtgatataatgtcaatataaggataccaaaagaattcatgaaatgtcaccccaaaatattactttgaactgagggtacttggggaacagcaggtgcaagtagaggctttctctgagcaccacttgcatgcagagccttttctctgagctcctcttatctgtctaaagacggatcctccgaaaggaactcaattgtcatgaatcccctccctgggaattttatcaaccagggaagattaacttggatcacaggaggggagactagaggttgaccctatgcccagactatcacctcttctaagggctgctcagaaacaacttttattaccgactttttatctgtataacaagacaacctttattccccgtgcatttcttcccctcaccctcccataacttgtgtcgccacccccttccccagaagccccaagccctgatgcctttctgtaacttgggatgctgtatcagcatcaatcatctgacccttctttgaggctcctattttgtgagactcctgtgcatacttatgtaattaaatatttacataagtctttctcctgtcttatgtcagtttaatttgtaacccagccaaggaacctggaagggtagtgggatgccattttctctcccctgcagtgtgctacagagaagattgctattcttaatttgttatttaatcctcttgggtaaggcctagaagg

SEQ ID NO: 4508 - DNA, 6000 bp, Homo sapiens
agcctagaaaaacaatcctaggactataagaggatttaaatttttgttatttataatttttattttaattacttacttttttttttttttcctgagacagagtcttgctctgtcgctcaggctgcagtacagtggcatgatcatggctcactacagcctcaaacttctgggctcaagcaaacttcctgccttgggctcctgagtagctgggattacaggcatgtgccatgtccagctaattttttggaattttttgtagtgataaggtcttgctatgttgtccaggctaatctcaaactcctggtctcaagcaatcctcccaccttagcctcccaaagcattgggattacaggtgtaagccactgtgcctagccctgtaagaggctttaatgggcagctatagtttattggatgcttattatgagatgagcattggctaaatgcttgaccagcactatttaatcatggcaaatacctatgagataggtaccgctattatacttatctgacatatcaactacaaacacagagaggtgaagtaacttacagtcacacatctacacctgcttaaagaacagaataagaggccaggcatggtggcttaatgtctgtaatcccagcactttggaaggctgaggtgggaggattgcttgagcctaggagttcgagaccagcctaggcaacacagtgagaccacatctgtatttaaaacaaaacaaaacaaaacaaaacagagtaaggataggaactcaattctgcctattctaaccaactatagaatatttgagtttgcttctcatcaacatctctgcctagtggcagtcatcctgctattcttgcatacctcactgcgtgacaaggtaatcacctccttcatagccagcccattccagtggtggacagttctggccctcagaaagtcagttctaattctactgagccaaaattcgcctcctctagctatgctatttattctgggaggaagtgagaactacacaaagacagcagcatttctcaccccttcccacactgcagaggaagcacacttgggggaggcaatttggtccatgcagaatgcagcggaagtgagagtgccctggaggacaggaattgagtgctacccagggaaaggtaagtgccatctgcttaccatagccattgtccaggaagtcagtgatgaagcgggcactgcagggggaccagggctcctcaggatccacatgagccatcacaggggccatgacatggcgagaggtgctcaaaggcccattcaaactgatgcatggcttggagttgtcatggagcatgttgaagacatgacctgtgggagcaaaggccctgataggatctgagggtcccttccccatgccctgagggactccataataaatctggctgcagctgtggatgatcagatccattacccacctcaccctgcccccagtcctttcctttatggtactctcagggctcccagtatgtagccccgtctctttctctgtctcctcttccccaaaatatactcagggtccctccctacccacttttccttatagccaacattcccaactgtgaccccacccattgtctctgactccccctccaaatacacacacacagacacacacacacacacacacacacacacagaggagttcacagtagtttcgaccaactaatttatttaatagaaaaatgtaaatgtatgtctacacctggagcagagaggagtaatagccctatacctaggcctgggggaagaataccttgggacccccattaacactgtggtgaacttgctaccccctcccccaccttctcctccctaatacctttctcatccacccctactttacccagttcatgagcagcagtgaaggctgactggagcccatcatcctccacaatggcacagctccgagccgggtcacagacggtgcccacatcagccatacccagcgtgtcgcaagtggagactccacacaggtcctgtggagagggatcatagaaggtgcatagacagccaagacacctgggtccattgggttgagatccagattcccggggacctgggcactgaggacccagcactgtcagggcctaggtagccacacatggcagtgtggctggggcaaggcaccatgtcacacaactccaggaacatcatttgcatcatagtctatgtagtggcgcttcttagaattgtgcagtgcatggcctgcggtgctgactggggcctcacctgacgggtaaacagaatggctgtgtcaaagtggtcagggtccgagtcctcaggggtgttgaggccccgctgccaggcacagaagctgcgcagggtctgggcagcactgggccccacttggggcccctcctcgcctgaccccaggatcactagccgagtcaccaccaagctgacaggattgcggatgcttgggtgcttgaaggccttggctgctgctgccatcactgttagcaggtagcgctttagccccgcaccgtggaatgcggccatcttgtcatctgccaccaccagtgtctccacaaatctactcagtgaagcaaagcgctgtagagaaaaagggagaggaagatcctgaaatagcctctcagacccatgggtcggtcgattctccaatccctcacttcctgggtctggaactcagcatagtcagctgggccccacacaccccacgggattcctgactcctggcgggtcttggttgggcccttcccccaacgccaaatctcagggcttttgtggtaactctgaggagtcagcagctggttctaagaaggggaggagaaggggacgccacatcccagggctgcgggagccccagaggtgaaagcagcctggactgccgtcaggagggactttggggttctccaggcctgagtgtggctggggcctatgggaccagggctagagggctgggctgcaacgtgtctgccctgtgtggttggaggaacgattcagtcagcagctagggccagggccagagctcagcgtggcggttgtggagggagcgtctggtctggattaaagctagagagggaggagggaggagggaagggaagaagggggagaccaggagtgggagggaggaaaggatggagcctcaggcagcctcgcagtccggccacagtgtgtgaaggggattgaccagaaggaggtatgggataccctccctctcttgccactcctgccctagtttgcagtttgccacagtgattttaaaggcagcatcagaagccagacaccaagccctagggcctcaaacctgactcctatagctgggagtgggggatgaaaatcaaatttggagcagagaaaagagccaaggccaaggggctgttaggagacctttactgctggggactgtgtcagtaggagatgccatggccaggaaggggtggggtggggagagggagcagttattcccagcccagagtctgtgacccacctctgagaaccctcggtgggtctggctaggagaagggtgaaggggagaggcctgagccttaccaagaaaggaggctcatggagaaaggaaaggcaggcagaagggagggaagcagaacggccagaagtgtaagtgggtggagagagggtgaataggggtcagtaggacagacatggcgggaggacaccgcaggacacagactccagagatgcctaccttggctcttcggggtctggggctggggcttccaagaggagccttgacgttgcacatgggaccttgaccgctggcaggactcttccggcgtaggatgtgagccccaggtcccccagcagagttaggggtgcctccctccaggggctggaggtggagttcagccccccgatattgtaacacgcctaacagggctcccccatcccagtgcagagatgccaccgactccggatctccattgatggtgccagtcaggtaggtgccaggctctgctccacccagcagctcaggcgcctggcccaggtactgcactgtcagcccctcgacctgcacaccggagtcctgctccagctctagtagcagcgtctccccaaaggcctgcaagcggcacaacagcctggcaggggcgcccgagccaggcaggacgctgccgttgagcttctctggaaacacgatctcctcctcccgggggagggggctggccagccgggctgagggcaggagagaggccagcagtagcagaagcagccacaccagccaggagagcggcacaatggggagcaggaggcagggttgggctccccacagccagcgccctgccaagcccctcccgggatgcgagcctgtctgggacatggcactggtactgcagctgggagggactgaggccgtctagggcaccaagtcctccacaccctagctttggaaagctcctctctgtagcctgggggcttggactcctgccaaggtcagaggcaaagttttcagaagggctgaggaccgttaaaggaaatggagaaaacttagtccttgggcttgggagaggtgcccaggggtctggcttctccaaactctcctcctgagccctcctttcctggatctttgtctctccctgcctgtgtcttctgcagcttctctggcctctccctctgtaggactctgtctgggccgcttctgtgcctgccctgtctctgccttcttccgctgtgcctttgtctctgtctctttcctcctctgtctctctcgtgcatatgtgtctgtgggtctccctgtgggttctccccagcctctctccgcgccagctcttttaagcatggtgagcctctgcgattgattggctgatctctaagccactcagctgagctctgtcggtgggactcagatgggtgtatcatcgcttcccaaaaaaatgggacttgcccaggggaggggaatctctagcagccgaatggataataggcactgggccagctgatgacatagccttttcccaaaccccacaatcagccctcagctgtctctttccctttttggtgggacagagccccaggagaggcagagagtgagggaaagggcctggccggcatgcacagataggatcacggtcctgggagaattcctgctcttatagtctaacctaccatggcttctcttttctcaaggctccctcatgctgccctttggccctagtggctggtttccagggctgaggggactgagtgagctgcctgagaaaagagggtagggaacaggtaaggaggcatcaagagggaagaacaaataaaagaggtagcttgacatggctcaggatagaactgagcagctgggaagagtaaaaaaggcagaacattgggggaggcaaggagacagtgatcagggagttgactgcccaaaggtaggatgatcctgcttggaatgaacataacagaggcggcagatgacaaggcaggaggggttaacgacttttccttttatagaaggcggatccagggtggcacctcctcttttctaacgtcccttctctccctcaggatcccccttcctgagttaccactacccaccccctccaaagcccagaacagccattccgcctccatttccccccagggttccccctccccacttcctgactccccatttccctggcccagctcccagtagcttcccccaggcttttggccctgctcctacccactcccaactgccctaaaccctcccccagcctcaagtcagccagcccccagcataggcaagacttgctctcaggaacccagattcacccagtatcaatctgggagaatccccacctggctcccaccatccaccccaccttgctctgagaacccagtggttcctggaatatctagtcatcttttctttttaattctccctggggcagggagagggtggagacagcattgtgcatatagggaaattagggtactgggagaaatccattgcctggggtggggaaagtggctggggaggaagaggtggtgttagggaaaggaagcaaattattcctttggctttggataggagg

SEQ ID NO: 4509 - DNA, 6000 bp, Homo sapiens
cagaacatgaatgcactagccacacaggatgaatgatatatttgcctgcaataaaactgatcactttatttcatcagaggaccttcatacaggagtgaaagggcaaggcacggagatggagaagatgtttgtaacatacatagcatttaattatatgaagttcctaaaaataaatatgtaaaagacagtgctattgaaaattggagttgggcgtggtggctcatgcctgtaacccaaacgctttgggaggccaaggcaggaggattgcttgagccctggaatttgagaccagtctgggcaacatagcaagaccctgcctctagaaaatgaaaaattaaagagctaggcatagtggtacatgcctgtagtcccaagctccttgggaggttgagttgggaggatgtcttgagcctaaggattgagcctgcagtgggctatgatcacaccaatgcactctagcgtgggcgacagagtgagaccctgtctcaaaaaaaaaaaaaaaaagaaagaaagaaaattgggcaaaacactttaatagtgacatcacagaagagtgaagactccgtccccaaaccatcagaaggtgcccagcttgacagtcctcccgacagggacccaggaagccacaggaggcccaggccctctccgaagaggccagagctgaccctcctgacagtggcaggagcgggagtctcagactctggggccctggggtgaggacgtgccctgcacagtcccctggggagaccccggcacatccatgagcggagatgtgcaggtgtcaggaccccagtccctgccctggaggatctgtcatggcggccctgcctggggcagcccttggtgccgtgcgaaatggaaggagaaactgtgttccttgtgctgggaggtggtggggcttctcctgaccacacagccagtgcagagcctgaggctggtgaaggttctcttgctccctcctccctgcccaggccttctctccccagtgctgccttcctgaccttgatggtggtggtcaccctatgcatccctgccttccccagagcccaaggcggtgtttgccaaggagcagccagcgagcagggaggtgcaggctgaggcggggaccagtgccacgctgagctgcgaggtggcccaggcccagacagaggtgacgtggtacaaggacgggaagaaactgagctccagctcgaaagtgcgaatggaggccgtgggctgcacacggaggctggtggtgcaggaggcaggccaggcggacgccggggagtacagctgcaaggccggggatcagcggctgtccttccacctgcacgtggcaggtcagtgctttggaggtcctgaggagcctcttcagaggtgatggtgcttctggctcgtagccccagcatatctctgtgcactttccttcagccttcatgtctcgggcttcccatctttccactcccatttccatccctgtggctgggccaagggaggggtgtgcatgggagggagaggggctgttcctgcaaacccggaggcatgtttgtacttggtagtgcgcagtcacacctgcggggcaccttcctggttttcttagtgtccaaggaggctcgctgcccctggcactgggggttgaggtggaccgggtgtctgtcacatgcacagaggtgaatgtgctgttgttgaatgtctggtagctcctgagtcctcaccctatggagcatatggctcttgccagggggaggggagatgcctccatttcatccaaccaagatcatgggagttttcagtcaccgaattgtccttggaattttcccaaaactaaaatttggcttatcatagttttagagaaaggggaacactcttccctcttcccatatgttacaaaatgtagatccctgatttgttgtgattgtgtgaatcgtaaggagtggcgccccagtggagatgtgcctgcagtgcatccatgggcttagaatactatttctaaaacaaagcatgttttccttttgtcctcaattggagtatttggtgtcagtgttcttgtagtttgatttagaaatggaaaagaataagtagagtaggtgacaccaccacacttcgtcaaaggcgagttcccttcatagcagcctctgtttgacatgtgtatttactttatagaatttcctaatggttactgtgtttgagcctccatggctgcttcatagagaagtctgagaaacaaatttattttcctttcattaagacagtcttactgtccagtaaccctggctgtaggtactacactgacctctagatgccaccacataacagtttgttattgcatcagcatagagtggttttgggggtgtatatacacccaaaacctcactctgtatttttgtcaaattttaagagaatatgacaaattattttatagaaatacatttgtggtaataaattttatagtaataaatttgaaaatattgacaatttggccagttcctagaaatatatcaaaagtgacacaaaaataagtagataactctagtagtcctagaaacttaaaaaaatggaaccatgaaaaccatctgctcatagcaaaagatgtaagcctggtggctctaattgctaaattatactaaatatttaggaaagaaattattctatgttcatacagattcttctactagggaacagaaaagcagatatactccccagatagtcttgtagaaacatgatatagcctagggcagtggctcatgcctgtaatcccaacactttgggaggccaaggtagaaggatcacttgagctcaggagttcgagatcatcctgggcaacatagcaaaaccctgtctctaaaaaacaattaaaaaattagctgggtgttgtagtgggtgcctgtaagtcctagctacttgggaggctgaggtgggaggactgcttgagcccaggaggttgaggttatagtgaactatgatggcaccactgcactccagctaggtcaacagattgagactcttgtctcaaaaaagaaaaaaaaagaaaaataagaaatataatatggatatcaaaatatgacaaggaatgttaacaaggattaaaattttagaccaatctattatggatatcaaggcaaaatattagcaactgaatttagctatctatcaagaggataagaccctctaaggaaggatgtagtcccagaatgcaaggctggtttagttttagaaacaagtgcatctatataaaggatgatggaattggatgcaatgaaaaaattatgtgatctcaataaatacagaatacaatgtttgattaaatttaatattaaagttcagaggtaatatttgataaaattcagcatcaattcatgccatgaaattcttaacaaattataaagtatcgttctttaatctggtcagtggtactgcagaaaacaccaggtaactgcatatttaaagagaaccttgaaagctttgcctttgagataggaatcagcacgtagaagccaaccatcccaacttccattcagcactgtacagcagagaaaggaggaaaagaaaagaaaaggtataacacttggagaaaaacataagtgggattcacagattatatgagtatcaattcagaaaatccaaaagatagataaataataagataaataataagttataacaaataatatgagagttgagaaacatcacatagaaattcaacatgcagaatacacatatatatgtatgtatgtatatacgcatacacacacacactagcaacacagttgtaaaatgaaattttaaaagatttacaagagcgtgaaaagcatcaagtatagtaaagatgtctgatacctcagtggaggaaaattgtcagatatttttgttgttgagtcaggatctcactctgtcacccagagtggagttcagtcgtgcaatcatggctcactgcagcctcaacctcctgggctcaagagatcctcccacctcggcctcctgacttgatgagaatacaggcgtgcaccaccatgcctagctaattttttaaggaatttttttggtagcgacagggtctcactatttcgcccaggctgggctcaaactcctgacctcaagcaatcctcccacctcagcctcccaaagtgctgggattacaggtgtgagccactgtgcctggccattgtgaaacatttttgacagacagtaagaagacctaaataaatagaaacccatggaagactcaaatatgttaatgcccagtcaaaacccaagcaaatgtttctctttggggaggtgaacgttgagaagcagattctgaaggccaagtggagtaacacactcttgaagagccacttgtgagcatttgtctaccagatatcaagaacattcagctgcaggaatggagacagccaggcacaacacaaggacagttgtcagaccaaagggacagaatcgtgagctcatgatcagacccaaatacatggattctcccttttattgcttcttgttttttttgtgtgtgtgtgttttgtgtgttttttttttaaccttcacacctgcacaggcagtggagaaaggatgatcttctaaaaaaaaaatagttctttgattgtttaaccttacaaaaatttagactagtaacttatttcacactgaaaagtgagttccaggaaggttagaggccacagagtataaaaggtaaaaccataaagcctctagatgctaacatagattgctaaaaacttcagggaaaggaaagatttcttaaaactaaacagtggaacaatggtatatttaactacattaaaactaaaactttaatttgtcaagacatcatttgagagcgaaaaggccggtcaaggacatgggtaagatgtttacaaatacacagttatcatttgctagcatttaaaatatataaagagttcctaaaaataaggaaggaaaagacagaaaaggctactgaaaattggacagaagcctgaagagcgacaccccagaagagctgacgtaatggccagaagtggtggaaagggctccaccttgcatgtcaccaggcaatgcatgacaaagcccaggccttccccgcagaggccaacgctgaccctcctgacagtggcaggactggaagcctcagtactctggggccctgcagtgaggacacgccctgcccagtcccatggggagaccctagcatatccttgaagggagctgtgtaagcattaggaacccagtccctgcactggaggagctcgtgcacggagggtttgtcacaactgccccgcctggaatagcccatggcactgcacagtggatggagaaactgtgattcttgtgctgggaggtggtggggcttctcccagctacatggccagtgccaagcttgggaaggttctgtttctcctactttcttgtctaggccctcctaccctagggtggtcttcctgacctgggcagtatctttgacctcgtgtgtccctccttgtccatccccagagcccaaggtggtgtttgccaaggagcagccagcacacagggaggtgcaggctgaggcgggggccagtgccacgctgagctgcgaggtggcccaggcccagacagaggtgacgtggtacaaggatgggaagaagctgagttccagctcgaaagtgcgcgtggaggccgtgggctgcacacggaggctggtggtgcagcaggcgggccaggcagaggccggggagtacagctgcgaggcagggggtcagcagctctccttccgcctgcaggtggcaggtcagtgctttggggatgctgagtgagccctgtttgtagctgctgctgtgactggagtagaaccactgctgacccagtgggctttccattagactccatccctcaacttctcccatcctctcacctcctatttttatgcctgtggtggagctgggctgcttagtggggaagggagtgaacggaagggtcagggccctccttgtccatgttgggtggtgtttctgtgcagacatgctgggtcacattttcccagtaccttctccaaac

SEQ ID NO: 4510 - DNA, 6000 bp, Homo sapiens
ctaggccatgccccagacaaatcagaatctctgagggtggagcccagatgctagggtttttgaaagtcgtctgggatccaatgccctgccaggttgagaactgcagccccagagctcttagaagaggaaacgcttcgctgagattaattaaatctagagtgggcattcggaaaaccctcctctgagccccacccagtacagtctccttcaggttctctaaaggttttgcatgtcagatgccaagggtgtgctcaaggtggggctggaagggagcgggaaagggagaaggggtccaacccacccccttcccgtcctgcgcctcccagtgatcaaactgatctccggctggaacattgacatcctggagcgaggggaggtgcggctttggctggaagtagaaaagttatctccagccgctgagctacatctaatcttcaacaacaaggagatcttcagctcgccggtaattgggtgctcacaatccctgaagtgaggctcccctgccggggaggtggcctcgcgggatggtgattccgcatgggctggtacttccccctagtggccatttcagaaatgacggtgtgcttttgctgttgcagtgatgaggacgggatgggaacatttggctcttagtaccagtgctggtgttgggggtggggttggcagggacactacatgctggccagtgcaagggacattcccacaaacaaagaattcccacaccccccacaacttctgattaccccaccagacattcttaagatgaaaaacctgcgttcatgcctataattatccaaggctagactctaactctgttttaggtataaatacaaactatttttgtacaatttttttctttttttatctttttaattagagatggggactcactatgttgaccaggttggtcttgaactcctggccttaagtactccttctgcctcagtctcccaaacaattttattttttgttttctgtttttgtttgtttttgagacagaacctcactttgtcaccatggctaaagtgcagtggcatgatctcagctcattgcagcctcaacctcccagactcaagcgatcctcccacctcagcctcccgagtagttgggaccacagtcacacaccaccacgcccagctaatttttatattttttttttttgtagagacagggttttgccttgttgcccaggctgcaaactcctgaactcaggcaatcctcctgcctcagcctcccaaagtgtgcaatgttactatacactgaatggagaatttttattctgctggttactttacctatgctcattcattttcctgcttttgtacagaatagcttctgatttttttgcttttcttctcttaaagtcaaaccgattcattataaagcagggcagcataattaaggttatatccaagcacctatatattgaaatatttttattttaaacgacttatttcttctttatattatggttagagtatattattttgtaaatcatatctgtagataggttgtattagattgaaccacatgatttgtcaatattcaactgtttactgctgacatggcgatgtcaacctcatgagagattcaaattcatgactcaatctcatattatttgtgaatttcatctccagatggcaaagcagccattagaaaatacgtgttgtggctgggcggggtgcccatgcctgaaatcccagcacattgggaggccgaggcaggcgaatcacctgaggtcaggagttcaagaccagcctggccaacatgatgaaaccccatctctactaaaaatacaaaaacttagccaggcatggtggtgcgcacctgtactctcagctactcaggaggctgaggcacgagaatcgcttgaacccgggagacagaggttgcagtgagccaaaatcgtgccactgtactccagcctgggcaataaagtgagactctgtctcaaaaaaaaaaaagaaagaaagaaagaaagaaaagaaaaaaggaagaaaatatgtgttatatatatatcaaaggtccaatgacaaaaaaaagaagaaagaaaacatgtattatagaaagagggcactagttctgacaggagtctcatgtccacctgctgtgggttatatgaccttggcaggtctcttcacctgtctgtgcctgtgtttctccatctgtgcaatggggctggttgtcccagcatcaaaagatgcaaatcagaaaactgatttgaaagttctgcataaagcttgtgcaatgaccttaccacatggtaaaggaagtgttacaaagtctggactcattagtattcagtggtgggacaatcagttgtccctatagaaaaataaaacaaaattagattactcccccaaatcatacatacaaataaagccagaggaagaaagaacctagatgaggaaaatgaaattttaaaaactgttagaatatggtaaaatgtaaatgagtgttaattctgggtagcaagtacacgagtatttttttttccattatcctttacacacgccaatggggtttttcctattttaaaagaagtaggaaataagctgctgggcacaatggctcacgactgtaatcccagcactttgggaggccgaggcaggcagatcacttgaggccaggagttcgagaccagcctggccaacatggtgaaacccagtctctactaaaaatacaaaaataagctgggtgtggtggcgcatgcttgtaatcccagctactcaggagactgaggcaggagaattgcttgaacatgggaggcagaagctgcagtgagccgagattgcgccactgcactccagcctgggtgatggagcgagactctgcgatggagtgagacactgtctcaagaaaaaaacaaaaaacaaaaaaagaaagaaaaagaaaagaaaataggcaaaatcatggcacagcaggggttcgggacttattattaaattgtaactgatcgctccactgcaccccagcctaggcaagagtgagactctgtctcaaaaaaacaacaacaaaaaattgtaacttattcaagcaccccgggggactaggtgtggggggagcagcagagggttacccaacggccagccccagtctctgaaggctgacagctctgtgcttaccacccccaagcccactacactctgatgtgtaccccacaacaaagttcccagaacagggaaaaggactctggagtttgtccttttcagaaccgcaaaatcaattttgaccgagagaagggcctggtggaagtgatcatccagaacttgtctgaggaggacaaagggtcgtacaccgctcaactccaagatggaaaagccaaaaaccagattaccttgacactggtggatgacggtcagccatgcccagcctcgccccgcccagccctgccccgccctgccccgcacacctggcctgccctgcagccctgagtcctcggctctgcagcctgctgagcacagccccctcgacttctgtccaccccatgtcccctctccagacccacactcctctcggctcatgccagttcctccctctgtgttcacagattttgacaagcttctgaggaaggcagatgctaagagaagggactggaagagaaaacagggtaagagctgctggggtgaagttcaaaatccctggccactggttcgtgctagagatgctggactgcggattaatgggaaccccagccctgctgggtccccaagggaggtccactgtcattcagtccagttctgtcccagtgccagatcaaaatagctcttgcctgacctgagggtgagagctgagccctcttaaattttgcaccctgaagccaggcacagtgccccacacctgtaatcctagcactttgggaggccaaggtggtcagatcacttgaggccaggagttcaagaccagcctggccaacatggtgaaaccctatctctatgaaaaatacaaaaattagccgagcatggtggcacacgcctgtaattccagctactcaggaggctgagccacaagaatccttgaaaccaggaggcggagcttgcagtgagccgagattgcgccactgcactctagcctaggcaacagagcgagactctgtctcaaaaataaagaaagaaagaaagaaggaaggaaacaaaggaaggaaggaaggaaggaaggaaggaaggaaggaaggaaggaaggaaggaaggaaaaagaaagaaagaaggaaagaaagaaagaaagaaagaaagaaagaaagaaagaaagaaagaaggaaagaaagaaagaaagaaggaaagaaagaaagaaagaaaggaaggaagaaagaaagaaagaaatttgcgctctgagcaccgcccctgcctcaccccagtcccagccctggcagaggcagcatctgagaagtccatagccattagctgtccctccccccagcactgcctggacacaggtggcaccctggctgagcctggctctctgacagtgggcacatttgttttgcacgcacaggtccctattttgagcggccgttgcagtggaaggtcacggaggactgccaagtgcagctgacgtgcaaggcaagtcctgccctgccctgcccccaggcccagtgcagggggacctgtggcttgtccccaagcccagttgctgtccctgcccacccggccccctaaattccatactctgtgcttggctgatcgcacacacagaaagtacccccgaggagaccacacgtaacccaaaaagcaaacccaccttcccagcgcccatggggtaggattcgtgtgaggtggaccagccttgaacgagatcctagtggctccagaaggggttctgaggggtcagggggtctaggagcccacgagggtttatatgttgaggggtatccctgtgtttatgattaccctgtgctcagagactcacagtattatttcatccgcctcacaatcatctgtgacacaggcattactatcctcacttcatagatgagaaaacaaatggagaaatagctcaaggccacacggtaagagggagagcccaggtttgaacaagtctatctgattccaaagcctaaggtccttcttagcactcttcagcctgtttagataactggggaaggggagggtgggtgctctcccagaagcatattcattcagtaaactcagagcatctattttgtgccactctgcacggtactgaacgtacaaagatgatgaagtggtctctgtgggccttgggagcccatgttcaaggcaggaccattggaaaacagcatccctcatgcttgacccggatggggcaggacattgatgaatcgtgatggagggggtgactatgggatgcttcaaaaaaaaggcttcctggaggagatgacatttaactgaagcacatggacatttccaagaaaaatagagtaaggcagggatcaagaggcagagggaaaaccattagcaagaattcagagtccagaggccagcagaggagacacatggtatgtgaaaggactccactgagatgcctgaaagtgtgcacaggtgtgtttttactcaaaaagaaacaagcctgacagagtctcctcattccccaccttccccaggtgaccaacaccaagaaggagactcgctttcagtggttcttccagagggcagagatgccagatggtcagtatgacccagagacgggaacgggacttctctgcattgaagaggcaagtgtggctccagcttcagggctcactttctcctttggctgcaagccagggagggccaagagctctgggctgggagtcagggcagggccgaggctaggttgatgcaagtgaggccctgagcacaaaatttaagaggcaccaaaaaactcagtaatcaagataaataatattgtatgcaatattctaaaaaatcaaaattaatgcaaaaaaactattaaagcccccaaattttcaatagagacagaatcagtattactgatttttttctttagctccagtactggccctgccaatgactgtgcaggctt

SEQ ID NO: 4511 - DNA, 6000 bp, Homo sapiens
cagcctggccaacatggtgaaaccctgtctctactaaaaatacaaaaattgaccgggcatgatggcgggtgcttgtaatcccagctactcaggaagctgaggcaggagaatcgcttgaacctgggaggtggaggttgcagtgagccgcgatcgtgccattgcactccagcctgggcgacaagagcgaaactccatctcaaaaaaaaaaaaaaaaaaaaaagatttaaatgttttgtagaaatggaggcctcgccatgttgtccaggctggtcttgaactcctgggctcaagcagtcctcttgcctcagcctcccaaagtgctggggttacaggcatgagccactgcacccagccaacacttgtctttcatctttttttgttgttgttgagacggagtttcactcttgttgcccaggctggagtgcaatggcgagatctcaattcactgcaacctctgcctctcgggttcaagcaattctcctgcctcagcctcctgagtagctgggattacaggcatgagccactgtacccggcccatcttgtgttttttaataactctccattctgctctcttcccagcccctggcaactaccattgtactttctgtctctacaaattagagtactctgggtaccttgtgtaagtgaaatcatacagtttttgtccttttgtgtctggcttatttacttagcataacatcctcaaagttcagccatgttgcagcatgtgtcagaatttcttgtctttttaaggctgaatggtattgtattgtatatatatacatgagatggctttagagctttcttcaactttgaggttgtaggagtctcaatgccaggtctccgttgttcctcagtgtggactgctgcctgtagggtgagtggaggccctggcttcagaaagactttccttcctgcttatgtcaccagaaccttccctgagcccagaggtcctgggagaccctggggagggatccgaggaatgaaaggctttggctaaacacctgctgccttctctctgaggcttcagcagctgggtcagggttgggtgctgagcaagggtgggggagttaatgatggcctgccagggacttggttgtccagatgaaacgggccttgctctgaggcctggcctgattacagggagccctgcgcttgccctccccagggcccaggcctggccttgcagcagcccctgcatgcccagctgttctggagcagctgcagaggtaggtggagctgaggaatttgggatagcagctgccaaaatgcactggctttgggatctggcacaagagatacaactcatggtgaagccagcaagttcatgccggttctcatctgagggctaactagtagtaacagtcactgttgcttcaagttttaatatgttcaccgcataccaaacactgggcatgaattatctcagttaattgtcacacagctgtaggaggttggtatcgttgcccccattttacagatgagcaagctgaggcttggagagccttgcctaggtctatgcagttggtaaatggcccagctggaattgggccctggttatgtgctgaaggctggtttcttgtccactgcttctgtgactcggtgggacattctttggccagcttcttagtggagagtgggtgaggggccaagatccacctgccttccccacatgggccaggagagctcctcttgtagctacttagggattctgcttcaaaacattatttgaaagccactgttaatagttcaacctatttattttaatttatgtattttttttttttttgagatagggtctcactgtatgcccaggctggagtgcagtggtgcaatcttggctcactgcaacctttactccccaggctcaagtgatcctcccacctcagcctcccgagtagccgagaccacaggtgtgcaccaccatgcctggctatttgtatttttagtagagatgggggtcttgccatgttgcccaggctggtgtcgaactcctgagctcaagcgatctgcctacctaggcctcccaaagtgctgggatttcaggtgagagccactgctcctggcctcaacccatttattttacagatagagaaacaggcccagaaaggggcagagagctgtctagggtcattctaacagggttggtggctgagccaggccctgcctctcagccacctgctgtttctggtgcccacctgtcttcctggattttgtatgtgacctccctaggcaggagggcactctggggcctcccctgctgggtctgctgggcctggagcccattctgtaggacccctgcaggccttggctggtggacaaatgactgaaggagggagatgcagggctggcaggcagtaggggcagagattagaacccaggctggatctcaggctggctctgggctgacttgttgtgtggcctgagtggctgcattctctccaggcctccatttctccatctgtccaacgatggggtattgaccacttgggcccacaggcactgagcaggggaggatgaatggtcccgacaggagatataaatgtatggggaggaagaaaggagccgctgggcccaggagggctgtggacatcctgcctttgccccatcctcctccaggaaacagcctcccacactctcgctgctggccggatgacgccgcttggcctgagcgtgtccaagcctcaggtgacagagttcctggtcccttatgctgccctggggctggtggctgcccttcctcgatcctaagacatcctcctcacctcagagtggtgctggcctcagcggggcttggaggaggctgagctctctgtgtgggcactcacatgggtgtcagcctgacccacccacgtgtgctcacatccctgacacgtgcacatacatgcaaacccatacacgcaccctgcatagtaggggctcacagacggaaagagccaggccacttcttttttttttttttgagacggagtttcgttcttgttgcccaggctggagtgcaatggtctgatctcagctcactgcaacctccacctcccgggttcaagcgattctcctgcctcggcctcccaagtagctgggattacaggcatgcgccaccatacccggctaattttgtattttttagtagaggtggggtttctccatgttggtcaggctggtctcaaactcccgacctcaggtgatccgcccgccttggcctcccaaagtgttgggattacaggcgcgagccaccgcgcccggctgagccagaccacttctgtcttttaaggctcctgctaatttaaaaatgaagaaagtcctaaataggatgttcacaactgtggtatgtttttatttaacaaattaatgttttttaacacacacatgcacccacacacatccaatgcagtgcaactgagagactcacaagatcgtcacaagaattataaaaaatgtgatttcacattgctgtgtggtccagtgatgggatgtaagtttcaaatggcatgaagagcattctgttcttcccatctcatccataattctctggggctagacatccagcccactttgtgtactcgttgtattatgaaaagtatcaagcatccagaagggttgaaagaatggtacagtgagcacccacatactcagcacctggggactacaatgaacattttgcagtatctgctttatcacatatccattcctctgtccaaccctctgtccatctctctgcacagacagccctctgcctatccatctacctagccatccatccctccctccctcccttcattccatctcatttttggatgcatttttgagacttctgaatgtgaggcctgggccaaatggcactctcttctctcctttgcagtaacaggccctgccacacacacaagcatacccccacctctacatgtaaaccccacctgcgtacacaccatatatgacttacccatgtccccacatttatacatgcacattccatgcacatattcacataaccacacacgctcatctgtgcacatatacctaaacacccccccctccccaacacacacaaactgcccacatatacactcacagaagaccctggacatctgtaaggaaagcatctggagacctttgggaatcctcagacctgtgactgtcgtggagccggtgccaggtcctggctgtctcctccatacatttctggcaagtgccagaggctcccttgagctacctacctcagatgtcctaccttttccactcttacccatcttctctctcaacccctagtcacttcctacaaaggaaacggattccttccagagtgttactgttatgggaagcaaatcccacagaccatccactccatgcaggctgggactgtgtctgccctatccacactgcattcccagctcctggccccctgtggctaagtgttgattggaaaaaagtcaccagagcagcacagaggcacatacactgggcagccacaggggtacctccaccccacacagttacgtccatgcacacagaacaccctgtgtgtgtgtgcatgctcaagcttgcatcactgtgtgcctgcacacatatgaacacgcatcgtgtctgcctgtctccatactttccagatagagtcccttccaggacctgggtcctttcacaaaatcacctaataccactgtgggctcatctgctgacatgtgagatccagatgtggccccatgactgctcagggctcctggcttggccctgaacatctgggcgcaggggtttagagcaccagctttggaattgcattctcctgagaaaacctgggttccaccctggctctgcacatgatcactgtgcatgttccccgtatgatttatgtacaagttacctaacttcttggagcatcaatttccttatttgctaaatgggggcaatagttcctaccttaaattcatcttaaaggagataatctcagcagagtgcctggcatgttgtaagctcttaaaaatgcttgctatgaatatgattattgttactttagcctttgctctgaaatcccatgcacgctttgtgaggaaggacagccttggttggggggtgtttatggggagagcagagtggatggtgcgtatgtgaatacctctccccagatgctcccccaatcccaagctctcattatcttatatgcatattcataagggatggccctgctctgtaaatgggtcagaagcaggaaatagaggccagtacagacagcgaagcccaagggataggagggctcaaagccggcacacatctgagtcctcatggacgggaggatggtaagaggggatggggagagaatggattgggggcactgaggcgggggcaggagttcgttcctatgttgcagatttgaaaactcaggcccagtgagatcagattagagaaccttggggtgggtggtccaagaagtcagagtctgcttcctttgggaactggagttgagcatctgtctgggctgggtgatgggcacagggcaatggaccaaatgacccctacatgtttatttcaagggacatggtttacatagcattgggtggagaagctgaatcctgaattccaaccctccagtgaggctcagagtggttgggtgacttgccagtatcacatagctgctgactgtgactgtgcttttgggggtgcaagagacagagctactctggccccatgcaggaggttcaaatctgggagtaaaggctgatgggctggccaggacaccaagaaatgaagctctttatccatgtcctcacttcatctcctcagtagtcccctcagatagctggggtaaaaaaacttatctttattttacagatgagaagcatgaggctgagagaggaggagtcacccggacccagccacacagtgagttatgccttccatgctgggcgtgtgagagcccagccggccttggtcttgggcaggcaggaggccaggacagtggcagcatattaccttgctctggaaaattttagcctgaagtcagagtggcta

SEQ ID NO: 4512 - DNA, 6000 bp, Homo sapiens
caatccacccgtctcggcctcccaaagtgctaggattacaggcgtgagccaatgtacagtgtttttaatgcctcctatgtttatagtagtggaattacagtggcaagacatggtccttgccttagggtggctagttgcctgttgactgttagaggagatcagatgcattcaggggattatggccataaactcttagactctgaaggctattaaataaattattttatttttttattactaatgtcttgagacagaatcttgctctgtcacccaggctggagtgcagtggtactatctcggctcactgcaacctccacttcccaggttcaagccattcttgtgcttcagccactgtagtagctgagatcatagcatgcgccaccatgcccaggtaatttttgtatgtttagtagagatgggatttagtagagacggggttttgccatgttggccaggctgatctcaaactcctggcctcaagtgattgcctgtgttgccctcccaaagtgctgggattacaggcgtgagccaccatgcccggccaaataaatgattttaaaccagtgtgtgcagtgttgtgacacagataagtgcacagtgttgtggtagcacatactagaaatacttccccaggaggtgataacttagctgagacttaaatgacaataggagttctagaggggcagatgggaaagggaaaacatctaagcagagtggatagcattataaaggctcagaagtgagagaaagcatggctttttctggaaaacgcaagtagtcccgggttgctgtagtgtgctaaggaaaggtgtagcaagagataaaacaggagtggtagaagattaagcaggactagatgagagaaacccttgtttggactttaccctgaacgctctggggtatgtgtcaaatgcaactctaatatcatatcttaaatgcaaatataattataaatatttctttaataccattcagtactctgggaagtgttgagatagatcactctgactataatatggagaatggatgaacaaagtttattactgtaactaggggagactagccaagaagtcattgcagtaatcttggtgaagtcttgatatcctttttttttgagacaggatcttgctttgttgcccaggctggagtgcagtggtactcatggcttactgaagcctctaccttctgggcctaagccatcctcccacctcagtctcccaggtagctgggaccacagctgtacaccaccatgcttggaaaaattttaaattatttttgtagagacaaggtctccctatgttgccccggctagtcttgaactcctgacctcaagcaaccctcctgtcttggcctcccaaagtgctgggattagaggagtgagccactgtgcccagccagtatcctaactcttatcagtcaggatggaggcaagaggcatctattcatgagatacactaaatagagcctatggattttgatgactgataagatgttgtgggggagtttatggaatccttactattttccaggactgtgccaagcacttctacatggattccttcatttattctcactgaagccctttggatttttgtgctattattgtcttcattataaagataaggaaattgagtctcagaaagtttgataactgcttatagtcacaaagccactgcatattgttattcaaacctccaatctctctgatttctctaaagaacactcttatccactatataatactgcccaacagtttccagttactgacttgatcaatcaggtgattgatagcagtgctggagcaatgttagggaatatgatttctgcttttggacatttcaggttgcctttgggacatccaggtagcgatgtctaggtgaaagctggatttttttttttttggagacagggtctcactctgtcacccaggctggagtgcatggtacaatcactactcattgcatcctcgacctcctgggctcaggtaatcctcacacctcagcctcctgggtagctgggactacaggtgtgtaccatcatgcccggctaatttttttattttctgtagagatggaattttgccatgttgtccaggctggtcgtggactcctgagctcaaacacttcctcccatcttggcattccagagtgctgggattgtagttgtgagccacagtacttggcctgaatctaaaatttaatcccagatgaatggcctgagctagatggatatgctgctctggtagtctttagtctataggtggttatggtggtaccacctcgcaaataggctgggtgttactacaacaagggtagtcagaggctttaggagtgtacatgaccaccggaagaatgtacgtgtgtatagagaataagaaaaggtgtgtctttcacacaactgaatctcattctctacacacacatacaatgtcatacttaaattctggacattattttccataacatctcaaatctcatcttactcccaccaagagcaaaaaaaacagtttctgttcttttgtatttggttaatggtagaatgagattagctataaatggtagctgtattgtcctttttcattctgcttaagtcagacagcggaactttagcttgtttagcagtgaaagcctataaatacaaatgaaatatggaaaaagggagccaaagtcccatgaagctctattattaagcatttaagattggtaaatgttcacaaactctggcagcctctagcaatacatgtactgtgtctccatgttaacagtggtctcaacctgaaacatccatgtatgaaggaacatgttttaataacagaactgagtggtatctgttcatggaaggtagcttaggagtttattgcgttccttgccttttcccctggacttacagtgtggtggattgtatatatatgtgagtctgtctcttgatcagtatgcataatggaacagggcaggaattcagatatcagttgatagtgtcataacattagggaaagtatgttgactgcttatggtctgctctatttgagagtaggacatagacctggaggcttctgctgctgctgcaggccaaggaatggaaaggtttgtttggttctcattctcattttttttctttgcttctcttttaaacaacactctctgacaagtgattgggcccacagagaccagagcctgtacacagagaatggacagagactatattgtcttccttactttatcttgtgagctgcttatctcttccacagggaggacaatgtgttaaattgagataattctggcatgctgtcatctttgggggaatcataattgctgttgtcattttaggcagcttcaagggagttgagttcattcagcttcagttacctgaactgaattcagttgcctgaattgacgcttttgtgaaatggaatctttccaagtcaaagcttggattgaaatttcactgactggtttttatgagatcacttagggtctcaaatactttatgtagaggtgcattgatcatattttacacttatgtgtgacttatgggcaacttttagcacccttatccctctggagttttggaatgctatttgtgaggtttataacttcataaatatttattgaacatctactacctgccaggtagtagtctagatggtagagtatacagtaaggaacaagctatataaggtcctttctctgttggagcttactttctttgggatattagacattgaattaggctatttcagataagatagtacttgtgaaagatctataacaaattcttttggatgtgtctagtgtccttccctactgcatgtccagatctttctcatcttcatttgaaggctggctcaaatggcagcttctccatcatatccttatctgatccttccagctgatatattactcccctctttgaaatctcatgcctctctatcagcaactttcttatgtcaccttaacatttttttctatttgtttcatagttgttagtgcatatgttaagtctccccattagactataaattactgagggcaggccgggcacagtggctcacgcctgtaatcctagcactttgggaggccaaggcgggtggattacttgaggtcaagagttcaagaccatcctagccaacacagtgaaaccctgtcgctactaaaactacaaaaaattagctgggcatggtggcgcacacctataaccctagctacttgggaggcaggagaatcccttgaacccaacagggtggagcttgcagtgagctgagatcctgccactgcactccagcctgggtgacattgtaagactttgtctgaaaaaaaaaaaattattgagggaagagtaaacatcctattcatcttggtttgggatatttcacatgcaggcagcaggatgttgtaggaaaaaaacacactgaacttagaaccagaaggatcagataaggatatgatggagtactggcttctctattcactggccgtgtgactagacaagtcatttagcttcactgaaactaagttttctatctctaagcgtgtagtaatcatccttctattcctgaatagttgtcgggaggctcaaactgagataatgtatgtgactatcctttgcaaattctaactttctacacacagtatcatagtaaatattgagtatttgaatgagtaagcatttactttagtgaacaccttttcctgagcagttctcttgcttaatgaggtcttttgattttgtaaatatgctacttttttatctgatatttttgtattgttccattttgcagatgatatctaattttattaaattattctgttcctgagaattggcatcctcttcatccacctggggatgaccaggaattttctgtttttttctctgtaggtgctatttaatatttaaataacaaatgacatttgatctgtttcagcaggtggtccattatggctgacatgcaaaatctggtagaaagattggagagggcagtgggccgcctggaggcagtatctcatacctctgacatgcaccgtgggtatgcagacagtccttcaaaaggtaagcagtccacagcccagcagaatgctttctttgagcgtcttggcctgaaaattttctattattctctcctttggcgctaacttcccaaaacttaatctagaaagtttaccttttgtaatttgtattgctgtgaacagataagagaggaaatgacttgtacagggaggcctgtggttaagttattttaacacaagaacttcctgcttgtgcaatatttcctgctctttctttagcagaatgactccaatgtaagtcaaatgacaagtgataataaaattcctctctccaaacaattggcaaattggacattttgcacatgcaccagttggaacatagaatgttagcactaaaaaaaaccttggaggatcattttgtttattttcattttatagataaagaaaattaagctcagagaggaaaaggaatttagtcagggtcacacaaccagttagtggtgatactggacctggaacccaggtttccttactcctgttctgtatcctgttgactgtattaccttgcctccccactttcatgtagaagcacgttttaaagaagcctccttctgatgcatggctgattctttgtggtgtgtttgtctttagcaggagcagctccatatgtgcaggcatttgactcgctgcttgctggtcctgtggcagagtacttgaagatcagtaaagagattgggggagacgtgcagaaacatgtaaggatgttttgcctttttccccttcttttaaggactaacagctttcttcagtcagccaaggtcctcatccttggtttaagagctccttgagaagttcctcttggtttggggcattacacatgttctttctcttttgcctgtactgaggagttcagtctagccacagaaacgattcctcatttttttctaggccccttgcttttatcacgtatttatacagaaagcttgcttggtacata

SEQ ID NO: 4513 - DNA, 6000 bp, Homo sapiens
gtccttggggtgggggtctgggtctggtctaatgtgatctgctgactcctctgtgggtgctgggccatgggagggcccggcagtgactggagagcgtgtactgggtggtgggggcttgtctctgtgctctgggccctagatctctgtaagcctgtgctgggccccttggtcatcaccatgtgtccacctgtctttctgatatccatctcccttccaccctgtccctgagctggggacaacagaccacactcagcttggcaccctctttccaatggccctgccaacactccgctgcctctgggctggcccaggttgctggtccatctctcctgacccttcacgtcctactgcctgtggccctgcgtggtggggagggctggcgacaggtgagggccccagggccctggaagaccgaggcagggaaggggccgcatcctgttcccaagggacatgatgatggtgctgccaacatgcagccttagacctttggctctggtagtgccggggggagctctgtgcgtcaccgtgcactgcttaatgatggacagccctgcctggctgtcactgggctgacacatgggctgtgtctgctctggagcctctgaccctgcatccctccttgtccatcccagagcccaaggtggtgtttgccaaggagcagccggcatgcagggaggtgcaggcggaggcgggggccagtgccacgctgagctgtgaggtggcccagggccagatggaggtgacatggtacaaggacgggaagaagctgagctccagctcaaaagtgcacatggaggccagcggctacacacggaggctggtagtgcagcaggcgggccaggcggatgctggggagtacagctgtgaggcggggggccaacggctgtccttccgcctgcacgtggcaggtcagtgctttgggtgaatccacctcgcctgaagctgatggccacactgtatggtccctgggattctggatggtagttgatggtgctcaggactgcactgggccatccttgaagagcaatgggtatcaggggtgccaggtagcattagggtggccctgaagggagcggggccggtccagggatgacagggtccccctctcatgccaactcacctctacccagagctggagccccaaatttcagagagaccctgccgcagggagcctctggtggtcaaggagcatgaagacatcatcctgaccgccacactggccacaccctctgcggccacggtgacctggctcaaggatggtgtggagattcgccgcagcaagcggcatgagacagccagccagggggacacccacaccctgaccgtgcatggcgcccaggttctggacagcgccatctacagctgccgtgtgggcgcagaggggcaggacttcccagtgcaggtggaaggtgagccgggcatggggcgtggggcggggactcctccagacacctctgtcccagagctggacaggggcgaagctggggctcaagtctggtctgttaagagcccggctgatgtcccctttgtgcccacagaggtggccgccaagttctgccggctgctggagcctgtgtgcggcgagctgggtggcacggtgacactggcctgcgagctaagcccagcgtgtgcagaggtggtgtggcgctgcggcaacacgcagcttcgggtgggcaagcgcttccagatggtggccgaggggcccgtgcgctcactcactgtgttggggctgcgcgcagaggacgcaggggagtacgtgtgtgagagccgtgatgaccacaccagtgcgcagctcaccgtcagtggtatgtaaggggtcgagtgtccctatccagggcagcctcctggaggaggcggcctttggtactcctgcagcgtaagggctctgccagtcctgtgcgcccgcctcttaagcagtgctcctgtctgcagtgccccgagtggtgaagtttatgtctgggctgagcaccgtggtcgcagaggagggcggcgaggccaccttccagtgcgtggtgtcccccagtgatgtggcagtcgtgtggttccgggacggtgccctgcttcagcccagcgagaagtttgccatatcacagagtggcgccagccacagcctgaccatctcagacctggtgctggaggacgcgggccagatcaccgtggaggctgagggcgcctcatcctctgctgccctgagggtccgaggtgagtgtggggggcagcaggatttgcctggctggccagggctccttgcacaggcacctcccctgtgggctggttctgagtgggcacctggaactgctgtcctgttacggctggtccggctgacctcaggagacacggggtgtgtgggctgcagagaggagactccggtaggctggatgggccaggtgccttctcttggtatagagaagatacaatcctgcagttgcacctggtggggaatggggggaggctgaggcaatccagggaggctttctggagtaggtgggtgcatacttagcctgatggatggcagggaagagagagtggggttagcaccagtgcaagcagtgacatgggcttcccatgctgctgaagccagaagccagaacttgccctgaagggaagtgggagtcatggcaggttctagagtaagggagtgatgcagcagattcaccttctgcggagttgacgggtggcctgaggcagagaggcccgccagcgcctcttccttaacctgcgcaggagtcctgggctttgctaaaccgccgttgcgcctggggaagctctgtcttcccccctctgcagttcctgccagtgctactagtggggatcacgtctaggatttcgaggcacaagggcctggcgtcttgttcagagcaggggagctggaggtgggagcggggcttaaggaagcttcctggtttcctcgcttaaagtcgcacccgggagggtgcgcagctgcggcccgcgtgtggccagggccgcgctgtttggattgggatcccggggcgcggtgccggcagctctgcctgggcccggctcagggcaggcgccggggctgtgcgggccctctgtaccttggcttgtccgtggaggagggcgagggccgccgtgacctcccctctcctgcgaccccagaggcgcctgtgctgttcaaaaagaagctggagccgcagacggtggaggagcggagctcggtgaccctggaggtggagctgacgcggccgtggccggagctgaggtggacacggaacgcgacggccctggcgccgggaaagaacgtggagatccacgccgagggcgcccgccaccgcctggttctgcacaacgtaggttttgccgaccgtggcttctttggctgcgagacgccggatgacaagacacaggccaaactcaccgtggagagtgagccgcgggcgggaagggcggggcatcgaggaggagtgaggagggaggcggggcattgaggattagtgaggacgtaggcggggtgctgaggggaggagggaggaggggcactgaggaagagggagcggaaaagagaggagggaggtggggcgctgaggggaagagagaggagggaggtggggcactgaggggaggagggaggagcgaggtgggacactgaggggagtggcgggccctctggaagggccgtagggttgggagaggggcaggtctcccgcccgaggggcgagcggtgggggtaggcgtggggcggcttcccggccctccccgagctcctggggaagccggctgtgccccagggttctaaaggcggtggtctcagagcagcggctgacccgtgacaccgcgtgtgcaccgcagtgcgccaggtacggctcgtacggggcctgcaggcagtggaggcacgggagcagggcacggctaccatggaggtgcagctgtcgcatgcggacgtggatggcagctggactcgtgacggtctgcggttccagcaggggcccacgtgccacctggctgtgcggggccccatgcacaccctcacactctcggggctgcggccagaggatagtggccttatggtcttcaaggccgaaggagtgcacacgtcggcgcggctcgtggtcaccggtgcgttggggggccggcagggcacagcacagagcacgcctgcctgtcccgagggggccccgggaaggtcggtgggttctctggggacctagatgagccagctccgtataactccgtccagctggggcactgccccacccctgtccctgtccccatcctgaaggcttctccaagccctttttctcttcccacctcctccttcctcctccccagagcttcccgtgagcttcagccgcccgctgcaggacgtggtgaccactgagaaggagaaggttaccctggagtgcgagctgtcgcgtcctaatgtggatgtgcgctggctgaaggtgcctccctgccgaccccactcggttgcctcctcccctcctctcatgtgggcgggcccaagcagaaccccagggctggaccacctgagtgcctgactcggcctctgccctgcacaggacggtgtggagctgcgggcaggcaagacgatggccatcgcagcccagggcgcctgcaggagcctcaccatttaccggtgcgagttcgcggatcagggagtgtatgtgtgtgatgcccatgatgcccagagctctgcctccgtgaaggtacaaggtgagggctgcgtggggcatgtggggcatggcaggtatgggcacctcctcctgtcctccgtgtcccccagccaggggcttggcagctctactttcacctgcacaacccttggcatgctggggcactgggtggggggtgctgggagcagctctgtgtgtccgggtgtggcagggcctcccttgccaccctaggccgcaacatccagatcgtgaggcccctggaggatgtggaagtgatggagaaggacggtgccaccttctcctgtgaggtctcccacgacgaagtgcctggccagtggttctgggagggcagtaaactgcggcccactgacaacgtgcgcatccgccaggaaggttcgaggacaggcggctgtagcaggcacggcccggcccccaggtcttcctctgcccccgcccatactgagccgcctttgtccccaggaaggacatacactctcatctaccggagagtcctggcggaagatgcaggagagatccaatttgtagccgaaaatgcagaatcgcgagcccagctccgagtgaagggtgaggtgggggctgaggggagggcggggctggacggtgtgcatgtgtggccagctggctcagcacaggcccggacgccccaggcctgctctcaggacgaggacagcagggactcaggagggaagggggcgtcacctccttggcaggaagataggggccagagaagcggccatgaggggcttctcccttccttaaaacagatcctgaagaattctccctcgggctgcagcgagtgctggagaggccaggcatgaggtcctgtgggggaggcatggcaggggcggggggttctacctggtggcagcgaggaggaggatcagggaaagtggtgctggggtggcagggagggaggctctgcagacaggtggggtggggatgggccagtagggctaatcagaggtatgcggggagggacatgagttcctgggactgagctagggtatgtggttatggttcggaagtgggggtttggggagaggactgcagggggtggggctacatggggcaggacctaccctgctcttggtgggccgggacagcgggtaggacctgggcagtggaagtgggagtgtgggatatgggagggcagggcgggcagaggtgggcgcactccccttgcttgtggtctgctctgtggagcaggtcctagcacagctccaagggggacacttggcctgaccacctgctggcccctggcgggcagacatgggctgttggggcctagtggggtccaactgagggcccaagaccctcagtgccttgtcggagcctgggcctggga

SEQ ID NO: 4514 - DNA, 6000 bp, Homo sapiens
agtggcggccgactgggcaggaaaacctcagccccttgcaaacagcatgcagtttatagagcattttcactttacaccatcccctaatgacctccacctggcaatcttcatttaacccaaaactcagggcctcaatcccctgtatggccagcgttccaccagaagggacgggacgggggctcagatattcatcgtaggtaagaaacgggttggctactccccagattccttagctcggaacacatattcaggtcttccacacagggtcattcttggagcgtgcttcagttatccctgtcaggtgcgtttaccctataagaaggcccttcaggggacactctggcagcctgagcagtttgcacagtgaagcagtaggtggctccccagctcctcctgcctgcaccacaccacacacacatgactgtggtcagggcgggggccgtgtagtaactaccggagtggtggagggaccaggagccacacattgctgttttagccagtgacaacttctgagcacgaaacactcacttttaggtcatattccttccaccgtcttcatgaagtccaggtgcccagtctcactgtctccgtttttcagaaggcagtcagttcagggaagctgagcgccttccccagggcacccagtcagccggggcagaattcagatcagaactcccgacagctgagaacgccgcacgggatctgccctccatacgaccatgcctgagccgttccctcctttccattttaacaggggcttgggttgggcagaaaggacccagctgagaggaggagcagtgtggggggacgcggcggacagctccacctgtcgctgctgcccagcaggctggagacacggaatggcccctccccttggccccctgtccccgatgccatagttctcatccattgtcattgtactgtctcagtgctgctatatttaagacggtgcagtctccgggatcgcattcttctcccggtgcccgctgagccgagggcaagaagagaacaaggaccctctcggcctcaggaatcttctccccagagactcctaagtgggcacactgcttctgtgagtcacccccagaaatcagggtgggggagggatgcctcctaagagtcagccactggggagtgatatctgtgggtgcatgtgtgtgtgtgtgtgcacgtgtgtgtgtttgtgtgtatgtgtgttgtgtgttgtgaaaggagcctgggaaatttgtgctgaggcagcacccaagtgaaaatgggaggggattccagaaacccctgccccatcccactgttctgtgtggccctgggtcttctgagagctgagctgtctgtgatgtgaaagttgcaaaaaaaaaaaaaagagtgggggctgccctgggaactggagtctttcctgtgatggagcagcgataagcgggagccaggctaagctggcaagttccacgaacttagagcggagctggctgagcccggcttggccaaccccacaggcagggaaagagagcgagccctcggatcccaaatcttagagctggaagggatttcatccagtgcctgacaggaaaccgaggcccagacgggaaaggagttgcctcagctcatgactggcaagggcaggattcggcctcgcggaagctggtggagccactggctaagaacacgtcccagcctgtgccacccgccgcccgcaggatgtgtctctgctcccagccaccatccgcccccatcgcagctcctggaggggtcttggctcaactgctgtgcattcctctttccctcctgaagaaggggagaggcctcctcggcagatggaggcttgggaggaaagcagaggggaatagggaaggccacgcagtgggacctctggcccagatttttgcaccccaagagagggaagcgggggcagtttcccctccacgcaggcacacacagtgttccgggaagaggcaccctggtcctttgggaaagggcagtgaggccgcaaacttgtccctgcttaataccacgcatcagtcagtgctttaaaaagaattggtagctcatccgctaaagccaggggtctggttgctggaggccccgaggtcagggacgagcgccaggcccctgcctgctgtgctaatcgggaacagagcatccaggggaagggagccagtggctggtgccagggaatgttaactctcagccactggagccagggccatcgtgtcccaggaaagctggggcagagtggggggtccttgctccacctagggtggtacccagcagctctcctcctgggccatgaggaagaaagagcagaatgagcagggctagccacttctttgggtgcaaagagaacttcttccatcgggagggagtgatacgaagccaaagagggtgactgtcccattatgtcatttgagatgattagcaggagcccagggagctttagggggcagcccttggtcccagctaaccctgcagccatccattctctttttcctgatgcccacaactgcagacacccaaaaggagcaaacttctaggaagtagaaggggtaaaagcccactaagactgaccctccacagcccgagccccagacacctccaccacatgccccttccaggccaacggctctccaataaagccagtgggctcaccttccatgccatggacttagagaaatggtcacctaggtgctgtgttcacatccaggcagaagacagcctacacatgcacgcacacacacacatacacacacatgcacgcccacacacacacacgctgccacctccagcaggaccctctagagaggcaggggccagacagagctgaccccacagaagctgacaggagcaggccaaggcaggcggtcatccctcttctgtttccatccccacgcctgggcaggaaccctcccatgccagaagcctgcagaccaggattcccacctggaggaggtgtgaaagccattccagggattttagctttagcatcaggggggccctcagagacccagcagtgactgaagcccggatatgagaaaactcagtgcaaaaacccacagccagcgggcacacgggcctcccacacccctcgtttgcctctccatatccatggatccgcttcctgagcctcccctgggtcaatctgatccggccccactgggcgccatcacgggcctagacttgagccttgggaatgcaaaggagatgtgtacattgcaatccccttataaggagaaaggccctgtggcccaccgtgtccccagcctctgccacggcctggccttgaatggacatatgacatagagatcagaagggctaggggttgggctagggattggctgccagtcatggccccaccatcatgctgggtgaccttgagcaagtactgcccctgttcatcagtaaaatgggataataatggtgctgtcctcatttgggttattgcagggactggggataatgcatttgaaaactaacatgggcatggaacatagtaagttctcactattgttacttttaattcacttacagtcttgttgaacagtcaagatgcacagatacaaaataattacatagagaaagcattgtctgaatcaatgctaaattgtggagtgctagaaaataagtacaaaagaaatgagaagagggaaaattctaggtggcctgtagtctttctgcaaggcttcttagaaaaataatgctaatgcctaatacttatgttgtacttactaagccccaagcactcatctaaccttcacaactaccctgggaggttagtagacccattttacagatgaggaaacaaagtcatgagtctttcccaaggttacacacttgaaagctgggataaggagctgggatcacaccctgtgggctggactcagagtctctctgctaattagcatgccctcagttggggtttgaagcatgactagagccaagcgggccaggaggaggggaagggtgtgccgggagaggaaaccagcgtgggcaaaggcccagaggtaggactgaacatggccggtgcaggaagaatggggacgcctgcccgtcctgagtcatagacacagccgtggacatcacagtttcaattactcattgtctggggagctgaggcccatagaagcgaaaaccttgccacagatcatacagtgagacaagggctgggctgcagctggaagcagctagaagccagggccctgctccctaacgtgggggctctgctcactcagctggggagcacatggggtggaggagaagcctggctcagagcccaaggcctgcctctgtcaccttgggcaggtccctctccctctcagacctcagtttccctgtctgccgactgcagagaggacacccccaccccccatcctgccagcctcctagagatgttgggaagactgcatgggaggggataggcgggcacctggtggaatgaccgtggaccttggccttcacaggttgttgctctcgtaaccatgactctgccgcacagcttgggaggtgcgggggacccccggcccccccaggccatggaggttcacaggctggagcaccggcaggaggaggagcagaaggaggagcggcagcacagcctgcgcatgggctcctctgtgcggaggcggaccttccgcagcaggtgggagccacagggtccccgcccagccactgccctgttcccagggcccccagtctgaggagggaggcccagcctagccctctggaggctccaacctgatggggggagggacatccctgctttctgaaccccctgtctgaggggggagacacaattggctctctggagacccccatgtgatggaagaggcacagccctgtcctctggaaaccctgtttgaggagggaagcacattcagggtcggggggatgcagccttgctttctgagaccccagtatgaggagggaggcacagccctgcctgctggtgccctgaggctgaggtgggcagatgcagccctaatctcagggagcccccagccaatcctgcaagagccatttactcccctccttctgggagcagcgaagaagagcatgagttcagcgccgcggactacgccctggcagcagccctggctctgacggcctcctccgagctgtcttggtgagtcagagaagcttcccagggagccgtggctgaggaggggccatcctgtccagtccccggcctccctgctggcctttcaccccgagtgtaaagaacctgcccaaaatcccacatctagaataagggtctagacaggagtttaagcccagggctacctgccctcaaagcccacatgccaccctctggaagggtgcacgtgtcatagcgggggactgttcccaaggaagagggtaggggcctacttcaccaacagacttctgggcttcacgtggtgggggagggggctaagaatgggacagaaggagcaagtaaaccaggccccagtttcccacaaggccagagactgaggaggcctctgagtgtgccggcgtggagaggcagcgttcggcttggggcagggccctgggctaggaggcttgggtggtggtcctggctgacctgaagcaagttgctaagcctcagtccctgccctataaaatagggacactaaggcctggccacttggctgtcgtgaaaacaagatgaacaaaggtttgtgaaagagccttgaaaacaatgaaaacagtcaactattaaggactgactgcaagcagggcccttccaggctgttttggaggcaagggaagatgcaaaatcatgcatgtcctccaaaagtttaaagcatcctggcactgctgggcacagggaatggaactggccaggatgccccaggcatcccccatccctgcctgagccccgatggcctctgtcacggcagggaagcccagctgagacgccagacctctgccgtggagctggaggagcgagggcagaagcgggtgggcttcggcaatgactgggagaggactgagatcgccttcctgcagacccaccggctgctgcgccag

SEQ ID NO: 4515 - DNA, 6000 bp, Homo sapiens
taatgccaaacgactcatggctccagagctgtctgccttgccttgggaggtagtgagctccttgtcattggcagtgtgcaagcagcagaggatggccagatgctttctgggtggttcttcattggaaagagaatggattggttgaatgccaaggaaccttgcagctgtaaggctctgaggcctggggcttcttaaattctgagttctccattctgagaacctgggctggtactaagattcagccactgtaagtgttctggggcttttctgttgctgcccttgagtgcatctgcaggaagaggggagtggttgtaatcgtagtgtgggaacagctttccagtctgccttcctttcacactgcatcatgagcattattccatgtggctctgtagccagggaattcatctttctggctctgtagcattccatggagtgaaagggccacggctgtccccaggtgttagacatttaggttttttgtagtttcttgagactccaataggctcacaaaacctaaagcttatttaagttttttctttatataaaaatctttatttttatatttgtaaatttaacttaattgaagtattatttgtatacaatgaaatgtacccaagttaagtgttacctacatatttgccccattcagcagagaaatccgttttatggaataccatgatgtattgatgggcgttttgttattttcaattttcccctaatggccaggcatggtggctcatgcctataatcccagcactttgggaggccaaggtgggaggatcccttgagcccaggagttcaagaccagcctggccaacatgagaaaaccctgtatctaccaaaaaatacaaaaattagctgggtgtggtggtgcatgcctgtggtcccagctacttgggaggctgaggtaggaggatcgcttgagcccaggaggttgaggcttcagtgagctgagatcacaccactgcactccagcctgggtgacagagccaaatcctttcttgaaacaaaaaccaagaaaccaaaaagaaaaattagctgggcattgtggctggtgcctgtggtcccagctactccggaggctgaggtaggaggattgcttgagccccggaggtggaggttgcagtgagccgagatggtaccactgcactctagcttgggtgacagaacgagatcctgtctcaaaaatttttccccctattattttcctattatgatcagtgccacaatgaatttccatgtgtttgtatatatgtgcacacatctgcccttactccaatggtctggcatttctgtaggaagagatttaaatatatataaaatgacattttggtcaaatggaagaggttcttgtaggagccattctggggtggggtgaatggagcaaggtggacaaacatttccaaggatgctctggaagcagtgtgtgtttttctctttgacctggtctctctggctgctgatcaggcccttggaaatcctgagatttcaggcattaggaacacctggattttgatgtttaagaaccagagcgaactgaaaggccaagctctctgaaagcggaacagctttcttgtgtctcagatgtctcaaattgaaattaaatggtaacaagccagcatcaggacctgacagggcacctgggcacctggctcctgagatcagtacccactggcctcccttggttttctggtattgggttttttgttgtttgtttgtttgttttttcatcactgggatgtatttaaattaaataagatgaccatcagtgaattagcgagctggaactagtgtagtcctgtaggcagagcctggcccttggtgcacacagatctgaatttgcatcccagctcctcagcttacttgctgtgtgaccttggtcatgccacttctctgtctcagttttcccatttgaaaatggaaagttaccacacaattcatagcatcagtgaagcttaatgtagataaagtgcttatcacagtgcctgggactgagtaacccttcgtaaatggtagctgccactaatactacttgaatctcagtgctgttatcaacttgctgtgtgacctctggtaagtctcttagtccctctggtctcaatttccacgtctgtaaaatgggactaataagctgctctaactgatacccagaatgttctttatagcaggggtccccaacccctgggccatggactagtatctatccatggcctgttaagaactgggccacacagcaggacgtgaacagcaggtgaacaagcattaccgcctgagctccgcctcctgtcagatcagtggcagcattagattctcataggagtgcgaaccctattgtgaactgtgcatgcgagggatccaagttgcgtgcttcttatgagaatctaattcctgatgatcagaggtggaacagtttcatcccaaaaccatatctgccccctgccagcacccctgctgccatctgtggaaaaagtgtcttccctgaaattggctcctggtaccagaaaggtttgggaccactgctttatggcctctaaaacatttttcaggcttttcttatcctctcacccaccaaggacagccatggataggaggcaggtcttggggtggcagctgcaagatgtaaccagaagttgctggacaggtggactgtttcaatttagaccatgaggaatagtttcgtttccaaagcattttgtttagcatctgtgtgaacgagagataggcgaggagcatttctagtttgggggagagtaagaggggaggcagatgcccgccagcagggtgtgctgtgtgccttgtgaccagtccagaaagaaaagcagaggtctctgaggagcaaggggcccctgccagcctgctcttttcaaagctcatctttcaattcctgacccttggctccagcccctcgagtgggtgcccaccgctcttaggatgaaaaccagtgtcctgttcctgactgctggtgcctatgtggtctggccttgccagcctgtctgacctcatactcaccgctgactgtctgctcaccaagctttggccacgagggccttcttaaattcctcaaatgcccagcccctacccaccccagagccacctgtctagaactttctttcctccctttggtctggcagtgtctcctcatccctctgctctcagcttattattttattttaaaatatttctttttaaaaggccaggtgcagtggctcacgcctgtaatcccagcactttgggaggctgaggtgggcagattgcttgagcccaggagtttgagaccagtctgggcaacgtggtgaaactccgtctctacaaaaaatacaaaaattaaccaggcatggtggcgtgtgcttgtagtcccagctactcaggaggctgaggtgggaggatggcttgagcccaggaggcagaggttgtagtgagctgagattgcgccactgcactccagcctgggtgacagggcaagaccctgtctcaaaaaaaaaaaaacaaaaaaagaagaaaagaagaaaacccttctttttaaaagatacggtctcgctatgctgcccaggctattctctaactcctgtgctcaagcgatcctcctgccttggcctcccaaaatgctggtattacaggtgtgagccactgcacctggcctgctctcagcttaaaagtcacttcttcaaggagggcttccctgacatgccaccctcaatcaaacctaggctgcattagcacttttctggcagtgggtacgtgtccttcttagcgcttgtcacgatgtgagtcatgatttgtttagtgtttttcctgcttgtgtaagctccaggaaggcaaggcctatgtctgttgctctccaggctcttaaatccctgggtgaggagtaggggctgtttgggggaagataaagtttaccagaggtatctggatgtggggcctgtttctttaaaggctgggctgtggactgggctcccaggagggtgagtctccttttcaggtgtggcatagtgtgtcatcaccagcccctgaatgatttcagccaggccaggggaagggctgaccgcaactggggcagaggaccctggagagggaaagggttagaccgccacctgctgtctagtgctggtatagcctcagagccgaaaatcattccgtttatccaactggtgtttattctgcacttgctgttttctgaggtcttaacatgtgactggtactatgccaaacacttcatattccttcaacagatagcctgtaagctcctgctgtgtgacagacactgttcgaatttctaggaataccacaatgaacaaaacgcaaaaattcctgccccgctggaaagcggaggccgacaaaacataaagcctcgctgatggcagaagtcccgcggggaaaaattaagtggggaaggggaaagggagcccaagggggctacaatgtggaatttctgtttcactctcacaactgctttgtgaggagtacataccactatgttacagaagaggacactgaggcacagagaggttgagtgagttgtataaggtcacgaaggtaatcggtgacagctggccttgtgatttttttttttaaactactctccctccctgtaagaaagaaacagcgtgacctcggctagctctcgctttcaagccacagtatcactggagatagacccaggtttgaatctgggttctgtggttactggctgtgtagccctatatgacccagcctccctctcggacctgaaagttcaatgggctggtgtctggggaacagtgtgctcctgcctagcgcagcacagatgcgccgacctctgggcaggtggtgagaggtgcgcgcttgggcggtgaaggggagagggaagagtgacagtgccctcccgcaggcgtcctgcctctgcggctctgccccctgcatcctgtgcagctgctgccccgccagccgcaactccaccgtgagccgcctcatcttcacgttcttcctcttcctgggggtgctggtgtccatcattatgctgagcccgggcgtggagagtcagctctacaaggtgagtgccccaggggaggcagggcggcctccagcgaggggcgtcagtggctccaggatagagggcccaggcttggggtcacagcttatccagaagaggaggcagggtgtttgggtgcactgatgatctgaggttggaaatgaggggaggagggcttgagcctcttggggggattcttctttctcttaggccacagtctccttggaaaatcttattaatcattatcgccccctggacactggcctaggggatgctcttctccctcttagtgcttaagcccaggttggggctcctaactcttcccttcatctcagtgttttacagcctagcacagacccagggggacgtgggcatcaccgtaggtgccttatacacattttagtgtgtataaagatgagattccctggggagtttgtagaaatgcagattctcagactccaccttgaggctctattccatgggagaggggccacagaatctctgttttcccaagcatctcagatggttctgatgtaggtggtgggtggagaacactttgggaaccactgctttagacagcgcaatagtttctgaggctgtgggaaataaacaataacaagatgtaactggggagctccctcccagggcttcaggcccagagagggctaggaatggaggcggaggcagtggagatagaggtgaggggctcccctccctgtctggtccagcccctgctgggagagcctctttcctggccggccttgggagaccagggctctggtttataaagggagctgccagggttctgtgagaggtggggctttgacgctgctctgtctgtctccacagctgccctgggtgtgtgaggagggggccgggatccccaccgtcctgcagggccacatcgactgtggctccctgcttggctaccgcgctgtctaccgcatgtgcttcgccacggcggccttcttcttctttttcaccctgctcat

SEQ ID NO: 4516 - DNA, 6000 bp, Homo sapiens
aagagataaaacaggagtggtagaagattaagcaggactagatgagagaaacccttgtttggactttaccctgaacgctctggggtatgtgtcaaatgcaactctaatatcatatcttaaatgcaaatataattataaatatttctttaataccattcagtactctgggaagtgttgagatagatcactctgactataatatggagaatggatgaacaaagtttattactgtaactaggggagactagccaagaagtcattgcagtaatcttggtgaagtcttgatatcctttttttttgagacaggatcttgctttgttgcccaggctggagtgcagtggtactcatggcttactgaagcctctaccttctgggcctaagccatcctcccacctcagtctcccaggtagctgggaccacagctgtacaccaccatgcttggaaaaattttaaattatttttgtagagacaaggtctccctatgttgccccggctagtcttgaactcctgacctcaagcaaccctcctgtcttggcctcccaaagtgctgggattagaggagtgagccactgtgcccagccagtatcctaactcttatcagtcaggatggaggcaagaggcatctattcatgagatacactaaatagagcctatggattttgatgactgataagatgttgtgggggagtttatggaatccttactattttccaggactgtgccaagcacttctacatggattccttcatttattctcactgaagccctttggatttttgtgctattattgtcttcattataaagataaggaaattgagtctcagaaagtttgataactgcttatagtcacaaagccactgcatattgttattcaaacctccaatctctctgatttctctaaagaacactcttatccactatataatactgcccaacagtttccagttactgacttgatcaatcaggtgattgatagcagtgctggagcaatgttagggaatatgatttctgcttttggacatttcaggttgcctttgggacatccaggtagcgatgtctaggtgaaagctggatttttttttttttggagacagggtctcactctgtcacccaggctggagtgcatggtacaatcactactcattgcatcctcgacctcctgggctcaggtaatcctcacacctcagcctcctgggtagctgggactacaggtgtgtaccatcatgcccggctaatttttttattttctgtagagatggaattttgccatgttgtccaggctggtcgtggactcctgagctcaaacacttcctcccatcttggcattccagagtgctgggattgtagttgtgagccacagtacttggcctgaatctaaaatttaatcccagatgaatggcctgagctagatggatatgctgctctggtagtctttagtctataggtggttatggtggtaccacctcgcaaataggctgggtgttactacaacaagggtagtcagaggctttaggagtgtacatgaccaccggaagaatgtacgtgtgtatagagaataagaaaaggtgtgtctttcacacaactgaatctcattctctacacacacatacaatgtcatacttaaattctggacattattttccataacatctcaaatctcatcttactcccaccaagagcaaaaaaaacagtttctgttcttttgtatttggttaatggtagaatgagattagctataaatggtagctgtattgtcctttttcattctgcttaagtcagacagcggaactttagcttgtttagcagtgaaagcctataaatacaaatgaaatatggaaaaagggagccaaagtcccatgaagctctattattaagcatttaagattggtaaatgttcacaaactctggcagcctctagcaatacatgtactgtgtctccatgttaacagtggtctcaacctgaaacatccatgtatgaaggaacatgttttaataacagaactgagtggtatctgttcatggaaggtagcttaggagtttattgcgttccttgccttttcccctggacttacagtgtggtggattgtatatatatgtgagtctgtctcttgatcagtatgcataatggaacagggcaggaattcagatatcagttgatagtgtcataacattagggaaagtatgttgactgcttatggtctgctctatttgagagtaggacatagacctggaggcttctgctgctgctgcaggccaaggaatggaaaggtttgtttggttctcattctcattttttttctttgcttctcttttaaacaacactctctgacaagtgattgggcccacagagaccagagcctgtacacagagaatggacagagactatattgtcttccttactttatcttgtgagctgcttatctcttccacagggaggacaatgtgttaaattgagataattctggcatgctgtcatctttgggggaatcataattgctgttgtcattttaggcagcttcaagggagttgagttcattcagcttcagttacctgaactgaattcagttgcctgaattgacgcttttgtgaaatggaatctttccaagtcaaagcttggattgaaatttcactgactggtttttatgagatcacttagggtctcaaatactttatgtagaggtgcattgatcatattttacacttatgtgtgacttatgggcaacttttagcacccttatccctctggagttttggaatgctatttgtgaggtttataacttcataaatatttattgaacatctactacctgccaggtagtagtctagatggtagagtatacagtaaggaacaagctatataaggtcctttctctgttggagcttactttctttgggatattagacattgaattaggctatttcagataagatagtacttgtgaaagatctataacaaattcttttggatgtgtctagtgtccttccctactgcatgtccagatctttctcatcttcatttgaaggctggctcaaatggcagcttctccatcatatccttatctgatccttccagctgatatattactcccctctttgaaatctcatgcctctctatcagcaactttcttatgtcaccttaacatttttttctatttgtttcatagttgttagtgcatatgttaagtctccccattagactataaattactgagggcaggccgggcacagtggctcacgcctgtaatcctagcactttgggaggccaaggcgggtggattacttgaggtcaagagttcaagaccatcctagccaacacagtgaaaccctgtcgctactaaaactacaaaaaattagctgggcatggtggcgcacacctataaccctagctacttgggaggcaggagaatcccttgaacccaacagggtggagcttgcagtgagctgagatcctgccactgcactccagcctgggtgacattgtaagactttgtctgaaaaaaaaaaaattattgagggaagagtaaacatcctattcatcttggtttgggatatttcacatgcaggcagcaggatgttgtaggaaaaaaacacactgaacttagaaccagaaggatcagataaggatatgatggagtactggcttctctattcactggccgtgtgactagacaagtcatttagcttcactgaaactaagttttctatctctaagcgtgtagtaatcatccttctattcctgaatagttgtcgggaggctcaaactgagataatgtatgtgactatcctttgcaaattctaactttctacacacagtatcatagtaaatattgagtatttgaatgagtaagcatttactttagtgaacaccttttcctgagcagttctcttgcttaatgaggtcttttgattttgtaaatatgctacttttttatctgatatttttgtattgttccattttgcagatgatatctaattttattaaattattctgttcctgagaattggcatcctcttcatccacctggggatgaccaggaattttctgtttttttctctgtaggtgctatttaatatttaaataacaaatgacatttgatctgtttcagcaggtggtccattatggctgacatgcaaaatctggtagaaagattggagagggcagtgggccgcctggaggcagtatctcatacctctgacatgcaccgtgggtatgcagacagtccttcaaaaggtaagcagtccacagcccagcagaatgctttctttgagcgtcttggcctgaaaattttctattattctctcctttggcgctaacttcccaaaacttaatctagaaagtttaccttttgtaatttgtattgctgtgaacagataagagaggaaatgacttgtacagggaggcctgtggttaagttattttaacacaagaacttcctgcttgtgcaatatttcctgctctttctttagcagaatgactccaatgtaagtcaaatgacaagtgataataaaattcctctctccaaacaattggcaaattggacattttgcacatgcaccagttggaacatagaatgttagcactaaaaaaaaccttggaggatcattttgtttattttcattttatagataaagaaaattaagctcagagaggaaaaggaatttagtcagggtcacacaaccagttagtggtgatactggacctggaacccaggtttccttactcctgttctgtatcctgttgactgtattaccttgcctccccactttcatgtagaagcacgttttaaagaagcctccttctgatgcatggctgattctttgtggtgtgtttgtctttagcaggagcagctccatatgtgcaggcatttgactcgctgcttgctggtcctgtggcagagtacttgaagatcagtaaagagattgggggagacgtgcagaaacatgtaaggatgttttgcctttttccccttcttttaaggactaacagctttcttcagtcagccaaggtcctcatccttggtttaagagctccttgagaagttcctcttggtttggggcattacacatgttctttctcttttgcctgtactgaggagttcagtctagccacagaaacgattcctcatttttttctaggccccttgcttttatcacgtatttatacagaaagcttgcttggtacataaaatatggttctgttcatctttgtagtgaagaatatgcaccagtttgatcccaacatattacataatcaaacctacagtggcttatttaaaggagtcattatcatgacttagcatttataaaactatgcttgatagttattagttatgctaatgtgggttattttcacacttaacccacagcaagaatatgaagtaggcaatgacaggtgcctttcctcccaccttcctttatgcctcctacgtcatcaccaccaccccccacccccaccccacactcacatatacattctacctctatttttgggacccaaaaaccttcctgctagctcaccgaattataaacagtaaccatgcttgggaacttcttcacctaaacctttctcgaagactggttgcttggcttttggaaaatctattttgagcctctcaaataccatctgttgccaatggttttagctctagagagtgggactgggactttaataagggtgtggaggcttgcatttttacttaatacagttctgtaacatttgaaaaaactttaaaacatttatcatttgtattttaaaaatgcaaatccagaaaaaatagattgctttctttgaatttttgtattttaatagtgcttacagtctcatgtttcttaaattcttttgactgcgaatgacccttagaaagaaagaacatattcgtaactgagataaaagtttcacaagatgatatttatactacttctgctgtactttttttttttttaactttttatttggaaataacttgaagttggtgcactgcactcatacttttgttccat

SEQ ID NO: 4517 - DNA, 6000 bp, Homo sapiens; identical to SEQ ID NO: 514

SEQ ID NO: 4518 - DNA, 6000 bp, Homo sapiens; identical to SEQ ID NO: 516

SEQ ID NO: 4519 - DNA, 6000 bp, Homo sapiens; identical to SEQ ID NO: 517

SEQ ID NO: 4520 - DNA, 6000 bp, Homo sapiens
tacacaattaaaaagtagaggttaaagaagactatctcttcattgcttttactccttgtccctccaattcatttcgcaaagcatcacattctggctcatgattcccactattttcctgaaactgttgcctctgggatcaccaataactttctaattagtagatgcaaatatatctcacttgaataagaaatcaccctttcttgcaacattctcttctattagtatctctggaaagccactctcccatttcttctctgcatttaaagaaaaaagaagtaaaaagtcacttctgaaggttaaattaactttaagccataaaaaaattatttgccatattttgcaaattgtatttgagtagcaaatatttattaagcacacactatatacagagcatggaaaattcagaaaacaatctccattctcaactctgttctttggcccatcatgtatggtattattatgttgttgcattgctatagagaaatacctgagactggataatttataaagaaaagaagtttaattggctcatggttctgcaggctttacaggaagcatggtgctggcatctgctgggcttttggtcaagcctgagggcattttcaatcatggtggaaggtgaagaggaaacaggtacatcgcatggtgtgagcaggagccagaaagagagcacacatgagagagagagagagagagagagagagagagagagacagacagacagtgggaaggtgccacacacttttcaatgaccacatctctcaagaactcacttgctatagtgaagaccgcaccaagacattaggtatatgctcccatgatccaaacacctcccaccaggccccacctccagcattgaggattacaattcaacatgatatttggccagagacaaatatccaaagtatatcaggtattatttagcaaaaattaatagttagtagtcatattataaaggcaattgaatgtgatataggagttaaagagaaactactagggcagataataagggtatgggagtcctcggtaaggttttcctttttaatgaaaagaagcccccaaatcattttctaacaaagaacagcctgtaaaattgagctgcagacatagacaaacaagttggaagcctgcacccatgaatgctggcagaaaaaagctacctggtactagacatgttcacaatggcttccttcccttggtcagctatgtgtaaggtaagagcagacaagatggtgaaaaggccacttgcataataagattagggcagggtgaccagcctttcccgaacgctatgtaaaacaccacatcacacctggttgaaccaatctgtgggctctacataaatcagaaaccgcctcctcaagcctgcctataaaatctgctgtggtccccccaggccaccttttcccttttggatgcctcgctctcacaagagagaaagtgctgctctcctctctcttttcttctacctatttaatttttgctccttaacccactccatgaatgtgtgtccatatccttaatctcagtgcgcgagacaatgaaccccaggtatttaccccagacaacaatgccacttcaaatgtatcagttttaatgtgaaaattactattgtgtttgcataatacagttttgagtttcaaattagcaaacattcaaaattagagttttccctaaatgggtaaacacctgatctcttttctgaggcctactagatttatattttggtttttataaatatgtatgggaagtttatattaaagattttgtaattgtcgatcctttcatttaattaaacatttgaaagggtgcattttttccacattcataagtgttcatacggatttcctcaaattttccagagaagaaaaaataactatatttgaatggagctagaacatggaatggaaagtttcagttcaaaaggcatttttttccatcaagttatgaacatttgaacatggaattataattgaaaccattttgtatacttcaccatcaaattcattctgaaaataatgttttactattttaagcaacagatatagaaaactcccactggtccacagaatttattaaatgtctgcaatggcaccactgcattaaccatgctggagtggtcaatgaagtcaatggcatgatattaaggatattagatatgtgtagaagaactaaataaaacctgtagataaatttatgttttataatgaaccaaaaatttttgagatggtttaatgcaacacaattaagtttagctagtgctagcttctagagctggtagattaaaacaaaacttgcatttagcttcctatgctttttcttttttattgttcactttccaatgatgatttaaatgagcactgagcagatcaaaaccaaatatctgaagagcatgtaagggagaagaacctacagataattcatttaacccaaatcagcccaatttacagtgaacataaactagaagagctttgagacactgattttgtgaagtccctgtgcccagtgctactctctctgtttcaagtttaggaaaaaagtggtttacatttgtcatgcctacatgctttcttcttactgacttctcaaactgctgcactaaaattgttcttgaaaagattactcctaaattcattttgagttttcagttaacttgagttacctgtagtatttgcattattgatcactctatgaaattctctctgcctctggcttcttctgatttcctttttaacttctaagacaaatccttctcagcttctttccctcatttcattttgcctttccctccattcccacaatttcccattttgttcttttcctacctgtcccacaaatgatggcatcccagggctccctccttagctcccttatagttccacgatttacattcttcatgataatcatctacttttttgttttaaatacgagcggtggttctctgctcctccttttttttttttttttttttttttttaaatttatttttttattgataatttttgggtgtttctcacagagggggatttggcagggtcatgggacaatagtggagggaaggtcagcagataaacaagtgaacaaaggtctctggttttcctaggcagaggaccctgcggccttccgcagtgtttgtgtccctgattacttgagattagggattggtgatgactcttaacgagcatgctgccttcaagcatctgtttaacaaagcacatcttgcaccgcccttaatccatttaaccctgagtggacacagcacatgtttcagagagcacagggttgggggtaaggtcacagatcaacaggatcccaaggcagaggaatttttcttagtgcagaacaaaatgaaaagtctcccatgtctacttctttctacacagacagggcaaccatccgatttctcaatcttttccccacctttcccgcctttctattccacaaagccgccattgtcatcatggcccgttctcaatgagctgttgggcacacctcccagacggggtggtggccgggcagaggggctcctcacttcccagtaggggcggccgggcagaggcgcccctcacctcccggacggggaggctggccgggcaggggggctgaccccccccacctccctcccggacggggcggctggccgggcggggggccgacacccccacctccctcccggacggggcggctggccgggcggggggccgacccccccacctccctcccggacggggcggctggccgggcagaggggctcctcacttcccagtaggggcggccgggcagaggcgcccctcacctcccggacggggcggctggccgggcagaggggctcctcacttcccagtaggggcggccgggcagaggcgcccctcacctcccagatggggcggctggccgggcggagggctgacccccccacctccctcccggacggggcggctggccgggtgggggggctgacccccccatctccctccaggacggggtggctggccgggctgaggggctcctcacttcccagtaggggcggccgggcagaggcgcccctcacctcccggacggggcggctggccgggcggggggctgacccccccacctccctcccggacggcacggctggccaggtggggggctgacccccccacctccctcccggacggcacggctggccaggcggggggctgacccccccacctccctcccagatggggcagctggccgggcggggggctgacccccccccacctccctcccggacggggtggctgccgggcggagacgctcctcacttcccagatggggtggctgccgggcggagaggctcctcacttctcagacggggcagctgccgggcggaggggctcctcacttctcagacggggtggttgccaggcagagggtctcctcacttctcagacggggcggccgggcagagacgctcctcacctcccagacggggtctcggcagggcagaggcgctcctcacatcccagatggggcggcggggcagaggcgctccccacatctcagacaatgggcgggcgggcagagacgctcctcacttcctagatgtgatggcggctgggaagaggcgctcctcacttcctagatgggatggcggccgggcggagacgctcctcactttccagactgggcagccaggcagaggggctcctcacatcccagacgatgggcggccaggcagagacactcctcacttcccagacggggtggcggccgggcagaggctgcaatctcggcactttgggaggccaaggcaggcggctgctccttgcccttgggccccgcggggcccgtccgctcctccagccgctgcctcccgggcggtgctcgccggcgcggcggcaaagactgagacagctccgctgcccgctgaactccatcctcccggtggtcgggcggcggcggctgcggtcgggcggcggcggctgcagtcggtcgcggcagcggctccgcttcatatctgcagctggggcccgcgggcgtcagcgccgcgactgtcccggctccgcacctctctgctcctcctattcgacagacagccacatcttcttgtgcagtgccagccgcatccctaagacaccatggttaaagtgaaggatggagtaaatggttttggccgtattgggcacctggtcaccagggctgcttttaattctgtcaaagtagatattgtcaccctcaatgattccttcattgacctcagctacatggtctacatgttccagtatgatttcatccatggcaagttccatggcactatcaaggctaagaacaggaagtttgtcatcaatggaaatcccatcattatcttccaggagtaagagcccatcacaatcaaatgggatgatactggtgctgattatgttgtggaatccaccagcattttcactactgtggagaaagatggggctcatggggtgggaagtcaaaagagtcatcatctctgctccctttgctgattccccctgttcatgatggtcataaagcatgagaattataaatcagcaatgccacctgtaccaccaactgagtagccccctagccaaggtcatccaagacaaccttggaaatcatggagggactcatgaccacactcatgatcactgtcacttcacccagaagaccatggatgccccctctgggaaactgcggtgtgatggccatggggctctccagaaatcatccctatatctacgggtgctgctaaggctgtgggcaaggtcatccctgagctgaacaagaagctcactggcatggccttccatgtccccactgccaacatgttggtacgagacctgacctggcatctggagaaacctgccaaatatgatgacaccaacaaggtggtgaagcaggcatcagagggcctcctcaaggacatcctgggctatactgagcaccacgttgtctcttactttaacagtgacacccattcttccaccttgatgctgaggctgccattgccctcaatgacta

SEQ ID NO: 4521 - DNA, 6000 bp, Homo sapiens
caacttccacatctgttaaatgagagactgtctgcctcagattgttgtgagaattcaagtgaattaagtacagtgcttagaagagtgcctgccatgtaggaagcacccaagaaatgttaacgatattatcacacacacaaatacacaaacacaacatctattcaccaggttacacacacatacacatacacatacagatacacagtaatggcttccattcacttagcttatttaatctttacaagaatcctgtgatgaagggattcccattcccattttatagctatggaaattgaggccacacagttagtacttgactattcaaacagaggcctttctaacctgaaaatgcagactcttaatctccatgctgtccatcccctctgcctctcccaccacaaacatcacacatgtcacacagtccattcggtgttttattgaacatcctatatgtagggtgaggcttggggctgtcaaaaaatatgtatctcatgcaaccatcacaactgtgaaaggtggctattatttgatccttatttgacaggcaaagaaactgcagtttggagagatgaagtggcttgttccaattttcccactcagtatgtggcagagctgtgactcaaatccatgggccctggagcccatggtcagcagacttggggagcaggtagccttatgccttaggtgaaggccaggtgagactcaatctatacagcaggtgcaggtatgtgcatccctccctgctgagccccatgctgaagatgcatggtaaggagatacccaggcactgtgtgacatctccaggggtggcctcatgggctttccctaattcattatgttggcccgtgtctgaggaatggctggggaggcagaaggggtggtctttaaggtgtaaagagaatgggtccagaagcccagcattgtctcgatgcttccagcatggtcttgggaagaaggtgccctatttggtctgcacaggacatcaccccagaatgaaatgtgcagtgatggttggtggagggaagagggtctcagaccaccatggctcatgctgacatcctttaagatctcctttatcaactctctggatctaattctagacccccaagttgccttcagatgggaattccatttctttccatttacatgtgtccgtgggaaaagatagcactggtcagctgaccccaggttctgctctgcttgacaattctatttctcattataaagtgataaattggcttctatgagggtggctgagcagcaagtggttttgaaacttcagggagaataagaatgactaggctacttgctaaaattgtaaattcctgggccctcccagcatctatgcttccaggtcctctgaagtggagccaagactatgcaggtctaacaggcttcttgggtgtttctaatgccggtgatcccagtccacattggagaaacacacacagagttgtgtcaatctgctgtagtcaggctaggctgggctctgccacattaataaatatactctgacatcttggtagcttaacacaacaaaggttacttttcgctcacgtcacagtctgatgtgggttgggtagtaacccttggagctttcctctttggtgactcagggattcaggctcctttcatcttgcccggtggatgtcttcagtacctgacctccaaggtcactgatgaaggagaagaaaaagcatggataatcactctcccaggtgggttttatgatctggcttagaagtgatatctaccgattctgctctcacccattgggcagaacccattcacatggccacaacttaattgtgagggaagctgggaaatgtagtcttcttgtgtgcccaggaagaagaaaataaaatgggacttggtgaacatacagtattgtctctgtcacacagttggatccattctgggtgcattaacaataccaagtttctgtacctgtgaggcaaagaataagcggctgggctgtgtctgcctccaggaggctctgccagccttctcttatgtttctcagctcactttagaagaagttccgtctcttcttggttggctacaattcacagcacagtcaccacttgcccatcctgtccatgtggtgattgacatacctataggatttatctttgattgagtgcaatattggttgaaggggatgttttagaaaccacatttgggatcagtgagatcaatttttgtaattgactagtgatgtctgccaagggatgggaggggctgataatggcatgagtgccccacatttgtcattcttgtcatgccattgttaaaaccaagtctgattctacatagcccatccccacttctgcaagtccaagtctatcctgctggggaaagagttaagaatgtgttttgaatgacttctggcacatgttaaaagaaccatagatattagttgttatcttagttctctcccaatattggttggtttttctgaactcaaggtagtatagctgtatcctctcatgataaggatttcacaagttaaatcttgtagatgtgggctgtcaacacagagtagaacagcactgttacctccctctttctatgtactctgactctattaatacagccaaagactgtgtttgtttctagtgacacatcaccctagtgatacatgttggtcagttgtctaaacactacaaatctgtctcatgtaattgcaaccaagctctgtgtctcagcctgtctgcctttgttcagattttctttacccgagattaggactttgcatttacccctgcaagttcctgcatgtgtttcatcttgttcaattcaccctctagattgtcaaggtcccctttttttgccatgaatattcttttgtctactcttaaattgacttttcatagccaatgtgaagcctgggttggctcacaaagaaacttaggctgtaagaataataatcttcatcctgtatccagcacttgctatatgtcagtagtatgttctttacatatatgatctcatttgaactttataataccatgaggtacatatcataatcaccatcttacaggaggagaagtcaacctcagtcccaaggtctcacagaaaatgatagggctgggatttgaaccaaggtctattggataccaagagttaatgctcctggccactgtatcacaatgccagaatggaatgaagaccacagcagaacctagtgcaatacttggagttgttcttgcagacagaaccttctccagctagtttgagtagaaaggggtttattacagggatcaggtagctcatagaattgctaggaggatcaggaaataatgacaggagaaatattctgcaaacagtagagcttttctagggaaaccccatggccaccacctcccactgctcagcacctaagacctgggaattgactgcagccctagtgggagcttctctaggagaccccactgctaccactgcctgtggctcacttctgccttctacgtctcatctggtctttctacttggagaaacctagatcacacacgcaaacctacttatcagaaggtgtcagagaaatgcagctctagctctctagtctctactgtataggaatatccgttggaaggatgagagcatagaacttaccatacttgggaagctctggaaatttcaggaaaatcctggcatcctgtcttctaaatgagcccttattcagttcacatgtcacttctctctttttttttttttttttgtttgtttgtttgagacagggtctcactctatcgcccaggctggagtacagtggcacaatctcggctcactgcaacctctgccttccaggttcaagtgattctcctgcttcagcctcctgagtagctgggactacaggcacacaccaccatgcccggctaatttgtatttgtagtagagacagtgtttcaccatgttggccaggctggtcttgaactcctgaactcaggagatccaccagcctcagccccccaaagtgctgggattacaagagtgagccaccaccccagtccacatgtcactacttctttttttttttttttttttgagacggagtcttgctctgtcgctcaggctggagtgcagtgatgcaatcttggctcactgcaagctccgcctcctgggttaacaggtcacttctttagtgacgcctgctctgatccctcaggctgacttgccattttccctctatgccgtttacacccctgtaaagatcctttacacccctgtctgatgaaaatgactgcactgtattctattatgtgcctctgtgccccactagcctgagccttcctcaaggccaggaccacatacctgaggtgcccatctcctgatctagcagagagtaggtgccaacagacctgtgctgaaaccatggatgactatgtgagtgttgtggaagactctgtactaccctagctattttaagaagtgtgtgtcctgcagggaagagtgtgaaatgctgccgctctaggcatgaggccaatgctgagatttggcctgtcttaccaggaatgtatgcattccttactgtacccagcatattatcccactccatgagaaccctggagcaaagtagagaacacagagatcaacctgcctcaccgaatcttagaacaatctgttgacctcatgatacacaagaggaccatgggtttaggcagcatggcatcccaggaccagcccacagaagtgaacttcataaaaagtgggatggtccagatcccttcaatatttgtggttgccagcgaggtcaggctcctctgagggccatgactacctgcatcccacggtagacgattatcctagggagctgctgaggcttgcctccaggagtcttgcccaggagtcttatcttcttcctgtgggtctttgctatgcagtggtacatgtccaggttcttagtttcaagtgacagaaacccagcttcaagaaagtagccccaaagggaaatttattagaagactcatgtgagtgttgaggagggatagcctggtctgggggagaagaggaactgggttctgtctctctctcttacctctatctttatctttcttatcctctacctctcttgttccattttgctcatttatgtgttcacaatatcccctctgactaacttcttctattgtcaagaaatgtccactggcattttctttgcattatactccacagtttaacctccaaagagggccagcccctcttctcttagttctgggtccaaaactctcaaggaatgcctttgtctgtctttgcaaaggtctctggttcatgatttgtctacaactgaacaggtcaatgtagccatagggtaggttttatgaatggcagtcccatcaaaaccacaatcattgttggatagtggagaggagttataccaaagaaggggcagctgcttgcagaatactgcaagctgggcagacaaaatattaaatgccccctatctaatcagcacttgataaggtcccacatgggtcagtcactcccagccttctggcaccaagcatactgcttgaaaccacagtgccctctctagtgccctgcactagcacatgaaaggcaaagcaaatgccaagatggcccttcatagccagtagtgggaaggtcaataattcccattctgacacaactttaccataaaaagatgataaagcaagacaagtgactaagttttatcacgtgttcaattgatagtgcctggctggagctctggattgaggcaatctacatgcagcctgggcaataaagaatgccctgatcaactagcaatgcttgccataggcagaggatgggggatgctggaatgtgcctcctctgccctaaaaccctctatagcaagagggaatgtagggtggagctccgaaagctggccagagtggagaagcatgttggagtgttcattgctaactattctcctcccaggccagtctctgggtgcacagttggcctcagtccccttcaagcattcatttttttcagcctcccctatgctctcagtgg

SEQ ID NO: 4522 - DNA, 6000 bp, Homo sapiens
cacccgaactattgaaacacagatgtcagtaaaataacatatctccggtggcttgtctacctgtatccctcactgctgagaaataactcacagcagtgggttaagctgacaataaacacaggaattgacttcagtgggaaggagcttgcctgactgttgacaaaaatctaaggtgacgcaaccttcgctgggcttattgcttgctcaggtggcagcctggctgtgctgttcccttgggactgggatgagggacaaaagccccagggtgatgaaagggtccctgtctctgagccaaaaggcaggtcacggtgtcctgcaaagggctggggcacggcttttgtggtgagcacgcactttgccattgagagaacactgtacaatagagtaggctacagggaaggcctcttctcttccctccctgctcaggcagttggcaaagatcaggcaagggctggcggttgccttcctctcatcatggccccatgctggggtgagatggggcaagggagcccctcccccattctcagcaaggcaccccaggtgcaggcttgtagagcagcctggccccatggtaggacatttaagggagtggctgaagccccagggcttcagcgtccagccacgaccagcagcctgcctactgggtagcaggaagggagctgaaggtaggcaggcctcggcagagggcactcaagtcctaggaatctgcactcagccactgcacacgtctactccgtggtttcccagggaagcagagaacatgaatctcggtaactcgagcccagggcatcatcactcactgcgattgtggggggggttgagagccagagtggatcagtctaaacaaaacacgtgcacagggggctcctccaaagagcatgatcggccaccactgggtgccccgtccctcacccaaagtagctggggaggggtggggggacgaggccagggagggggctgggagtcttgggtttcttcctggaaatcctaccctcaccacccacctgtgagccagtgggagacatgaatctcgctggcaggaactcgggccagctcagccgttttcagggatgttaatgaaatgcgggagcacttgtcctttcagacagcggccccttttatttgggaatgaaaagctgcattagtctgaatgaggtttggaggcctcataaatccggcgctggctgcctcgtgggggagcagggagcctaggcctggctggtgggtagacttgtttaccaacaatgcgaaaagccaggattggcggctcccaatgcccggaggagatgcggctggagatagtgccagccctggtgcctgctggtggcggggcagcctggagaggcatgtcatgccaccggcagagagggctgtaggtctctcttcatgagttagggatgactgggctccccgatctgccctgataaagtgtctgagtattctgctcttagccttccaccgcaggcagcagccccagtggggctccacaagagtgatgagaattggcccctgcagcttgtcccctactcagcccagatggtagaggacagggttaattctatgagctcaggagtcggctgagcctatatgtgaaccttgacatctcacccacagtgcctggcaaatggtgatgcccaatatgttttagaagaaagtaggaaggaagggagggaaggagggaggggaggggaggaaggggggaagggagggagggaaggaggaagggagggaaggagggaaggaaggagggagagagggagggaaggggaatggagggaagaaagaaaggtcacataccagcgatgtgactttggacctcttacttaaccccgctgaggctcagtcttcatctgtaaaatggatttgttattttagacaaagatcctatcgcagtgggtgtggagagcaagaggtgaagtgatgcgtgtaaggtagtgaatatattgtctggaacataaaaacatgtaataaatactaggggtcattatggggatcgttgctgctgtttctgttcttgcaatgcatcccaccctcccctagaccgggagggaacacgctgctgttagttttggggaaacctctgtgtcacaaaatggctcgcagccaggtcaagaaaaaggcccagtcccaggctggcgatggcagcttccctctggccccaacttggaaggcagggttccagctgccttccaagtccagtgactgggccccacagcctctgcagctgggaggctctttcccaccgcagccctacgtggcagcagaaaaaagcctcgatccgcagcgtgctgggtaactcccgcccactctgggatgcaggaggagcaggcccagcctgtgctgcttccctggggcgccgagggggctcgcaggtggcagagccacactctcaccctctgggggcctcagcatccccctctgccttcctcccttcgcgtttctagcaccactttcatgctagcttttttggaggctgctgcttctcctcctgctcccctccccttatccctcccttccacaggccttggatctgctccctcctgggagccacacctctacctttctgctgcttctgtttctctgccaagccacttgcaggctgactgcaggacaacccaggcagaattagcatccaggcactccccttgcctgtccccagaccagccttgggcaatgccgttttagccctgtgtcctttgcctcaagttcaggtccctttccgtttgtctatcagcgcaccgaaattttcttccttagagaacagctaggccttttggttccttggggcaaccaaacctgttgcggaagctgataggcaggcgatggggaggggtgtgcgtccccaaggaaggggctcccccagctatatccgggaggccgcgccctctgctgccctctcctgcacttcctccttactggcgcccactggagcccttactttttatcaagaggtggcagctgctgcttccctagctttggtctgcgtgtccttccctccgatccctcgggcaacattttccagtggctgcttgggaaaccagccgctcctgctccagggcgagggaggcccaactttggcagagacagacactcaataacctcagtttgtttgctggatttttgaggatgtcctcaggacgggcgcacccctctgtgttcttttgtgaggagcccagggagtctctcctcctcccacagccacagtggcctccacctcaggtgggagggcgtcccttcctaattggcaggattggccacactgagatattcacatccccacacaatgccacgggcctctgcacccagacagggaggggaaaaaagagggaaattaacaggcgggtgagagctcggctcatagaatatttgtaagaaaattaaagatttgctcttcagatgttgggggccatgctcttaccagacagctggcaaatgggaaagattggaaatgatagaatagatcaaattatttaaatgagaaaaataaattcacacacagcctagccgctgcccggtgacagatccgtttatttatctactgtatcggcaccgctttgtctctgtcaaaaaggtcattaaactcgcctaactgagtaattcgcagcctcctgctccagcctcgctccacagcctttcccttccctcacacccagcgccacttgaaaaaaaattattattgctaataaacaacgttgtttttctttttaacccctttagcttgctcccccacggatcctactccatcccacgacaaattacagtttctctttattctttctcaggagaatgagggagggggcaccagcccttcctgcacagttacgggagagggctgagagggagcgggcccggcgcccacgcccccctacatctaaggcgtgagcggtcttcctcctccgcagccccaggacctgtgcgcggtcaagtccagcttcccacagcagggggtctgacttgggctctcccacctctaccaactccctcagctcccctggcccagcgtagacaattcgctttgaattctgcctctccgaacccccagccccaactctgctgccaggaggaatggggttggggagggaagccggttcccgggtcagtctcccgctgccaccgccgtccagccagcgcccgccgcgtgggagccgcgaggccaggctccgcagacggcgggctcccggtctcgctgctcccggcgggcgcgtctcctccagctggtccggccgctgggctgccgccgtctcccagctcgcggtgccagctctcgcgctccacgcctggctcccgggctccgtgccctcgcagtagaagggactggggccggcggggcgggtggggacgtctgggaagcgaggagagtcctcgttctccgggcgtccccctacaatggggccagggtccccttccccgccccccgcgcaggtgtgagcgcgcgagtgtgcgcctcggcaagtgtgagtgtgaagtgtgtgtgcgcgggggagtgcgcggagggagcgcgggcggcgggcggcgcgggaggcgggaggcagggcgcaggggagggggctgggagggagagtgtgcgcgcgtgcaactccactccggggctttgtgcgagcccgggcgatagcatcggcggcggctggaggaggagcggccggagacgcgtgcagcccgcccgccagagcccggcagccggggcaggtgggagcccgcgcgggagccgagccgacgcgagtcggagccggagccgagtccgagcggagtccgggcggagcccaggagcctcgctcgcgggcagcccgtgggcggcagccaggcggggcgggcgccggcggggcggccccccagtaagatgtgcgcggcgccgcggggcgccccccacttgcagcggcgctcgggagccgggcggctgggccaggcggcgccttcggggctgctgcgcgcccgcgcctagagctgccgccccagggagcccgccacggccgcgccccgggcacgctcggcggcgcccaacgatgaccgctccctggcggcgcctccggagtctggtttgggaatactgggccgggctcctcgtgtgcgccttctggatcccggactcgcgcgggatgccccacgtcatccggatcggtaagcgctccctggagccgggggtctccgtgcgcccgggagggggcgggaatgagggggcctcccaacgcgttccggagagattttcctaacctctctccgagctgctgagccgatcggtgaccaccaggagctcctccctgtgaggacaaagttccagagtcggggtcacgggccttacttattggggaggaggccgccgggccgcagtgggcgaggggcccttggcgcgctcctgggaggtcagacctggcacagtgtggcgaaggtttccagtgcgatcccgagtcgagggcgcatttcgcggtgactgccagcatgaaccgcagccgaccgagttctgcgatcgggcttctccgcagagtggggaccctggggaaggcgccaacttctctcctctgcccacctcactccccgcgggcccttcgtccccacctctggcatagctcgagcagccgcagcgaggtcgcagggcacagattcgcatgacgagggcagccggtcttctctcctggtggtcgcccttggcctcggtggtaccggttcagccccgtgccatggggcgggggttgggggagcaggaccccgctgcccgctgcagctggtccctcggggccaaggcctctctcccgcctggggcagtgcaggtagagggaagggacgatggaggccgcccagtgcggcccgggcaggcggcccagggacgccagcggtttttaaagttagcccgaattcctccgcagctggcggcggctggcggggctgcgcgcggctttccggggctccggcttctccgcgtctcttctcgccggagactcttactccggtctttaactttgttgtggccgcccaaggcaccctgcaggcctgagcgccgcgcatgtc

SEQ ID NO: 4523 - DNA, 6000 bp, Homo sapiens
gggtcaagaacaagagatgccaggtaaggttaggacttgggaagggctattggcttcagcaataaggagatggcaggtgtccttggtgggtgcagaggtggaagggataaagccaacctgaaataagagatgtgctgatagccacggtagcacttcccactcacctggtgctattgtgagcactttatactattaactcacctaatatgcgcaacgactccatgtgataggcattatcatccccgtgttcccatggggaatttttttttttttttttttgagatggagtcttgctctgttgcccaggctggagtgcaatggcatgattggggctcactgtaacctccacctcccaggttcaagcgattctcccacctcaaccttctgagtagctgggattactggctcctgccaccaagcccggctaatttttgtatttttagtagtgacaggattttgccatgttggtcaggctggtctcgaactcctgacctcaagtgcaatggcatgatctcggctcaccgcaatctccacctcccaggttcaagcgattcttctgtctcagcctccggagtagctgggattacaggcatgtgccaccatgctcagctaattttgtatttttagtagagatggggtttctccatgtttgtcaggctgatctcgaactcccgacctcaggtgatccgcctgcctcggcctcccaaagtgctgggattacaggcgtgagctaccgcacccggcctctcatggggaatttaaaaggttcaatggctttcccaaagtcacaaagcttggtgactttggtgaccatggtgaagcatggacttgggaacctgggcagtgtggctccggaatccatttcactgccaagccatataaccacttctcagctgtgaggaggggacaggggaatgggtgggcaggaccaatagggagggagaggagagctggaggataaggaaaggtggggcaggtgatttatgggctgagtggttccctctcctgcaccataaacaaagggactggtcaacagctgagaaggagataaggtgattcaggaggtagggactgggtgggcctggggaccgccctcttcctctggcagaggcttcaggtcacgtacttttatcccgggctctgtgggaaattcacagaccacagggctgggaacaagcagaggtgtgagggccacaggtgcgggtggcggtgcaggattgaaatgcagccagctggtcttcctggggtagagctgtcagggagacacggcctgagctcctgcactcccaggacctggctttccaagtcctagaacatctttaagtggtaagcagcccagatgctctaggaaagccacagatcagagcatgagaatgaactgcctggccatgatgcctgaggcccaggagctggcatctcaccctccccaggtcaggtcctggacacacacagacacacacacacacacacacatactctctctctctctctctctctctctgagtcctgttctttcctcatattgacatctcccatggagaatgtaacgccagtcaggccatgagtagttttccagatcttggctcatctgggaaatctcacaaaatagcaggggtggggtgggggaccagatgtctttcatcttaaaagggaagagagaaatggagaacaaaagagggggtggagggaggcaagaaggagggaaggatgagaagaaagaaagaaaaagaagcttgcttggtttcaagtcctccccagctttttctttttctttttttgtttttgtttttgttttgagacagggtctcactctgtcacccaagctggagtgcaatggctgtatcatggctcactgcagcctcaaactcctgggctcaagtgatcctcccacctcagcctcccaagtacctggactataggcacacaccaccacacccagctaatttaaaaaaattttttgtagagacaggtctcactatgtcgcccaggctggtctcaaactcctgggcttaagtgatcctcccacctcagcctcccaaagtgtcaggattacaggcatgagccactgtaatctagctttacctagatgaatcagattcaaaactgttctcaggtgtctcacaggctagaggggagatctccctgtaaacagatcatagaccactgtgattaactgctgcaagagagaaaacccagagggttttgaggagtaacctggggaagatcatggaaggcttcctagagggtgctctgagccacatcttgaaggaacagttacaaatgagctaggcatatacacctactatgcactcacaaaaattaaaattaaaaaaaaattttatatgagctaggcagagactggtgatgagggtagaggtgggtaagtctcagagggccttgtgtattcagcttaaaagccaggatccagcactgtttggtctggggcaggttagcaggacatgaagaaaaggtctctgcctcctcatttctcagggactgtctggcttggaaggcttggtaggcaagactggaccagtcgtgggaaaccaaagagaacagattcaaattttcatagtaacagcagcccaagccaaccacccacagtgctttaggccataggcattgtttctgtgaatactcaaaattgccccatgaggttaggcgttcttgattctgatttgcagaggaggaaactgaggttcagagagattaggtaacttgcacagttacaaagagctggggttcagacccaggtttgtccaattcccaagcctgtgctcctaatcacctctctatgcttcctatctttaggaaacttgcagaagagaaccagctcacagtgtagggggaggagcttcccaaaacaagacagaggcaggaccaccactcttgggatttttcagtgttcacttacctcagcactgggagggtaagtaagctgccaattctcttccactttgaggttctatttcttttcttttcttttttctttttctttttcttttttgagacaaagttttgctcttgttgtccaggctggagtgcaatggcatgatctcggctcaccgcaatctccacctcccaggttcaagcgattcttctgtctcagcctccggagtagctgggattacaggcatgtgccaccatgctcagctaattttgtatttttagtagagatggggtttctccatgttggtcaggctgatctcgaactcccgacctcaggtgatccgcctgcctcggcctcccaaagtgctgggattacaggcgtgagtcacagtgcctggcctttttttttttttttttttttgagacagagtctctgtcacccaagctgaagtgcagtggcacaatctcagctcactgcaacctctccctcccgggttcaagcgattctcccattgagattctatttctttttctttttctttttctttctttcttttcttttttttttttttttgattacccaggctagagtgcagtggcacgatctcaactcgttgcaacctgcgcctccccaggttcaagcaattctcctgcctcagcctcccatgtacctgctgggattacaagttcgtgccaccacacccggctaatttttgtatttttagtagagacagggtttcaccatgttgggccaggctagtctcgaactcctgacctcaagtgatccacctgcgttgaggctgcccaaagtgctaggattacaggtgtgagccaccttgcctggcagcggaagttctatttctatcagcgccttaggtattacttcctccagaggtgaaagtggccactcaaatcttgggcacccctaggagtcaggatgttggacacagggcttaacggagcctgcactcctaggcctgagcttccagatctgtggctgtcagccccgtggcatggatggagaagagcctggccaagcccccaagcccctgtacaagaagactgggagtgtggccagtgcacaggatgggtcctggagctcatgcctttgctaggccacttccagccttggaagtccatcagccctggctttgaatcctgcctccaacatgttctagctgtatggccgacggcgggcaagtcatttacctcttggagcctcatctgtgaaatgtggatgattgattccctacctcatggtgctgtgatgaggatttcttgagaggatgacctagtagtgcccttggcatggttcctgtcacttagtcagtgctctgtgatcagcagctggtattattataacagtttatcatgcatctgtcttcccacctgaaacgtgggacaataacccctgtcatactggcttgaaggacatggtgtcgtctgtgtgagctgtggggtcagtatagctggcatttctgccactcgaaggccagcccaaccctacaggggtaaggagacacacccagttcccagcaccaggggaagctggatgacagcttcaatccatcaatgataggcctcagtccagcctaactttatggactgcagaggtacttaagtctgtgggggttgaagtctagcccagttcatcttccacacgggctgctgcccagagcaggtaggcaggtatgggatgggggtgagagtgccctgggccctggtagttctagttaatcagcttccaaagcaaggccccaaggaatagcagtggatttgggctggagctgcgtctcttgtccgcagcagttcaggatctggttatccctagccctgcaggctgaagaggagcttgaggaaacctcatgcatgaagggacacagatctcagttctaccttgtccaactctagcctggctttgcccatgtactgctcagttctgcagggggtggggtgtacttttctgctctgcaggctcctacccccttgtccactgacgcagggtgaaggctggggtgtgtgagaccagagtggaagggaggttgtctggagaactaaacgacagccctgggggcaactcttgtgacctcctgccccaggctcccagcaccatgacggtttcatacactctcaaagtggcggaggcccgcttcggaggtttctctggcctgcttctccgctggaggggaagcatctacaagctcctctacaaggaattcctcctctttggggccttgtacgctgtgcttagcatcacctaccggtaagggcagggtcttagagctggcgcaagtggggagactgggccacccacctccctctaacccaagcctacacctgccttccccaggctgctgctgacccaggagcagaggtacgtgtatgctcaggtggcccggtactgcaaccgctcagcagacctcattcccttgtcctttgtattgggtaaggctcccttctagttttccctgtgtcccccttactgtgttccctgacctctgggttgggttgacagctccgagggtcagaattacccaacagatggtgtggtgacacacctgcagtctcagctactcgagaggctgaggtgagaggatcgcttgagcccaggagttccagtccagcctgggcaatgtagcgagactctgctaaaaaaaaaaaaaaaaaaaaaaagaattactcaacacggtggcagagccttcctggtcagccagagcaggcccagcaggcacaggagctgggtgctgggtccaggacttccagagggcagggccctatcacttgccggaccctcacttccagcaaggcacaagacacctgctggcctcacaagcccaccctgggcactgcaggggagctggacagaggtgacaaccccttccccaccctcctgggaagcagtctcctggctttgaatccccactttccctctgctgaaggaagtttgccctcctccctcctcctggcctcgcacagcagggcactggagctgaatgtttccttccccctgccacgattcaactggcctggaccaggccctttgctgggggaggtgaggcgctccgacccccaggctctccactctcccttcctactccctctatcacggcg

SEQ ID NO: 4524 - DNA, 6000 bp, Homo sapiens
gaatggccaaaacactgaaaattccaaatactggcaagtatgtggagcaataggaactctcattcattgctggtgcaaatgtaaaataatacagccactttggaagataggcagtttcttacaaagctatgcttttaccatacaatccagctattgtactccttggtatttaaaaaaaggaactgaaaacttgtgttcataaaaacctgcacacagatgttgataacagctttatctgtaattgccaaaacttggaaaaaaacaaaatgtcctttagtaggtgaatgaacaaatatactgtgatgtattaattcaatggaacattattcagtgctgaaaagaattgagctatcaagccatgtgaagacaaagaagaagcttaaatgcaaaaatgccaaatgcttaaatgaaaaaagtcaatctgaaaaggctaataccatatgattccaactatctgaaaaggaaaaactattgtgaaagtaaaaagatgagtggttgccaggggttggagggagggatgaatagaaggagcacagaggattattagggtagtgttttaatcagtttgtgctgctattacagaatactacagaccgggtggcttaaacaacagaaattgatttctcatagttctagaggccacagaatccaagatcaaggtgctagcacacctggtgtctgctgagggtgctcttcctggtttgcagacagccatcatcttgttatatcctcatatggtggagaaagagatatatctctctcctgttttttcttatatggttactagggcactaattgcattcacgagggttcgaccctcaagacctaattacctcccaaatgccccgtctccaaatgtcatcacattggggatttaggttgcaacatataaattttggtgggggagggggattggtaaagtggggacaaacattcagtccacagcaggcagtgaaactattctgtatgatactatagtggtagatacatgtcattatacatttgtcaaaacttagagcctgcacacaagtgaaccctaaagtatggactttgagtgataatttgtcaatgtatattcattgattataacaaatgtactactctggtgtaggatgttaatagtgtgggagaggctatgcgtatgtgggagcagggaatatataggaactttgtactttctgttaaattttgcaataaacctaaaactgctctaaaaagagtctatttttaaaaaattaaaataagaataaatattttgtaatacatggaacacagccactctcttttttacatattgtgtatgattatctttacactagatagttaaatatttgtaaaggagaaagtacaatccgcaaagcctacatatttgtatctgaccttttacagaaaaaaaattagccaaccctgaattataagatagcttgttggaaactggcttacttgatgtcgaaaaatcaaggtgcattaatatctcccaccacatgcaaagttgaagtacaatggaatttgatatgaaggataaaactattacagaaaatgcagaagaatggtgaattaagggtagagaacaacttctttaaaaagatcataaaagcacaaactataaggattaatatccttaattttgatttcctataccaaaattaaagactttcatccaaggaagaacaccatggacaaaaagatagatgacgactggaagaaaatacttataatgtttagaactggcaaggaattaatatctacaatatacagaacactacttgcacatcaaaaaatttttgaaagaatgtgaaagtaaataaagagcatcgtttttctcttattttattctattctccctccccatattcttcacaataaatattttttgtctgcccaacctagaaaatttaaattgttgcatttctactagcctgactcacattttcttttcttttctttttttcttttccttttcttagactcggtctctgttgcccaggctggagtgcagtggcacaatcttggctcactgcaacctcgacctcccaggctcaggcaagccttccacctcagcctcccaagcaagctggaaccacaggcgtgggccactatgtccagctaatttttgtatttttggtagagacagggtatcgctatgttgcccatgctattcttgcactcctgggctccagcaatccaccctccttggcctcccaaagtgctgggattacaggtgcaagccactgtgtccggcctatctcacattttttagactactttctaaaatttcccttttaacactaaatcagtgaaacttccacatgaagacaaactgctagagaaatttaagaactttaggttgtaaaattaaaatgtcatattataaaacactgttgagcaaaagattcttgtgttatttggttattggtcattacaaatttgagtcaggacacaaagctttttgtgctatgatattcagaacagaacacaaatgcttgaaaggattaacatagcacaaaacaatgtctattactacacactgaaaaatgagccatgatctttaccacaaacaagtgactttttgaaagttaaaaacttaatgcctactgagaattaaatttactaattgagaatgattagattcaatggctgaaaactttagtatgtgttatatttataataaatccttcagccatctgactccagtaattttccactcttactcttctccccccttaattcccgcacacactcagattaaatatttcttagaaccttgctacttacagagtgggaccagcagcagcagcagcagcaggagcatcttcttgctagaaatgcaaaacctcaggtcctactgaatcagtctgcttcaataaaaactctggtgactcatatgcacattaatgtttgagatcctcagatctcccttttgaaactatttctccgtctgcaggggtccccaaaccccgggctccagactggtacaggtctgtggcctgttaagaaccaagccgcgctgcaggaagtgaacattgagcaagagagcagcggttccactcgattctcataggggcagaagccctactgtgaactgcgcatgcgatggatctaagttgcaggttgtgtgctccttataagactctaatgcctactgatctaaggtgcaacagtttcatcccgaaaacatcctcccctcatccccccacctgtccgtggaaaatatcatcttccatggaaccagtccctggtgccaaaaggttggggtcttactatgttgcccaggctggagtgcagttactattcacaaagctggatgattgcgcacctccgatgaaaggggctcaaaaccaaggcatttctgcctaataaccccttggaagtgccttaaaagagggtcaattatgtgtgcttttatatacatcgtctgtccaactgcttctgcctggacacgcatattaaaataattacctggcagaatattctttgcctgagctaaacccggagatcttttaaacgcttgcagactcacagagcctggcactgcggactttgctgctgctacctcgtgaaaaggaggggtacgagctctaggaggctgtcggccacgtccaaactaccaagctaacatcactaggagccgaacacggcttttggtcatgtactgacgactctcatctctaagattcacgaacggcgaccgattgtctgttcgatttcccacaggcgtcttcctttcgtgcaccaagagggaaaagcaacggcggctgcagcagggcgctggggttacgagtccagccctggggccgtgcgccctccctccgcgcccgccgggccacgctgacgctccctcccggctccctgcctttcatcccgacgcgggcgcagggcaactcgcttttcctattccttgcgcgccggtcgcactttctaacatctcagaaatatggcccttgtcacagactttcatgatcgtgcactttagagaaaagccagaatgaatgaacttgtcagtttaatgtgaagtcctcaagggaaaggaccatgtctttgtcatcccagagaccacagtacccaacggtcggcttggctctcagtgagtgtttccctaagcatcaaaacaggaatgaccaaagcaacggacaaattaatgcatgtggaaacaagaaatgaatgcatgagagagtgaagaaaagaaggggccaggcgcagcggcttacacctgtaatcctagcactttgggaggcggaggcaggagaatcgcttgggtccaggagttcaagactgcagtcagcagtgatcgcaggtcaggcgacagagtgagacccggtctcaccaccacccccccgaaaaaggcaggaaccccagagggccgggagtgccaggtgcggccgcccgggagcggtgtggagggtgcgtgggccactttgccgcagggcccaccgcccgggtccctctgtaaggcgcttctccggcagacaccccgagccaaagcgggccgtaccgcagcgttgggcacttgggtggagagtgcaagggcggcgggcctgcgcccagacaggtgtagccgtcccacgctaggtgtcctcctgccgctccctggccgcgccatgcctcgaggcatggaggtgctggacctgccggtgtgcaaccgcgcctcgggcctgtcctgggggccgcaccacaggtcagtgccccacggcgcccttggcgtgccccacgcctccctgggggccccaccgccgcccccttttgggactgcttacttcctcggctcttctcgcgcgcgcctcggttccatcccctacggcccccaccccgcctccgcgtcgccgacccccttctccgggagcgcggggaggctggtccgctgaagcgtggaataagtcccctaggaccccaactggggaagctccggtccccggtaggaggcggcggggcggggcggggcggggcagccccttgggggcggggcgggagcgcctggccacgcgccgcatcctgcagggtgcacacagagccgcctttcagccgcccgagaactgcccgccgcactccacgactgcggcgcctgctctcgggccggggtctgcgcgcaccacgcggccggcagaaagggtaagagaagggaaccccgctttgcagggctccaacttcggcggacgcgttacggcgagggcgaaatgagtcggccgtgaacggtgtttcctgttccgaatcccgagagccctggaaagttttgaaggaggaggcatggcccggcagccttatcgttttccccaggcaaggattccggagagaggatcaggtgttttcaggttaaccgtcaggtgaggagtctgggcttcatctttcaggatgctggactggagaaatcttcctaaagtcgatggctttactttcgtagactagagcttgcttgctgccttgggaatgcttatattaactgcttgcagttagttaaataaggctaggctgtgccttccagaacaaacaggcctttccctcaggtgggagggttgtagtgtggctaaccccagttcctcggcctttatgaaaaggcgcacagttcagccggttggcgctgccagcgggcccctcctccgtggtcaaacctccagccaccccagcacagttgagccaaagttgtgagtacaaacagaccttggctcccccgtttcctgctctccaaacatatatatatatatatatatatatatatatatatatatgaaatatatacgtatgtgtaagtgtgtgtgtctctggttgaacggtacttgtgggaaacaaaattgtgtgtcattgtaaactgagaatggaagaaaaggttagtaagagaaaggtgggagaggtttcttatgggtgtcaggatgtagactctgatattttatgtagagggaaccaactacgtagttctccccagaaatgggatgtgggtttcactctcaggagctgctcatcacctttgtgatgtgctaaccaaaatcgcacaacttttgggaaatttga

SEQ ID NO: 4525 - DNA, 6000 bp, Homo sapiens
attattcccaggctacaaacctgtacagcatgctaccttactgaatactgtaggcatctggaacacagtgtttagtatttgtgtatgtaaacatatctaaatatagaaaaggtacagtcaaaatatgatataaaagattaaaaatgggggccgggcgcggtggctcacgcctgtaatcccagcactttgggaggctgagacgggtggatcacaaggtcaggagatcaagaccatcctggctaacacggtgaaaccccgtctctactaaaaatacaaaaaattagccaggcgtggtggcaggtggctgtaatcccagctacttgggaggctgaggcaggagaatggcgtgaacctgggaggcggagcttgcagagctgagatcgtgccactgcactccagcgtgggcaacagagcgagactctgtctcaaaaaaaaaaaaaaaaagattaaaaatggtacacctgtataggagacttaccatgaatgaagcttgcaggagtggaagttgctctgggtgagtcagtaggtaagcagtgagtgaacgtgaaggcctaggtcattactgtacactaccataaattataaacatgtacacttagactacactaaatttattttaaacatttttcttcctttaataataaattaatgttagcttactgtaagttttttactttataaactttttatttttgagacagggtcttgctctgtcgcccaggctagagtgcagtggcacaatcatggctcactgcagcctcgacctcctggacacagtgattctcccacctcagcctccagagtagctgggactacaggcacatgccatcatccttggatatttttaaaaatttttgtagagatggggtctcccaatgttgctcaggctggtctcgatctcctggactcaagcaggcctcccaccttggcctctcaagtgctgggataaacagggataagccacctctcctggcctaaaattttaaattatttattcatttatttatttttcattgcacaatggaaatggtatgaacttttatttattttatttttattttatttttgtttgagacggagtctccctctgtcacccaggttggagtacagtggtgcaatcttggctcactgcaacctccgcctcctgggttcaagtgattctcctgcctcagcctccagagtagctggaactacaggcacccaccaccaagcccggctaatttttgtatttttagtagagacagggtttcgccatattggccaggctggtcttgaactcctgaccttgtgatccacccaccttggcctcccaaagtgctgggattacaggcgtgagccaccgtgcctggccaaacttttaaaatgagtaaactttcttttgtaataacacagcttaaaacacaaacatattgtacagctatacaaaaatattttatttatatccttattctacaagcttctttctatttttcaatgttttaaaacttttttttgttaaaaactaagacaaaaacacagacattagcataggcttacacaaggtcaggattaacaatatcactgtcttctacctccacatcttatctcactggaagatgtccaggggtaataacaggcatggaagtgtcatctcctatgataacacaatcttcttctggaaatcatcctgaggctatttgacagctggcttttttttttcaagcagaagtatactctaaaataatgataatagtatagtaaatatgtaagccaatcacatggttgcttattatcattgtcaagtattatgtactgcacataactgtatgttctacacttttatagactggcagtgcagtagtagtttatttacaccagcatccccacaaataggtggataacgcattgctctacaacgttattgcggtgacattattacatcactaggtgataggagtttttcaactctgttataatcttatgagaagtgttgtatacgtagtcagtcgtccaccaaaatgtgttataatagtaagataccatttggatattctagcaacaacaaaagcattacatagaaacatatgttgaggccaggtggggtggctcatgcctataatcccagcacttcgggaggccgacgtgggtggatcacctaaggtcaggagttcaagaccagcctggccaacatggtgaaactgcatctctactaaaaatacaaaaattaggtgggcatggtggcatgtgcctgtaatcccagctactcgggaggctgaggcaggagaatcacttgagcccgggacgcagaggttgcagtgagctgagatcgagcaactgtactccagcctgggcaatagagctagaccctgtttcaaaaaacaaaaacaaaaacaaatgtattctatgactataaatgtattgatgtttatttacaagaatgactcactgacaagtccagaaacacaaacttataacattgtaaaagttaaaagcaagattgactgataagatctttaccgcttctcttttatgcactcctctcttgctttccaggaatgtttatgtaaacctttgatgtcagcgtttcctgtctttcttttgatttggtttcaatatattcctttaagccagtaacatcattatgttgattgttaaggtttaatattcccctttacattgttttaacatctttgtcagaaatcaattgaccatatatgtgtgaatctatttctggattctattttgttccattgcctatgtgtagtctatatgtctgtcttcaccagtaccaagttgtttagcttaaatagctttatagatataggtaggataaatcctccagttttatctttcttttaaaaaattgctttggttattctggattctttgcatttgcttccataggaattttagaatcaggttgtcaatttctacaaaacagtttgctagaattttcattgagattgggttgaatctataaatgaacttggtgaaaactgacatcttaataatactgagtcttgtaatttatgaacatggttgatattttcattaagttttccaaataaaagggggaatcagcatttataagcacatcacatatgcctcatatagtaatgggtgctttacatgtatcatattaattaaaaatcaccattccttttattagctagattgtgttagggacaagctaccccaaaaaagcttcttggtactgccaacacccccgccccccacccccgcaaacctctccgtaccacccctcctcttcccccaaacctttttacatttctaagcccctatctaggcaccgcggtgaagccaggagacttttacctatcaggtcttgctgctataaagcaaacccaattacaaaccatccggactgcacagtgggaggtcgtgggaagtataaacaaactttacctacaccctccggtaccataaacgtcacaaggtgatatgtggcagagttaaccaacaaacaactccagggtctctctcccccacataaaaccctcattttgtaagctcagggctgcctcctctgtctgtaatggagcagccggcaggttgaataaaggcttgcctgaacttgggtctcggtctctctcggtctctctctccctctctctctctctctctcgtcctttctctcggctaacttcacagattgcacataaaaaagaaaaggggttcagagaaggtaagtaactccctagagaccaataagtggcacagaagggaatttgggccctcatctgtctgactccaaaacctggctttatctattcaccggtccttataactcagctaaaacgagggttaagcaagtgccatcatttatgactgtgaacctcttcaaagttcagattgttcctgaacaatcaagcatttcaaactcttaccatcaagtaaggagatagcgttacatcgtgtgtaggcatatggggattaaagattacattatattttccaaattgcacttgagaattgactgtgccaattatatcctttctgggtatctaccttgttcacagtatgtgggatccaggttgaggaacagcataaaattcttgtaccctgttgcaaaaatttattagtaatccatgcatactggtttaggatttgaaaacaggttttataaaaggtttgctaggtatcgatctaatttcaggaataccctagtagggaaattcagtgacctttacaaatttacccgtggccaaaaaaaaaaaataagtaaaaattaaaaatcagaacacatccaaagtaattataattaaaattaaccaaagttcctgatccaatcctgataaggggtattaggtttaatatttacagataatttatgaagaaaaagattacggttcaaagtctacttcaggtatttctatttacatttcttggaaaagtttcccagggctctttctgccccagccgccaatctacagaagagtctagtcgactgtccactcatttcacagcacttgtctgaaactagaagacccagggagggaacaaggttcaggcttgaaacgctaagacattcaagatttcaccttgtatgcaaaaatcagaatgggaggctgcagcggggcctcacactcaccggagctaggcgctatagatcccgcacccgcggagcccggcaaccacctgaggggccttggccaggagggggtggccccccggcgccggcggcagctccggagcaaacctggcaaacccgagcagggcggtgcgggttgctcagggagaaaatgaagggagtgatagggtgggggtggcagggaacgggcacaacgccggcttcctccggacggcctcctgcgtcccacctgtgctcctgaaaagcggcccccgacagggcgcggcgggaacccgagccgggagtagggtcacgagttaaagcggcgggggcgggaggatgcgcgggcggcggacggggcgctctcctcccgtctgactctgggcggagcggggctcgaggctgctggagtcgctcgctgactcgccctgcgccctcgccgcggacaccggagctgcggccgctccccgctgtcccccaggtgagcccgcggggcgctgccccggggcgtcgggtgtcgcgggaacggcgcccgcggcgcacagggagggccggggaggccgggaggcagcgagctgtcggggacgccgcgggaaggccgggccgggcagtcggcgccatggagggcaggcgggctggagctgggcgcgagatgcagctgttccgcgccgcccccaagccgcccgcaggtcagtggaggagcgcgcctgccgggcctgcccggggctgggcgggtgggggtgctctgctcctcggtccccctccaggccgccgcccacctgtggccagggctcagagggctggaagccacccccgcccggagcccctgggctggaaggcttggatgccggccggggctccagatggccttgacgcggctcggctggcccctttcaaggcggactgtccccctgttagaggtgggggcggctggaagtgggggctcaggcccgggtcgctgcgctggctgaaagcagccgccagccgggctgcggccgtctgagctccacggcagtgcccggggatggcagcgaccgctctgggacatcgctgcaaccctgcagatctttctcgcacacactacccaacaaaagtgtcaacccttgttgtttgtttgtttgaaaaaaaaagaagactggagagactaaagttttgtgtctggtgaagtgggaaagcgcttctgaaaaaacgaggttgcataactttgtcgccaactgggaggcctttgctatttatacactcccgggctttctccaattttctacagcttactccaatcaagcctctgcccgccaggaacaggtaacctgtgtgtgtccgtttgctccttctaagagcatgcctgatagatacttcggtagcctctccggatggccccttcgtcgggtagcctctcctgatggggtccttcgcccaccctgcctcccgcg

SEQ ID NO: 4526 - DNA, 6000 bp, Homo sapiens
cgcgtgactgtacttccaccaccttgctgtactgcctttgagtattagcagcagggggcctcatggtaagacaacgagcacactgcttgaaccagagcagcagctccaaaccatgagggagggactaccctcattagccattccttaacatgttcttttattttatttatttatttatttgagacaggttctcaccctgtcacccagactgtcgtgcagtggtgcaatctcagctcactgcaacctccaccgcgctggggctcagctgatccgcctacctaagcctcctgagtagctgggtctacaggcatgcaccaccgtgctggctaatttttgtattttttgtagagatggagtttcaccgtgttgcccaggctgttctcaaattcctgggctcaaacaatccactttcctcaacctcccagagtgttagaattacaggcatggaccactatacccagccttttttttttttttcaagacaggatcttgctctgtctgccaggctggagtgcagtggcacaatcatggctcactgcagcctcaaactcctgggctcaaatgatcctctcaacttagcctcccgagtagctggaactacagggacatgctattatgcccagctaattaaaaaaaaaattttagaggtggagccttatgttgcctaggctgatattgaattcctggcctcaagcaatcctcccacctcagcctcccaaattactgggattataggcatgagccaccttgtaataaaagaacatattcttttatttagccagtattgcggtgggatgagtgtgtagcagctcattcaagacaggagccaaggcccaggcctccatgaaggggccccttagaggcagctgaagttaatctgagaagccttcctgcaggaggctgaccttgactttggaggtaagtagtgggctggagtggaggcccatgccacttccaagggaagttctcaaatgtcaggcagatgcacaacacaacatcagcaacaacagtgacattaacagagtcctgttccacactgaccaggctttgcttctccatgcacctccatgggtattatcctctgtagtcctaaccaatgagatgttaacacacactaacaatgaaggtccctttccttccttccttccttccttccttccttccttccttccttccttccttcctcattctgtctttaagccctatgaagcaagggggtgggcggggctagtgtcctacctattttataagtaaactgctactcagaaaggtcaagtgagtgagcttgggtcgcacagaccacggccctggtcagatgccttgccttgtcctcccctttgggagcctttgggtcctgactcttgcaccaccactgcctcaagtccctcagttaaggtatgaacagttaatcaccagcaccaactcccttctaaaccagattgcctgtgaggtcaggttgcctccaggagagacgacccctggggaatctctgttcctgagaccagaaattgagcccagaggcctggcactgagctaacagtaaaagtgggcagtagaatggcatggtgacttataaagtcacacagtcttgatctgttccagcctcactactaaccagctaaattaccttggtcctctctgagcttcagtatcttcatctgtaaaacagagacaatgatatctttcccactggctggttgcaaggattaaatcaaatgatctctggagggctgtcagcccagtgtcctcctgccctgcctacctgtgagtgagtggggactgtgccagcacatgggtggatgggctggtggggagcatcaagcagaggcagcagtcatgccaggaaggggagctggttccctgggagtgacacctgagaagattcacaaatgggaagaactaagagattctccctccagtccctctgtgtgggtgtgggtgtgtatgcatacacagtcataaactcttcttttaagatgactgtagtcaccagtcactcactgtgacagccaccacagcccttccctctgctgaaggcagggcctggctctcaagcaggaaaccaaaccaaagggaagggagtggtctttggggattttcaccatgccccagggaaaggatcaaaggacactctggctgctattgtgtggccaaaaataagaaatggagcccaccatagaactggaaagggggctcagttaagttagctggctgtccattctttatagctaattttgtccttactaccctgtaaagtagctttgctctcccattcgaccaactaggaaacgaacagtaggaggctcagagagtgtcagtaacttgctcaagttcatacagctagcaagtgttagtgccgggaatacggcctgtgttcttttcctatacagcactgccaaaccaaggtactgacagacacttttcagggcagaagccctgaaatgtgcctaaacaactgttatgatggttcttttttttcccccttctttagttaatttctttttttgtcattgttcacatttaagtttaaaggatagagacaggacaacatacccctgaggccaagtcacaaaatagaagcagaggtcagaggaagatctcaaagagggaaatgaaattcaagagctgctcattccacctgcacagtgtggtgtgggggctaagggcacatgtcctagaatcacaaagacctaattccagtcctagagtcaccatttattaacctcaggcaggtgatttcacctctcactgcctccatttcctttccaatgaaatggtactaatgtatacattgacttctagggctgtgagaattaaatgttgccctgggtaagaagtgcttagcacagggtctgacacatggtaagcccatgtcaccaattatgacgattgattttccttcaagggcttttctctgtccacagcttctgttttcaagaaggaaggcaaaggaaatgtatacatatgatcagatggatagagtatctgactttggccacacaggattatctgactttaaatgacacgagaacccagtgtgccaaataggagaaacagagccccttggtgctggtcaggggaggctttcagaaggagtatatagggaagggaactggaggtcaatttggtagaggggtgggaatggtgagatctcaaggaaagtaaagggcggggcaatctgggaagcagagggaatggggcaacaaggacctggtgattgggagcctagagaaacaccccagagctaagctggaagctaagagctatgaggagagtttcacaaggaagcagagcagcgaaatcatcatgcattcagtgtctgctggatgctaaactcattcaacaattaaaacctcaccacacccttaggggcatcctgatttttcagaggagggcactggtgcccagagaagtgaaataacttatctagtaactgttagggagttacgtttccatctgactgcctccaaaacacccaagccgttcactgactgggacactaacaggccaggttcaaggtgctctaaaccataccagcccttctctatagtcatctgtcatcctttgggcccacggaggtcactgccctcccagaccaccccctgcagctctaggcaggctcccagtcttcaaccacacctcacagactaccacgatgaaacgccagaatccggagtcccgcttcatgggctttcagggctctccccacgaggtacacgcatagagaggagggtttcccggccggagggtaggggggagggcccagtggggacttcctggtgctagagcccatctgaatccagagctccgtgtctaccgcagtcttatctcaaggaaccaccactgtttggcacacctgtctaggtgaccctgacagggacctggagaacagaactagcaggggcttgaggctgtcgtctgcctcccaaaagcaccctggaccttctcggatgccctatctaggcagaaagtaggctgtgcctcccacacacatttcccgaaagcaaagggcatcctcgtctgcccacctagggtgctgtaagctgcactcctaagttcagagccctgtgggccacctggctttgcaagttctgccagagggcccgttttgtgagtagctgaccattcccaagggcagcggcgtgtcccccagccttccctgcccgggccctgggggagggagtcggggagtggagagggccagccctgcagtgctgcctgttcctgcggctcctctcggtgggggcgaacacagcagaagagtttctgccacactgcggaccgcacctgctgcatttccctgcgaagccaaatctttgctgggtaacagggaggtgggaagccgatctggagaaggggtcgcgctggcgggagaaagggcaagaaaggggtctgcagatcctgtctggaggcaccacaataatagcaacacgtctctcccggggctggatcccgctgtgggcctggggtagctgctattgattatctcctccttgcctacttcattacgttggcaggagcctctcaccagtgcccctcaacttctgccctcccccatctccccggcccggcagcacccagctgagctctcctggaggttctggttagtaagtcgggctctgccaaagaatgttttcctcgcggggcgggggctgaggcccgggggcccaacgaggtgacgagctcggtggcggcggagggcagcttgtcgccccggccccggccccggcccccgccggcccctttaattcgagttcgccgtcgagccaggtgcggcgctgcgtggcgcggtgcggctgcgggcggcggccgggagctccgtacgcgccgcccgcgggactgcagagccggctcccggctggccgcccgcaccccgccgccgcccgctgccggggttctgccggcgctggccgtaacctaggaacatggaggccccggtgcccatccggaagggtaaatccgtgtcggggcgttgcgcggcgcgtgctgccttccctgcccggctgcggcgcccagaggggctgcggggcacccggcggcgcagcctgcagcgcagcaggcttgggctgagtccgcggcggcaagcccttgccgaccactgccgtctgctcggcaggtcccagaccggggagatcaaggggaacttgcaccctgctcaagaagagtgcacagaatgggctcgggaccctctggggtttgcgtggcgcggggcggagggcacggagaggagctggtgggtggtgggaagtgcagctggcagcataaccatgtctggtaaatagcgcgggttggtaggacctgaaccacttgggacggccgggctgcattcgcctcttcggcacagaataacaaacggctttgctgcagagagggctttccccttcgctggggccgtgggctgccgccgagcccccgcgcttaaaaggaagctgagatctggggcggcagcctggcgcaggctactccccacccccagagatcaggttccgggattttgggttggacactgagcctcggcggtccctcggctggacgccgggggcttaagagctgaactgcgcttgggcccgcagcaggagccgaccgcgcgggcaggagggggttaaggtggcgctagcggccgcggccagcgggagggtctggtcctctgcgcggaggcgagcgctgagtgcgccgaacggaatcccggccggagcccggggcgatggggagagggcccagacccctccccgccctggggccggcgggattgggtcggcagggggccagtccggaagccggcttcctccaggctccccctctcgctgctgccaagccgcctcgcagctaggcaggcggagcgtttattctgtgctccctgccgaggagatgtgagggattttctcttgggggagaaatcagtggtcgagcgcctgcccagctcaaatgccacccggctcagagggaggcctgcggcccagggatcccggagggagagtaagttcatccagttttcgtaca

SEQ ID NO: 4527 - DNA, 6000 bp, Homo sapiens
agtgcaaataaatagaatagatcccttagccccactccaacttttggtttttgctactgcacattctccaacaggcatcactgttcaaaatactgatcttgtggagtggtcattccttcctcacagtacaattaagacttttacattgtacttggatcaaatagctacattaattggtcaggcaagattacaaataataaaattgtgtgtaaatgacccagacaaaatagttgtcccttgaaccaaggaacaagttagacaagcctttatcaattctggtgcatggcagattggtcttgctaattttgtgggaattattgatcatcattacccaaaaacaaaaatcttccagtttttaaaattaactacttggattctacctaaaattaccagacgtgaacctttagaaaatgctctgacagtgtttactgatggttccagcaatggaaaagcggcttacacagggccaaaagagcaagtaatcaaaactcaatatcaattggctcgaagggcagagttggttgcagtcattacagtgttacaagattttgatcaacctatcaatattgtatcagattctgcatatgtagtacaggctacaagggatgtaaagacagctctaattaaatatagcatggatgatcagttaaaccagctattcaatttattacaacaaactgtaagaaaaagaaatttcccattttatattactcatattcgagcacacactaatttaccagggcctttgactaaagcaaatgaaccagctgacttactggtatcatctgcattcataaaagcacaaaaatttcatgctttgactcatgtaaatgcagcaggattaaaaaacaaatttgatgtcacatggaaacaggcaaaagatattgtacgacattgcacccagtgtcaagtcctacacctgcccactcaagaggcaggagttaatcccaggggtctgtgtcctaatgcattacggcaaatggatgtcacgcatgtaccttcatttggaagattattatatgttcatgtaacagttgatacttattcacatttcatatgggcaacctgccagacaggagaaagtacttcccatgttaaaaaacatttattaccttgttttgctgtaatgagagttccagaaaaaattaaaactgacaatggggcaggatactgtagtaaagctttccaaaaattcttaagtcagtggaaaatttcacatacaacaggaattccttataattcccaaggacaggccatagttgaaagaactaatagaacactcaaaactcaattagttaaataaaaagaagggggagacagtaaggaatgtaccacgcctcagatgcaacttaatctagcactttatattttttaaacatttatagaaatcagactactacttctgcagaacaacatcttactggtaaaaagaacagcccacatgaaggaaaactgatttggtagaaagataataaaaataagacatgggaaatagggaaggtggtaacatgggggagaggttttgcttgtgtttcaccaggagaaaatcagcttcctgtttggatacccactagacatttgaagttctacaatgaacccatcggagatgcaaagaaaagcacctccacggagacagaaacaccgcaatcgtgcgccatcgactcacaagatgaacaaaatggagtctcttatatctacttctttctacacagacacagtaacagtctgatctctctttcttttccccacagctgaggcaggagaatcacttgaacctgggagggggaggttgcagtgagccgagatatcacatcattgcactccagcctgggcaacaagaattaaactcagtctcaaaaaaaaggacaaatgtataatttaaatcaatcgttcctttagcaatcatagtttttacacattattcttaagcagagcttggaattagaaatagcttgatcagaaagtatttcccaaaagaattattcatcttttagatgaatcccaaagtgctggggttacaggcgtgagccaccacatccagcctcattcgccttttctaaaaacatgcttgagtcttgcctattccccaaaagaaaatctgctgctacagctctgccctttccttgctttactgttaaatattgctaccactgttcaatattggtaccacctcctcgctccttaacgtcttgcgattgacctctatcacctccatctttaatttctgtatcacatttaacattgacaacctgccctccctttcttcatttgctttccatggctcttctctcttctaattctctccctaccactctgatcatttgtatgtcttttgccaacttttccccacgtttctgtcttgggagttttttttttttttttttttttaagagacgggttcactctgttgcctaggctggagtgcaatggcatgatcatagctcactgtaacctcaaactcctggcttcaggcgatcctctcaccttgaccattcaaagtgttgggattacaggtgtaagccaccgcacctgactggaacctctttttttcctacattctcctttgtgatcccatcaacttccacaactttacttacatttatgtgaaaaagtccaaaatttgtacatcttcagcgtctacttttctcccaaactcccacacttacatttcctagaacccttaaatttcagatatggagatcttagaggtcatttatcctaagtcttcattgcctggatgtctccaccaaatggttcattcgcttttaataaagtccatgttttcaggccgggcacggtggttcacgcccgtaatcccagcatttgggaggccgaggcaggcaggtcacctgagttcaggagtttgagaccagcctggccaacatggcgaaaccctgtctctactaaaaatacaaaaatcagccgggcatggtggcgcacacctgtagtcgggaggctgaggcaggagaatcactttaacccgcgaggcagaggttgtagggaactgagattgtgctactgcactacagcctgggtgacagagcgagactccgtctcaaaaaaaaaaaaaaaaaaaaaaaaaagtccatgttttcaaaactgaatgccttattttctctctgcttttcagctccattcccaaattgactcctcttcttgaatttattgtttctataaataatcaccttgaggcacacagtcttctcattctctattcagtcagctgctagtctagtggattccattgtcacagactctcttggttaggttcactattttctattcttaactactacgtttctaggttaaatcctaattatctcccacctaacgtttgcagaggactcggctagactgttcatctctggtagttttctgcttggaattctgagtctttttattcattaccaccaaattatctccataaagagcacttcttatctgccactctttttttttttttttttttgagacggactctcactgtcacccaggctggagttcagtggcgagatgcgatctcggttcactgcaacctccgcctcccaggtaaaagcgattctcctgcctcaggctcctgagtagctgggactacaggtgcacgccaccacgcctggctaatttttgtatttttagtagagacggggtttctccatgttgaccaggatggtttctatcgcctgacatcatgatccaccctcatcggcctcccaaggtgctgggattacatgcgtgggccaccgtgcccagccttgttttgtatttctagtagagacagggtttcaccatgttggccaggctggtttcgaactcctgacctcaagtgattcgcccgcctacgcctcccagagtgctggcattacaggcgtgagtcaccgcgcccagccaggcctgtaagctttctaagggcagagactgccttactatacacgtaccccccccaactaacacagtaccatccacatacagacagacgcccaggaaatgttaaactgtaattctggataggttaactagtattaaccgtatttaccaaatgtttaccacatacttacactgtcctccttgtttcaaggagcgtagtccccaagggatcaccctgatggaatataaaaactacacataagagtgaaactacggaacgtaagccattagtgttttgcaagacagctcgggttgagactcagtctctctcttccacaggccaagtgacacatcgtaataccattggtaccgttttattttatttttcgcgacaaagtctcgtcctgtcacccaggctggagtgcagtggcgcgatttcggctcactgcaacctccgcctgcagggttcaagcgattctcctgcctcagcctcccaagtaattgggattacaaacgcccgccaccacgcccggctaatatttgtatttttagtagagacggggtttcaccatgttggtcaggctggtctcgaactcctaacctcaggtgatccgcccacctcggcctcccaaagtgctaggattacaggcgtgaggcaccgcgcccggcctgttagtactactttaaaatcgaatctgacctccaaatcattttctggagctcgatcattttctgctaacaccgcaaagcttaatcctctccacctgagaataaaaggttccatccttccgctctccagtttgacgccctgctaagtctctcggacgcggtgggctggagtgaaggaagccggagcccaccaaagctgcaaaagtaccacagccagcagccccgcccccgatatcccccacaggcttccaattggtccttgtggctcactctctttccaggttggtgttccagcttgccggtcgcctctatagagcccacctttagacggcgactattggtagatcgttacgtcattgccctatctacctcactcccactggctctcataggaaggggcggtcgcaacgtcacgggcaagggccgccattttgactgagcaaccctagtgacaggagccgaagcagcagcgcaggttgtccccgtttcccctcccccttcccttctccggttgccttcccgggccccttacactccacagtcccggtcccgccatgtcccagaaacaagaagaagagaaccctgcggaggagaccggcgaggagaagcaggtgaagtggaaggggtgcgggcgggcgagctggggagaccgtgatggggcgggagacggtctcccaccagtgcggattggtcgccatggtctcaggctccgcaggggttggccactttttgcgtcacgctgggtgagcttcaacacgacatgctgctttggcgctggttagttgggtcgtttgtcactcagtactgtactcttcctgattggccaataggcctaccgctcaaaccttggacgctgtgctataattggccgagcatggacgtggggcgggtggttggaaagacggtgaatggaaaggggatggctggtggtcttgggtgtgatgtgtgttattggtttgtagaggtaagtgacccagcaaccgggctggggcccgcagcctcaatccgcaaagataggggtcgaggtaaagacgtttaaaaaaaaaccagtattgggggaggggagaagtgtagttattataatggctagtttaaggcggcaactttctcaagagacctattttagtagctaaggatggtctattgctcaccttcagtgaggacccagcaatattgaagagggctagagttccaaacagaatcatggtaattaaacttggaaaagacgccgacagggtcgtgagaaagacacttctctcttcccctagacttccaaggcagggacttagtgcacctgcgattccgtgatggaaacactaacgccaaataaaccccttattggggtttgtatttgacttttaaaatttagtactgggttcaggtactcattaaatacacttggtgttatatctatgcgtaatttccaagagaaaggaatataattccactaaaaagagtcatacgttg

SEQ ID NO: 4528 - DNA, 6000 bp, Homo sapiens
acagccatataaaccatgaaccactacttttcttaaacctattttcagttagttctaccttttggggataacaaggtctacagacaatagattatggaattttaaagctgagtgatcttagaaatcatcttttttatctcactattttacggatgaggaaattgtgtttatgatttgttgtgaaaagtactgtgactttcccttacttgccttcaaatgacctcatccaggtttcaagtttagtcagttcgattaatctttactaagcatctattgtaagcggctcttcggaagagctgcagtacagctgtgaagaagacatcatccctgccctcaaggaggtcatggtctatgggcaaaggacacatatggagataacagctgtgttgctccgtagaggccctgttagcacagggcactgaaaatacagaaggagctcctgatttgggtttggggagttcaggggaagcttctcagaaagaagacctttgagccatgtcttgaaaggcaaagagaaatgtgttagatggaaatctgggggaagggcatgccaggcagagggcatggagatgtgaaatagcatgacttacgggagagctacaataggtcggtgatgctggggcttaaggaggaaggtggtgaggaatgagcctggaaaggagggcagaaaccgagtgccagtacacttgatgtggagccagtatggccaaaggccacccctactttccttgtctgctcttcctgtctctctgaggtaagaagctcctccacacccccgtttgcagactaaagaggcctaatttgtcagcctgtcatcttagggcagcataaggagttgctccccattccttaaggtgtggcttaagtcccaccacctccaggaagccacccttgacaaccctctgccttcaatgaactctactgtctcgcccacactttgggatctgcattgctgttttttgtcaccccatgtaagtataacttgtctctacagtgagactttaagttcctgagggttgggtgtgtgagtcacatggtaatgtttaataaacaccagtaagaatgaatcctttaaatttgggtttcaggacatatggcgagggtttgtcaaaaggttggacaggcctgggtttgattccagctttatggctagttactaattagtaactctgggcaagttttaaaatctttttaatgcctcagttttttcatctataaaatgggtgatggcctcaactcacaggctgctgtgaagacatggttgtggctgggggccaagggaagcattgggggcttttcaacagtggggctttggacaggcagcaacagcgggaagacgcctgagtgcggtgcatctggagggcaacgtggaaaacctgacatgatcaggccctgtggttgagagctcccagctgattcactaacctgtcggtgcttgacagttacaaagtacttggccggtgctctcattggactaaggaaattgaaggcctgagaacataagcaactggtcacaaagtgggcgagtggcaaagcttgtgctggtgagaaggaaggcagagggtggagcgcacagcctgtatgtaatgatataggaggcagtaatatgctgataaatgttgaacagccaggaaagatttagcaagcggcttccaggaaaacataagctctaatttacagtgttagccgatttctgtggtgtaaatactctgatcatggctgatttcaagctgctaatgtgacatcactgtggagttaggaagagatgtgtatggatgatcagaaggtcatcttgcctgtggtcacacagccatccctgcagcagagaacggttccagcctgggcagtctgacacttgagcccaagctctaaacatgacattgtcctcctcctcctgttcatgacaggatagctgtaacaaggggcatgagctggctccgtggcatcagctgtcaagttccagcccatttccagataaccactgatctttggtgctggcatagttagggctctacccaagctatctttcatccttatccatgatggcaggacgtgctctgataggccccatttggatcccattggcacagccagaagaactggaggcaagaggctggccagaaaggttagctgaggcagaaggcagctcatgggggtagagtgagcataggaatacccaggcctggagcctgttctccaaaattgatttttcacagcccagaaaactgtatccaacactaaaaaaccaacacgaacagcacatttttgctactaacaacatattcatgataatttattagaggatcattaaacctaagtatgcgatctggagccttgaaccaagcaggtggctctgtctgcggatggaggagagggagggaaatcaagaatacagaagggaagggcagggaaggcagaggatgctgaaggggttgggggtgggttctagagggcttggtcatgggaaaacacatgagaccccaggcttgcatctgaggcctggtactgtgacttctagtgtgtgtgtgtgtgtgtgtgtgtgtgtgtgtgtgtgtgtgtgtgtgtgtgttggcaggggtaggggaaatgattatgtcattgatatcaagattattattttatatatatatatatttagagacagggtaacactctgtcgcccaggttgaagtgcagtggcgctatcacagctcactgcagcctcaaactcttgggctcaagcagtcctcctccctcagcctcctgggtagctggactacaggcactcgccaccatgtccagctaatttaaaaaattttgtagagtctgggtcttgctatgttgtccaggctggtctcgaactcctgacttcaatcaaccctcctgccttgggctcccaaagtgctgggattataggcatgagccaccatgcctggccagaatcaagattattgtgcaagagtaattgtcacgtatctggggtcgtggcttgtattacaagtaatatttagctctcaatcatcagggttaatgggggattggagaggtgagaactgatatacagaggggactctgggctcattttgggggggctctgtccctccctgatctggacacttgctgcttaccagtcaggaatgctgttttaggagcttcctatgtgtatatgtgtgcatgtgtgcatgcatgggctagtgtgtgcacacaaccatgtacacatgtgcacatatgtccacctgcttacatgttttctggatgtgtgtctgtgtatgtgtgcatggatctcctaccctttcctcttcccatcgagggagggagctggacagaggccaaagggtgatggggaatcaagagccagagaggaagaggcctgccttttaaaaccccaggtgttctggggaattccctcatggtgacttcctttctgattcctaaggctgctgtggttagaaatgaaaatgaattcagctctggtcccatcctttggaaccccctctgcacacagtgggggcttaataaatacttgatgatgatggttctgaacctgggaagccagcagctgttcctagttctgactctcagagccccatggggcaaatcaggcagggaatgaccatgggggaatcttcagtcttcctgccagatccccctgtgactacacacccagctgttagggaaggggctggagccatggtccacttcacacaccctgctttggagaggccagttcttcctcagcagcttctcttttgttttccccaactaacatttgaacaatatttattgaacaaccactttgtactgaatatcatagtggaaatgcatcctgggagaaagtatctgatctgtggggtcagactgactaagttcaaatcccagcatctttaattacaagcgggatgacatctgacaagttacatatctatgtttgagcgtttgagtgttttttccactttcctttctctccttcttctccttctccttcttcttcttcttcttccaattttcatctgtaaaaggagagtgatgacatcatttttgtggggttgatgtgagggttggaaataacagagaggaccctgaacacgaggcgtaggcactcagtcaatggtaggtgagtttatccaccgggtgttagaaggtgtggatcccccctgcttctgtgaccttgacgttgttactcaacacctctaagcatcaggctttgtaaatgagaccatactgcccacctccttgggtgtttggagactgtatccggataatatatgtgaaacaacctatcgtaaaccctggtggttaataaatgtttgccttcccctccgtctgccccctcatcagggtgcacacctcccctccttcggaggccctctgtccctcctccccatcgcccagcgtgagcgaacatcccttatcgccgtgggcttaagggttgtggccatacctgtcagaggaaagaggacagcggctcagctccggggtgggggagcaaaaactacagttcccagtcctcgctgcgccgccactggggccggagcccaggacgccaggcccctcctctggggaggagcctatgcggggggcggagctaggaggaggttggagagttaagccaagccaatgagaccagctgctaataagtgggcttggcttacaatgtaacagtggcaggaggaggcgagcgaagctattgagccagcgaggagtgaagctgagcctggcctcacacgctcctagaggaccacctcctgagagagttctttcaccccctcttctttctccaagctcccctcctgctctccctccctgcccaatacaatgcattcttgagtggcagcgtctggactccaggcagccccagagaaccgaagcaagccaaagagaggactggagccaagatactggtgggggagattggatgcctggctttctttgaggacatctttggagcgagggtggctttggggtgggggcttgtgctgcagggaatacagccaggccccaagatggacacttctgggcacttccatgactcgggggtgggggacttggatgaagaccccaagtgcccctgtccatcctctggggatgagcagcagcagcagcagcagcagcaacagcagcagcagccaccaccgccagcgccaccagcagccccccagcagcccctgggaccctcgctgcagcctcagcctccgcagcttcagcagcagcagcagcagcagcagcagcagcagcagcagcagccaccgcatcccctgtctcagctcgcccaactccagagccagcccgtccaccctggcctgctgcactcctctcccaccgctttcagggcccccccttcgtccaactccaccgccatcctccacccttcctccaggcaaggcagccagctcaatctcaatgaccacttgcttggccactctccaagttccacagctacaagtgggcctggcggaggcagccggcaccgacaggccagccccctggtgcaccggcgggacagcaaccccttcacggagatcgccatgagctcctgcaagtatagcggtggggtcatgaagcccctcagccgcctcagcgcctcccggaggaacctcatcgaggccgagactgagggccaacccctccagcttttcagccctagcaaccccccggagatcgtcatctcctcccgggaggacaaccatgcccaccagaccctgctccatcaccctaatgccacccacaaccaccagcatgccggcaccaccgccagcagcaccaccttccccaaagccaacaagcggaaaaaccaaaacattggctataagctgggacacaggagggccctgtttgaaaagagaaagcgactgagtgactatgctctgatttttgggatgtttggaattgttgttatggtgatagagaccgagctctcttggggtttgtactcaaaggtaggggctgtggtttctctttataccttgaacaaaaggaatatgtaggtagcaagagagggattgagagagggggattgtgaga

SEQ ID NO: 4529 - DNA, 6000 bp, Homo sapiens
gtggtcataggaatgaaaaagcacattgcaaacagatgaaagaaagggagacttgacagcatttgttggcttatttgacatgtccaggaatgggcccaaggcaacggtgaagagtaaaggtcacttgtagttttttattctaattgaccaggagtaacacagaactaaggaagtcacgagcacttccacctttggggaggaaggtactgagttcagtttggggcctgtcaagtcaagatggaaatcccctgcaagcaactagaaatatggagctccaaaaagagtgtaggattgaagatagagatttgggcatcactcagggacaatcgttggagctatgtaaatgacaaaggctcaaggggcaagacacagaaagagaacataaggctgaaccttgagtgttaaaagaagtagctgtagctttgggtgtataggggcagtggaagaagataaggctggaatggcaccaggtccaggttataataggccttctcttccagggaaaggaactcggactttacttatagatagttggcagttactgaaggttttaaaacttggaagtggtacggtcagatgtgtgtttcagagagatgtactttactggtgcttaattactttcaaataaagaaattcataatccaaagaattattagagtggaggaagactggaggcagggagagtagttagaaggctgctgcagtagccctggtgtattaggccattcttgcattgctataatgaaatacctgagataggccatggtggctcaagcctgtaatccagcattttgggaggctgaggtgggaggactgcttgagctcacaagttcaagaccatcctgatctacatagcgattcttcgtctctactgaaagttaaaaaaaaaaaaaaatagctgggtgtaatggtgaacacctgtagttccagctacgtttgaggttgaggcaggaagactacttcagcacaggagttcagggttgcagtgagctgtgatcacaccactgcactccagcctaggggacagagtgaaaccctgtctcaaaaaaaaaaaaaagattaaaaattaaaaaaaaaaaaacccagagagtgggtaatttataaagaaaaaaggtttaattggcacacagttctgcaggatttacaggaagcatggtgctgacatctgctcagcttctcaggagacctcaggaagcttttacttgtggtggaaggcaaagcaggagcaggcacatcacatggcaaaagcaggagcaagagagagttgatgatgggggatgttgccatatacttttaaacacccagatctcacgagaactcactatcatgaagatagcaccaagccgctgagggacctgcccccatgatcaaaacacctcccaccaggcccatgtccagcattggcattaaaatccagcatgaaatttgagcaggatcaaagatccaaactattattacctggtgagaggtaatggtgtcctagactacagcaatgatagtggaatagagaggaaggggacaatattgaggctatttagaatacagatgcattgattcaataagggagatgaggtgaggaagattgaagaatctaggatggctgccatgtttctggttgggtgatgatagtgtatctaccatggtagagaataaatggagaggagcactcttgtgagcaaggtgacatgttcgactttaaatatgttgagtttgaaatggatatccgggtgggctggacatattgacacatgggtggtagttgaagctaaatggatggataacatttttggaaaaataataagtgcacaataaatgtctgttaatgatccataaatcattacagtccctttgctttctcttctgtggtgttcttcatgtttattttggagttccaccagagcctccaagctaagcttgtccaacccaccgcctgtgggctgcatgcagcccaggacagctttgaatgaggcccaacacaaatttgtaaactttcttaaaacatcatgagggttttttttgtgattttttttttttaaagctcatcagctactgttagtgttagtgtattttatgtgtggcccaagacaattcttcttcttccaatgtggcccagggaaaccaaaaaattggacacccctgcctaagtcctctctgtctgtgaatgtcaagactgtggcccccttaaggatcttttggatgtcctattttttgaaacttaaaggtcttataccagtcttgcaggctggccctcagaccacctcaccacagcccctcatccatattgacttaggaagagagggcattcggagtgtgaagaagaaaaactggaagactgtttctttttctttttattttgtgttttgttttgttttgtttttggagacagagtctagctctgtcccccaggctggagtgcagtggcgtgatctcggctcactgcaacctctgcctcccaggttcaagcgattcacatgcctcagtctcccaagtagctgggattacaggcgcgtgccaccaggcccggctaatttttgtatttttagtagagatgggtttttgccatgttggccaggctggtctcaaactcctgacctcaggtgatccacccaccttggcctcccaaagtgctgggattacaggcatgagccacctggcctggcctgtttctagtacattgtctggtttctatttctctcctctctatgagtagagttctcaaaagtgtaacctatacttgctgacagtttctcactttctagtggtaacttgtaatctggttcccaccttgctcactcttctgaaattgctctcaaatgtcactagagactttgtcactgccaaacccaatgcctcttctctctgtacttgttggcactgttagaacctcctccttaacagtctctccttccttagctccatgacatctcactttctttgtctccttcctgcctgtctggtggattctctttcactctttgggggtccttcttcttcccatcccctaaacataggtgttcctcactctctgtgccaggctctcatttctctgtgcagtctttgttgggatctaccctgttctcatagcttcaactcacactgccctggcagcaatgacctcctttctctctctggttctgacccctctccacagcttccagctctgaactcatcacttcctcttcccccacctcagtctcctcaccaggtgtgatcccccccaggctcccctatgcccgtgaatgacctcgcagttctgatcacctgacttgagactctagtatgatctctgaagcttccctcttttgctcaacatgtcaagttggcttcaaacttttttcattttcttttgatttttctgtactccaattcattttctgtgttccacttttcaccattgccacgctgatttgggctgtcatctcttcatgcttatattattgcaattattttctatcgtctacttgcctactatatccacttggttcaaactattttgtcacctcccgattaattttcctaaaatgccatagctttctcctactccatccttcccaagaaccttcaattgctctccgtagcctacagaaactctggcctgaccacaaatcagcacaactctgtgtttcttccggatgttccccttaacacaaacactgcctatggtgcctaacctttagtcccgtccttccagcttctccaatgaggctatttgaatggacatttacttatcttatggcttttagtggttaaactaagctacattcctagtttctttcctttttttacctgaatttatagcaattcaatatggtaacactggttattgattagcagttaaatgtttatgatgatcagaaatgaggaaataattatattctttttaaataaatgctgggggtgggggtgaattaaaacctctcaacacatagattcagaaaattaaagaaatctttggtgatgaaagggttgagaaccatcaccctgcactctaatctagtaaatgggacagtttgatgctgtttcccaagtgaacttgtattttcacgtctccccaggactctgctacgttgttccctctgccttaaatgcaacagagtcctggggaccatctctcagcacctgaatcttctgcttcctttgggaccctaatcagatgttacctctttcctcccacatctgctaggagccctctgagtagaatgacctctcccttttacagccttcagtacctcccgcacttcgctgagggttccggccttatctttccttacagagaaagccgctgcaggtgggcaccgtgtgctgcgcgtctctcacccagcaccgcaccggggacttaggagacggtgaacaacacgggaattgtgcccaaagatacagtcctgtggctcagggagcccaggcctactccgccccaatctcacttccaggcgccgccttcggcgctgcctgcagggccactgggccggtcctgaattcatttccacttcgttaactcggtcccagtcccgccccccggctccagctctcgtaacccatcgctgacaggaccgcctcccttttcttccttctcccttcccctgtcaccctgccagctcagctcctatcgtttcgcatatcgtctcttcatctctctttctccccgggtctgtctgggtctctgtctttggatatttctctctgcgcctgcagctgtctgggtctccgcttccttgccccgcacgccccgccccctgcccaagaccctccaatctcggcggctcgagcctggcgctccactctcccattggtctgttcggagccccccgcccccgcctgcccggcccccctccgggcccctccattcacacaaagtttggctccggcgctgcggagggagggggcggcccggcccggcccagctctgcccccggccggcccgaccccggccccggcccccggacaagcccttatctgatcccagctccgggtttaagagtcctggcccggcccgtcgcacagctctgctcctaactcctgcccgccccgtccgtccatctgtcccgctgccccgcggcccatccaaggggccactccacctcggacccaaggtaagaccctggccctgatgaaggagttctgccgccccggccgggtcctgtccccctaactctccagagacatcggggtcccagatcctcagtccctaccctgcctggcctcagcggtaccaccgtcttgttcccctgcctcccgccttgggcagtcccaaatggagcctcctgggaagggctccccacgaggaaactagccaggctggtcacctcagccctttcatctaaggaaggggctttcccgatgccccctcccactgggcagaccagcagttgcatccctgctcctctagttaatacagtgacaaccacacataaccaggcaccccatacacaggcacaacagacagtgcgccctcctccccatatggacaggttactcccatccccagcccctcccccactccccatacagtgacaatcacatagtgacacccatgatcgctagttcccacatggggagaaaaacagatactggcagcttaaaccggggagccaccaaagcctggtgtgctccagacccctgcccacccaatctcttccttctattctgagtggctcccattttaagacatccctcctcatggcccctcaccctcaccccagctgtttcgcactgggatttccagaaggaaaggagcagggccacttctgctagagtgagaagggcagattgggttctataaactcaccctccagatggagacgccccttcccattccattcctcctctcatcagaactaacccagggcacctgtgttagggaacagatgaaggatggaacttcctgatttgggggaggagagctgaacccaggaatgggtagaaggacaacactgggaaaaagtgagggtgggttctggtgtcttgaagtttaattccagtgagtgccccaggcagggtgag

SEQ ID NO: 4530 - DNA, 6000 bp, Homo sapiens
caggagtgtgttccagattagggagggattcctggattcttacttcaaagatttctaaattagaccaaggcatttctggagaccccttagtataaaataaacctattttccctctttattaatctttcaatccttatcctcaaactttttatagcttttgatatatttgctgatgctatttttaaactccttgtgttggtacttttatgtcaattatgattcctctactctcttaaaactgcttttctaactccttcaccagttcctcttcttcctcttgcccccagttgtgagaatttctcaaaattcaatcctaacctttggtaaagcaatctgtaattctctattccatgaccttccctgtcaccagtattatgaagaatgagtctttccctctttagggcacccatagtgctaatagcctcatactgtattctacttaattgttcacaggtttgtccttctgtgtgaattgtaagctttttgagggtagggattttgttttgttctttttttatacctaaaaagtccataaaacagtaagttagtaaataactgaatgaattatcttttagtaataccttatacatagaactcattacctcttcattaatttatagagcttgtgcacctttataaaaatgactcccaacacttatctccatatcttgccccattttaactcctactcctctagcagataagccacacatacatccaacatctctacgcctaatttctcctctgaccttctattttctaagccttcacattgaatgtcattttactttctggcatgtgaaccaagtgattacaacagattcctggatctcatgtcaaagattcctttgatgtgagaatctgaacatttatttatatctatagatttacaattttagtccattttgagagttatagtatctcttgttacatattgttacattgaattatagatctattcataggcaactttaaatgcccgtaggctttgagtttgagctgttacataggtagctgcatggctttttctgaacatccacaaagtaattactattcaaagtgcatactaataaatcaatgaagcctccacattatttgggaagtagtcaatcaaaggctaaattcaatgttatgataacttttaggcagtagttctttagacttctgtatttaattgaacagaaaaaatgtaaaaaaaggggaggagattgataggacatcattaataaaacaactactatctactatcactatcatttaacaaaagacattttaacaccagaaaagggaagagatctcagtgtagggctctaccctttaagttaaataaattaagttttattatagacctttatgttgtatttatttttcttattttgtcatatatgatggaacttttgtcatgaatcagaactggcctgtggtccagcctttgagaactactgctctggactaagtagattgctatttagattaacatgatgcccccagattgtaaaggactgacacttgcccccatgttcaatctaatatgtggtagattgtattttccaggatggccacatctcccttcccacatgctcttcttacaatatggtcatgacattcctcacgtagagagatgtgtctctgttctttcctcttgaatctgggcaggctcgtcactacagtggaagtgattccatgtgatttctgaggctagatcataaaaggtgatgaggcctctgcctaactaggggaaatgctttctcttgagatgctcactcttgaccagcctatagagagatccacagggaggaactgaggccccagcccacagccttggttgagctccagcctgcagtcatccccaacttgccagccatatgagtgggccatcttagaagcagatcctccagtcaagccagcccagctgatgctgtgtggagtggagacaagccttctgtgctgagccatgcaaaaaattgcagatttgtgaacgaaataaatgattgttattgttttaagctactcagttatgtatttgttacttaacaatatataattcacaaattgtataacttggaagtgagaaattgacataacaaaacctaaaatacatggcattgtctttgggactagatggtagaggacagaaaggcctggaggagggtgtgggtgaaagctacaggctttcaagtacaatattagcagaagcgctagggccttctaggaggctattggtgagtttatagtaaagagaggaagatgttattggaagctggagaaacccttgttaggagttggtgggtaagtttggccacattttgtctaaggaatgaattcgatgaccctgctaaggatatttccagactgagtatggcttctactaaatgagaggagagagagaaactgagaaggagcatttcagctttcaaataaattttaggatttagaagatatgaaaagagccagtgctcactggctttgaaaataaaattgcttttcaatcctatcctttctagatggcaaaaagttctccacctaaggaatggtttctgggaaaaagataaaatccatggtggaattataaagtcatttgttaagaattcagaaatatctaaggtggtgcctcatagaacctttcagactttaggtgggctttctccatgcagctgggaaggtggcctccagctgctctgaggggtcttcatcacaactaaacctaagtggagagagaacagctgtctcccaataatggaatataccaacctagggagccatctaattggtgttgtctgagtccatgcccactcctgaaccaattataatgttaggaggatgggaaactgactaacccccctgtgttttgtgtctatctcaattaaatagtattgtctcttttcagaagatggagttgggagaaaacactgggcagcctctcagcgctcaactccccaaactgaccagaatctccttcagctggatttataaaaaatggtgaaatataactttattattgcttttttttaaaaaaaaagctccatgggaaaggataaaaaatttgatcacctctatattttagttattgctttctttagctttcagaactatgtgtaagctaactgactttatggattttctccaacttttcctgaagtatgaggatttttctaaaggccatggggaatctgaacttcgaaacttaaattcaacctacaggagtcttagctgcagggcttaggtgaaccgagtgagcctgaggggacagcagtaggatgggaactaggcagaacctggaagggcattactcaaactgagtagtgctgagatcagtttgactaaggagagagtcaaacttaattttgagaggaatcaaggtgacagccagtatagataaggtgaagatccgaacgggagggtagtgaacttggtaatgaggtgagttaagtaaaggcagaagagggaagagtaaggaatgggtctcttaggagagggcctgtgaataagccaattactttttaacatagtccttggcattatagtagggatgagctcagtggcttaaaagaaccacatcagtttgtacaaaaaaggaagtcataaagaatattttaggagctagtatgtgggcaccaatgttgcttgtcacagtcatagagctgttgattagaattgtgtttagtctgaagtaggaattgagactcacttgccagaggtttcttgatacatagtgaaggtgtaatcttactgctgtgatgttctccttggtgccctcaagaagatgatgtgcagcaaccttggtgaatgtggtataggaatgagagagtagaatttgtcacaaaacaactcttccttgaaagtaacccaccaattgatgattattgttcatttgtttaatatttatactgtatttgtttttagtaattatatttgaggcaagaagtatataagttaggcatcatggaatttgggatgcatttgtcctcccatgaagaatgggtaacattgtttcttcaaattgaggactggaaaccaatgatggataggagttaggaaaatgggagtgagaaacattgaaaaggaaggagaggtagaaaaataaaatgaaacagtatgactgaaaaagaattagagaggagacaagactgtgttgaagagggttagggctgagccagatggtgttggcataagaaatatagagtatatatcaaaaatatagaaggagattctgtctacattaatatctttgactatttcagctattatgttgttttgggacaatcaaagatgggagagaccgaacagagtgagttcaggaaaggtctttattaaaaggtgatcacctggctcagtaggactagcgtccaggaaagtctgagccctggacaaagaaagcagccaccttttaagcagtcagtggccaggagctacgtgatgcaggaagcgtacttacaagagcgagaacaaaggcagttgatcagtcttttacatttatctatgctacgtgttccacatccctgggaaaccatgtttctgtattaaccttgtaactttgcagctgcgctagggaggtgaaacaggaactccctgagcctcaaggaatgtgaaactagcaagtacagataaggcttgctgagcacagaaggaaaaacacgctgttagtattcttctctaacttagactacaggggagctacactacacttagcttttgaagggaaaagtaaaaatttttggttgtctttgattatacttgtaaaattcatgaattcattctacaatgtcagcaaaaaaaaaaaaaatcagttaaaacagttgtgggtacttacgtaacttgagtgttaaaaaatgaaagcttcccaagaactagatcacttggcttcttctggattgggggtggggataatgtaggcagccaatcagaacgaaagcaggctggcaagaaaccaatgagaagtaggcatggaaatggattttggtgtgatatcagttggtagtactgtccctggcaaacagacgcataactgtgcattgttctttgggattttgagagccttcatctcaatttcaactttaaagcagcttaatctttaaggaacatatctctgatctgggtaatttgtagaacttaatttgagggtcattacatgtgaggatagcaggagttgaagatgccaaggacctgaagggctactggagggacaggtgaagtgatttgaagatgtagcattttgaatctctttctggcccatcctctgcttcacaccagaatcattgtgacctgtagacctgcaaaacaaaggaccaaaggtaagccttaaatattattggagatacttgaggaacctctaggatttttagattaaggctagctgcaaggaaaaataaaacagaacaaatctttctcaggaccactgcatagatttgcacaggttacatcctacacagagcaccagctgaggtgagatactggggctgaaatccagcctggtagtcacatgccaagccatgtgccttgttgacaggcttcattgctctgaggaagggggcctttttctaattcactcaaaggcatcatatgatcaaaccttggtcttttcctttattttcaggttattcacccttatcctcacccccaaccttaactggtgtgactcaactttgactttgtttcccatttgccatcttttattggaagggtgctgagagaagaaaaagatatattagggctggagtggtaaaatggaattccagaatgatttataccaacagagaagggggagcataacatttatccatgctccttccccctcaaatagttcagcccatcaaatatttttggacagcctatctcgtgccacatgctatgtgcacagccttaaggaaagttcgggccctggcctttgagaaactcactgtccaatggggaaagcaagcacattactatatcattacaatggtaagtgcacctatcaatgcaccccctctcccatatacatgtaacagtacagggagtaaa

SEQ ID NO: 4531 - DNA, 6000 bp, Homo sapiens
cattcaggacattttacaaagttcttttttcttagtgtggggcaatctcctctgttgctctaacttacactagatgttgattagaagatttaagaacatcagtgagtaagatacaaaattgcaatgttcagaactaagtttaaaattgtttccaaaaagcaaatctcaagtcatagtagaataaaacatagagaaaggaaaggctctatgaggtaggcaattaaaagagcacagtgaaaaagggaaacaaaggtaaaaagagtgaaagaggaaaatacattttaacagcaggaaatgacatgacatgacaagaaaaaaacgaatgaaagagtagaaagacagatgggagaaacagaagtcaaaattaacgacaaaaaagaaaaagtacacctacagaagactgaaaaaaaaatacaaggagcaaaatgatcttccaattataaatgtgtttcaatgcccaaatattgctatattttaaaaaatgccagaatagctgtattagtctgttttcatgctgttgataaagacatacctgagactgggaagaaaaagaggtttaactgggcttacattccacatggctggggagacctcagaatcatggagggaggtgaaagacacttacatggcacttacatggcacttacatgacagtggcaagagaaaatgaggaggatgcaaaaggggaaacccctgataaaaccatcagatctcatgagacttatttgctaccatgagaacagtatgggggaaactgcccccaggatttaaattatctcttactaagtccctctcacaacacatgggaattataggagtacaattcaagatgagatttgggtggggacacggagccaaaccatatcattccacccctggcccctccaaatcttatgtcctcacatttcaaaaccaatcatgctttcccaacagtcccccgaagtcttaactcatttcagcattaacccaaaagcccacagtccaaggtctcatctgagacaaagcaagtcccttccacctatgagcctgtaaaatcaaaagcaagctagttacttcctagatacaatggggtacatgtattgggtaaatacacccgtttctaaatgggagaaagctgccaaggtttggggtttgcaccctctgaaacaatcagctgagctgtacgttggccccttttggcaatggctggagcagctgggatgcagggcaccaagtccctaggctgcatacagaatggggaccctaggcctggcctatgaaaccatttttccctcccaggtttccaggtctgtgatgggcagggctgccatggagacctatgacatgtcctggagacatttttccctttgtcttggggattaacatttgactccttgttacttatgcaaattcctgcagccagcttgaacttttcctcaaaaaacgggtttttcttttctactgcattgtcaggctgcaaattttctgaacttttatactctgtttcctttttaaaattgaatgcctttaacagcacccaagtcacctttcaaatgctttgctacttagaaatttcttctgccagataccctaaaatcatctctctcaaattcatagttccacaaatctctagggcggggcaaaatgccgccagtctttttgctaaaacataacaagagtcacctttactccagttcccaacaagttcctcatctccatctgagaccacctcagcttggacttgattgttcatgtcattatcagcaattctgtcaaagccatttaacaagtctctaggagattccaaacttttccacattttcctctctttttctgagctctccaaagtgttccaatctctgactgatacccagttccaaagtcgcttccatatttttgggtatcttttcagcaatgcccactctactggtaccaatttactgtatttgtctattttcacgctgctgataaagacatgcccgagactgggaagaaaaagaggtttaactggacttacagttgttccacatggctgaggaggcctcagaatcatgatgagaggctaaaggtccttcttacatggcggtggcaagagaaaatgaggagcatgcaaaagcggcaacccttgataaaactatcagatcccacgagacttattcactatcatgagaacagtacggcgtatattactgccttgattcaaattgtctcccaccgggtccctcctgcaacccatgggaattataggagtacaattcaagatgagatttgggtgggaacacagagccaaaccatatcaatagcatttcctataatacattattcttctaattttcttaagtttatagtaaaaaaaattcacttggacaatttcaagacacaccagagaatcaaaatatcatcaatgtggtagtttccaattggttgccctgagcacattactttgtatagtttgtatccataatggcacacagtattagctgagtaggttttttcttatttatttatttttaatgtactatttgttctctcctaaacttttatctgagtatttggaagccaaatgactaagattttcacaaaaggtaaaatagaggcacatagctttcttttaagtaaaatgttactttaccctctaacctccagcatcccaggactaacaatcgattgctattttttttcttttttcagtgtcttgatttttagtctgttaatgatatgtaaatatttcagattttctgtcatccaaataatacagttagactgtaactataaatattaacttggaacattacaaataaaattaatagaatcattttaataggagatgataaggtctaaaatataaaccagatctctctctctatctctatctgtataaactaataatgtagcaatattactttcttatttagcaaagtaattacaaaagttcgtgctaaattatgatttcataaacaaacacataccacaggagtgcaagcatggatggaaaaaaacatgcttaatttcctagatttaatagcttttaatgcaactccacacctatttgttgaaatgtggctattttgaaggtcccgtgctagaggcagctaagccacagggagaggggaagagttgaaagaaaaacgcacagataatcgtatagcgggtcaggttatagtaagcattccaggcaaaatactcacatgggttatgaagggttcaaacaaaggggttcaaaggaagaagacatcataagaagctggaaaaaccaagaaatctaatggaggatatgtaatttgagatgggtctggaaggatgagtaggattttgaagacagagacaaacagtatgacttttatttcaactgctattcttcaggtttcagtagtcattgtatttcatttgatgttacaagttttggtaatttcttccttcatttctagcttcttaaataaaccctctgctacatgacctctactgagcattaatcatgccaaattaatcactattttctggataagccaaatattctaaaaaatccctatgcctctactcatactattctctctgcttgcttcacctttgctcttttccctaaagtaggctgcgaacgaatatagaaggcttggttcattttcaatgtcttccttgacccccacctcgaagaagtatgtgtacctcacaggtatttccaaatccctctgtatgttctttgattattgtctctcacatcgtatccatttatcaaggaacaagcttgttcctccacacagagcggttcttaagtaagggcaggagaagccatatggttatcctccggcccaggctgtcaggtggttggtattcggtctgtatatactctgatgcaatcagtttttgaaggaaagaacggtaagcgcaaatagaaccatagcttgtgtagcagggttcatgtaagcagtggttcttactgaaaaacagaccctgttctctcgggctcacttcttcctccgtgtgaaccactaataggaggggaccgaaggctgaggccaggccacctggaagcccacaacgctgctagtagcagcgacagcagtaacagcaactcaccactgtaaaatcctcagtgcgtttccatgtgctttccctgtcatctaaatgcttctcttcagcggcctaaggtggcccttctttttccccgagttcagggaaacacctcccttctttcagaatgtgagaaaaaaatgggattttcctggggctgagagtggggattccctttccagaaacgtgcaattttttcatcccgcccacctggactgaaggcaatcaaagcgagggagctcgtggcatagtggaacactccaagcaccctggcccccctcctcccagagaagggtctggagccccgcaatccgctaattagctcgcccccattggttgtccccaaggcacccccgtgccgtcactgtgctatgctaatgagggggagtctcattggctgggcctccagctccatctccacagggagattgcggggagagccgggttggccgcgtctggggccgaaacccaccgcccccgattcccgccagctcagggctgtgccggatgcaagcccgcccgagggaacagtagccgggaggctgccctctgggaggatctggcaactgcctttaaggaaagtgcttcaccatcaagcggcgctcactcccacccctctcccctctttctaggcaccgcgcgtctttttcggcgaagtaactttttatacccgcctccccctagtcctggggaccagaggcggtgccgagcctgggggcggttccttggcagcgttgattcttgtcagagccagacttttgctcctgggttgggtttgcatcatccccattacaccctcgggaaagaggagccagccccctttcaagccttagcttccggctccaagcggaccccctccccctccctgtccccttccccttctcccatccctctctcggccacagcgtcttgttagtcctctccctgtactccgcaatattttctttctttctccctcctctcctccatttgttgtttgatgtttcccactctttgaggaaggatggttgatttggagagcgaagtgccccctctgcctcccaggtacaggtttcgagatttgctgctaggggaccaaggatggcaaaacgacgacaggtgagtggtgtggtggaggattgttctgtaaatattgctgaaaaagagacggaaatgggagggccgaagtggggaaaggagggagaaaaggaaaacggagccagagagggagactaggctgggggagggagtaaaagagactctgatttgtctctccattttgactctatataactgttgctatagataaggaactctttttctttacacttttcttattcttgcaaggtatttattgcattcatttggtgcttattcttttgtctatctgtgcttttctaggatgtgtataaggctggtatcagaggtacaatacacccaaatggtatgcaatatcatttccagaaaatttgcattttttccttaggtgtggttaatcaaactcaaaattgcatgcaagttgtttgaaaaagcacattagaaacttaaaatctcctgagtctatttacctcctccttgtctgtgttgtcttgagtaggtatctacttggcactggaaattttatgctgtttaaacattttggagttttaagtagacaattggtttaaatatgtaacaggtagttagtgaaaatgacaacctttttaatacaatatactcactttgaacaggtgactctgaccattatgaataatgatgtttgtataacatgatacaaccttttcataactagtatatttttttaactgaaacagaatatatgtctcaaaattaaaattaagtttcaaaactagaatatttattgttagcaaaatattgttcatgtgttttatttatagcattactgctttgcacaaacttctgaaattcctctgtctatttctgtctcaagcacattttgtatttcagcgaatt

SEQ ID NO: 4532 - DNA, 6000 bp, Homo sapiens
atgtgaatttgtcctgaattctcagacatttggtttcactcttttttttttaatggagtcttgctctgtcatccaggctggaatgcagtggcatgatcttggttcactgcaccctccacctcccaggttcaggcgattcttctgtctcagcctcccaattagctgggattacaggcacccaccattccacccagctagtttttgtatttttagtagagacagggtttcatcatgttggccaggctggtctcgaactcctgtcctcaagtgatctgcccacctcagcctcccaaagtgctgggactacaggcgtgagccaccatgcccggcctggtttcacttttgagagcatacctaagtctccatgacgcttagaatcattgttgatttttcttggtcctcatttagtgtggaggacaaagctagctggaaacagactcagggcctgcaaaaaggacagaggtgagagggtgcagaaggagacattctcgggaatctgagtttgccaccacctcctcctgtcagggagagagctagctcctttctgtctcttggagaggccgtgcccagtggccaaggtgtcatgctgcccatcactcactcactcgctaagtcctgatcatcttttatgaagagggaaaaaataatagagtagtgtgataagtgctaagatggcacttatggaacactgtagacacacacaagaggggggagtgcgatcagagaggcttcctagacaaaatggcacctaacttggatctgataaccacatgcaatgaagcttggtggcacctaaactcaacacacaccaattatttctgaaataacaacttcctaaagcctatgaaaggctacgtgtaatcagtcccaccctgacaaacccagctttctgcctaatcctctctctgttattccacatgtatttgtggagcatctaatactcaacaggggctgggctaggctcagggcatacaggtgaaagaatagacagctccattaggtgccatggagaaacccagggtggggtgagagggtgtatcccagaccacagggactggggcagggaaggctttgatgactgtctctgccaggcagagggctttgaatggaccagcaacacctaccttgttatcaaagaggcattcctttccataaagagttggcttccctcattggctgatggctgctgctgctaatccaataagcagtctcagacccgcttctagatgtaagaccccggaagggatcagtgatgagacttaatcccccagtctcaagggacatgacaaaactgggcatttttataagctatgacctttaggaggtgttttttgcatatattttttcacatttgattctcatatcttattaatttcctgtcaaggatgtttcccttgcccttccgttatggaaaccacgactcagagtggtcacccgactattaaggagtggacacaagattttaacccagatctgtgccccttcagtagccaaccgcctctcctcatgaggcttacaatcccgtttgcgggtggggatgatacaaagaagcccataatacaggtctttcctaactgatatgttcactctcctctcctcttctttagaaatgttcccggggactccctccactgagctggcgcactcctaacagcagccatcagtttggggaccccggacagcccggggatcccgaaggccgcgaggaccaaggaccaggcgctggggtgggtgtggaggacatggagcccgtggtttaggcctgaggtgcccatgttgggtggcagcaagaggcagggtgggcgggtctgtggccatgcccatgggtgctgcggaacggggtgcgggccctcagagttccgcggcgccatgggctggctctgagaaggcgtgcaccgacctcctgagaggggccacacttgtctagggcgatggctcttgttagggagtcattggaagccaccctaaagggcgaaaagaggccctagcaagtcctggtacccaagagctgctgctagcgatgtgacttgccccactggtggagacggtgcagaccccaagccggggccattcggtggaggcctcgctctgggtccagctccacgcggcaccatgaacaataacttctgccgggctctggtggaccggaggcctctggggccccccagctgcatgcagctgggcgtcatgccccctccccggcaggcgcccctgccccccgccgagcccctgggcaacgtgcccttcctgctgtacccgggcccagcagagccgccctactacgacgcctatgcgggggtgttcccctacgtgcccttccccggcgccttcggggtctacgaataccccttcgagccagccttcatccagaagcgcaacgagcgcgagaggcagcgagtcaagtgcgtcaacgagggctacgctcgcctccgcggccacctccccggcgccctggctgagaagcgactcagcaaggtggagacgctgcgcgccgccatccgctacataaagtacctgcaagagctgctgagctcggcccccgacggctcgacgccccccgcttcccgcggcctcccgggcaccgggccctgccccgcgccgcccgccaccccccgtcccgaccgccctggcgacggcgaggcccgggcgccctcctccctggtgccggagtcatccgagtcctcctgcttctccccgtcgcctttcttggagtcggaggaatcctggcattgatcgggcctgtggccgcccccggcttggaggatgatccgccggccccgtcccactttcgggagcagcgggaggctgttgggtcacccgcgatgcgccgcaggacggtgactgtaggaggtccgcggcgctcccgtgtctgcgacaccctccctcctccaccagcttggggcggaagtgcagggcagcgggtacgatgggcacgatagagacctaggagctccgtgggtgaagcgaggggcagggcctgggactgctccgggcgtcctgcgtcccctccggggtgcagaggggctccccaggacggtcatccctgggtctggctcccgctcggcctcaggtggctctgctccgtccttccttgccgcaggcgcagtccagtctctgcgagtccccgggatgcgagcccgactttgagccctcggttaccatgccactgctctccaccagatggcctcagatactagcgacttctttgggagcacgcttactcctcgagaaaggaacccagaggaagggatgggaggccagattgctgctggcgctcagcccagaccgaacctacagactcagcagaggcgacctgtgtgccccggtggcgttctctggcttcctgggttgggagggggggttactccctccccgcatcccccccatgaggtcgtctagttttgtcccaggttgggtggggactgtggtttttttccctcagactgtaagccttgggggaggggggcgtgcatataggtacataggcactgcgtcggcaccaaagagctaaataaaaggattgttgaattttctcattcctagatcattgtctaccctcacccttcctggtgcccctttcttattctcactcccagcccagagtacttgctgggaggatatgtggggttcgctgttagctcagcacatttaagattcagtgttgttagctcaggcgttcaatgaatttttttttttttttttttttttttgagacaggttttgctctgttgcccagactggagtgcagtgattcaatccctgctcactgcaacctccttctcctgggtttgagcaattctcctgcctcagcctccagagtagctgggattataggtgcacaccaccacgcccgctaatctttggtatttttagtagaatgcgggtttcaccatgttggccatgctggtctcgaattcctcacctcaagttatctacctaccttggtttcccaaagtgctgggattaccgtggctatcctcaatgaacttttctttttgagacaaggtctcactctgtctcactctgtcatccaggctggagtgcagtggccagatcttggctcattgcagcctcaacctcccaggctcaactgatcctcccaccttggcccccctagtagctgggactacaaacacacaccaccataccctgctaatttttgtattttttgtagagacagagtttcactacgttgccccgactggtcttgaagtcctgagctcaagccattctcccacctcagcctcccaaagtgttgggattacaggcgtgagccaccatgcctggcctcagtgaacatttacagggagcatagtacatagggggactgtgcagagaaggggccagagtcccagagataatgcacacaacctttacacctgtagggatgggaggagatggggaagaaagatacacagcagatgctccacagtgaggcaggtgctatgccagaggtgtgcacactcagggttgttctgggagccttctagcccactggagaggggtttactgtttctctgacatgggattgcttgtgggggtgggttgagggtatgcttggggagttttggctgatggtgcagatactgagatgggtaggggctgctgtggagctgtcctgacttaggctgcccagtgccttctccagacaatgtcatggggctgaggaggggtaagcctaattttggcatgagggggccactctgcagtttgaggttccatatccaaggctacctattcctgacctctgttgccccaggcttgaaaccttccatcctgtctccctctcccactgcccctgccccatcccaggcctgtgtgtaagttcttcccccgacccaccccaccctcctcaggggacagattgggaagtcactggctgggctgggtggaatgacagctgcctggcctcagaagctcaggcccggcagcggggagccgagtggaggctaattttacttgctgggagcgaggagagtaatcctcctgcccccactcctgcccccgccccctggctggctcagcagggcaggctcagccgacagcctcagccagcctagtccccaaggcgggggcattggggacacagggaagggaaagcactggggtgggggagcaggagaaagccagattcccagggaagccatggagccatcctcaccccaggatgaaggcctgaggaagaaacagcccaagaagccagttcctgagattctgccaaggccaccccgggccttgttctgcctgaccctggagaaccccctgaggaaggcctgcatcagcattgtagaatggaagtatccttcagggcccgggccgtgggggggggtgtgcgtcatgagggagggattcggggtgatcacagagcacaaacttcctacaggagggccagggaggcctggcacttagacatggggtgaactcacagaattgagtgaggagctgggggaaggagccctcggctaagcaggagaggaggaggaggaagaggaggaagacgaggagggtgggggaggaggaggaagaggaggagggtgggggaggaggaggaagaggaggaggaggaagaggaagagaaggaggacttggtggggcttcctgggcctgagtgggccacccaagtcctggatgacaaccagagatgcctactgaccacctatgggtggggcctgtttcatggggactgttcccatgtgtgcccaaatccacattatcatggggtgccactaggtttttgaagcaccagcctcattttagaataggatagggaccaaaaaaagatgcgatggcctctttgagaaaactctcccttgtttgggttgggtggggggtgacagtggacagaggtgagctgaaggaaggcttcctctgggggcaggtcccagctgaggacagagccaaggggagaaatggatctgaaagacacctggtctcagtggctccaagacacaggccaaacaagcctggttgttctagctcagacgtgccaccctggggaca

SEQ ID NO: 4533 - DNA, 6000 bp, Homo sapiens
ctgcaacctccccctcccaggtccaagtgattctccggcctcagcttcccaagtagctgggattacaggcatgtgctaccacacctggctaatttttgtatttttcagtagagacggggttttgccatgttggccaggctggtctccaattcctgatctcaggtgatctacctgcctcggcctcccaaagttctgggattacaggtgtgagtccccatgcctggccttcagctgggtttagagttttacaatgcttatgccaagttttgaccccttataaatcaataaatgcaaacaaaaatgtatgctgacagtttttaagacactccttatattactttaccaatacttttggccgggcacggtggctcacgcctgtaatcccagcactttgggaggccgaggcaggtacatcacgaggtcaggagatggagaccgtcctggctaacatggtgaaaccccgtctctactaaaatatacaaaaaattagccgggcgtggtagcgggcgcctgtagtcccagctactcgggaggctgaggcaggagaatggcctgaacccagaaggcagagcttgcagtgagcccagatcgcaccaccgcactccagcctgggggacagagcgagactccgtctcaaaaaaaaaaaaattttttacttaagtcacatgaaatttgttattatgtactaaatgtatgcatactccttaagccactttgataccttgtggccacaaaacatgtatcagaatccacgcacgtacacataaacacatctaaacacacatatacactcatccaaaaaccctacagcttttgctttacacctctaaccatgacatatcaacacaaagtcactagttagaaaaacaataacagaaagaaacatctagatgcaaactgtggatgtcatctcagtagaaaagtaacagctggtcaggcacggtggctcacaactgtaatcccagcactttgggaggccaaggtgagtggattgcctcaggccaggagttcaagaccagcctggccaacatggtgaaaccacgtctctactaaatttacaaaaactagccaggcgtggtggcgcacacctgtaatcctggctacttggaaggctgaggcaggagaatcgtttgaacccaggaggcagagtttgcagtgcgccgagatcgcacccctgcactctagcctgggcaacacagtgagactctacctaaaaaaaacaaaaagtgtaacagcagctttaaggcaggcagcaaaggaaacagagagatagagaacttaggaactctatagttcttttttttttttttttttgaaacagagttttgttcttgcagccctggctggggtgcaatggcacgatctcagctcactgcaacctccgccttctagattcaagctattctcctgcctaagcctcccaagtagctgggattacaggtgcatgccaccacgctcggctcatttttgtatttttagtagtgatggggtttcactctgtcggtcaggctggtctcgaactcctgacctcaggtgatccgcccgccttggcctccaaaagtgctgggattacaggcgtgagccactgcgcctggccaggaactctatggttctgtagttgcaggctgacctttgggctctgaatttttcctggatggaatttgcccatcagtttaaaatgtgccccaaaagaccataatatggaaccagctggggcactaggaaacccagcatgcccgcgacatgttcagttttataccaacacttgcaggtagaggcgcctgaaaccagcggggtgcctggaaggaggtcgccctcttgtctttgctgaggcttacattatttatttcccacttttttttttcttgaaaggaaccgagctgtggcctggggttccatggagcaggtggggcgcggaggaactgagctgtggcctggggttccgtggagcaggttgagtatggaggaactggggttccgtggagcaggtggggcgcagaggaaccgagctgtggaatggggttccgtggagcaggttgagtgtgccggtcgtggacgggtcgtgggcgggactccccagtgtgtcaccactgaggcatcttcgccctcttacgtgtctctgtttctctctctagaagtccaacacctccgagaggactcaaaacacagagtgaccagctcctatgtgcatttcctggacaaaccttttttttttttttttttttgagacggagtctcgctctgtcgcccaggctggagtgcagtggcacgatctcggctcactgcaagctctgcctcccgggttcacgccattctcccgcctcagcctcccaagtagctgggactacaggctcccgccacaatgcccggctaattttttgtgtttttagcagagacgaggtttcaccgtgttagccaggatggtctcgatcacctgacctcgtgatccacccgcctcggcctcccaaagtgctgggattacaggcgtgagccactgcacccagcagacaaacctttttaaactaattgtgttggggggttccctgtggggctgctgcacgtcgtgggggatcagcccacgagatactcccacttggctcacagtcacccaggggcgcctttcagctgggaggagcaaaatgcctttctttctggagctgagaaaactcagtctctcatttatctatgcaaagaacaattcagttcctcatgcaaatgcacgcacaagccagttgggcttaattttgggagaaaaagcaacagagaagacccttaggaacgcacgtccgagctagaaaccaaatggggtacccaaaagggagtcgttctccttgtcttaagaaaaaggtggccgggcgcagtggttcacacccgtaatctcagcactttgggaggccgaggcaggcggatcaccaggtcaagagatcaagaccagcctggccaatatggtgaaaccccatctctactaaaaaaatatacaaaaattaggctgggcgcagtggcttatgcctgtaatcccagcactttgggaggccgaggtgggcggatcacgaggtcaggagatcgagaccatcctggctaacacggtgaaaccccgtctctactaaaaatacagaaaattagccagacgtggtggcgggcgcctgtagtcccaggtactcaggaggctgaggcaggagaatggcgtgaacccggggggcggagcctgcagtgagccgagatcgcgccactgccctccagcctgggcgacagcgagactccatctcaataaataaaaaaaaaaaagagttgttatcagtagaagggaatgtctggttacagtatggcgttgtgcagatgaaggtcttatcgcagatgaagccaccaggtcacaagcctcagagagaatcaactataaatgcttctcatcagactcaaggcctgaggtgatgctgatgctgtgcctgaattccagcagggaggaggcatgaggtgcgtccgactcccttcccatcacagctgagctagtttttcaggttaactttggaatgcccatggctaagaccaggggtccatccagacagttcagggcttataattttatttttggtttatgagggaacctagaaggcagcccacacgcaccttactcctcccagcaggggacaccggccagaccccaagctccacactcccaccctcagcacccacccaggccagcagccgggggcaccttggtgccaccttagtgcctgttctgcggaggctccactggacagtgcagttgatgcccggggccgagggggctctgcctgggaggctgttcacctgcctgggtgcaggaccccagagggaccccaggccacccctggcctgcccatgcccacgggaatcccgaccttgggctgcctgtctattgcaccagaaccgtcccagggctgactcagagtgaccctgagtgggggacgctcaccccaggggaggaaacggggctctgggataggaggtcctggctggggtcccacagatgccaggcgcctgccatctccagggcagtgctgtcacagaagacaacaccgctccctcgttacctgtggcccggccacctcagcggcccaaggaggtgagctcacagccatgctcggtcaatggggcctggccgtctttcctgggagagagcagaggcatgggcccaaagggagccagggatgcctgcccgtcccttctctcattcaggctcacctggtcatggtgcagtgaccacaggacccccacatgccgggagctgggttcgccccaccccaccccctgcaccgggccagcgaggggatggcccagaagagggggaggaccatgtggattcaccagtgctggacatgtgctctgtggctaccccctctgcctactctctggcccgatacaggggtgtgggacaggtgactgaacctcagcccttagaggccttgcccgggaggaggggaggggggtggagccgggagctgcgtgatccagccgagatgtgctctgactgaggccctgcagggcatacgggtcatggaaggggtgctctgcccccggccagggctccccctcctacaggaagccgggggccttgctcctgcaagctgccctttggctggaccgggccccactggccggacctgggctctttctctctctgcaccctgcaccaaggctgggctgtctgccaggccactcccggggacacagggaggcacaggctgcttccagccacaatctctggcaagcacctaggaccttgtccccgcctgccaagtagccgcccgggccatgtgtgccctgtctcctcggcaggtgcggcccacgcacaaagctgcccagatgtggtgggggagaagccccaggcctgtgctgtgtccgggggccctgccgctgacctgtggggtctctgtgacatcagcaagccccctgccgcgagcttggagaggcaccccagccccatctggcactcaaggaaatcagctcagagaggttgagtaactcgggaaggccacacagccagtgacgaagctgtgattcacacaggcctgggtgactccagcatggctttcctctccaggacgtcaccggtggcagctgcttccttccagagccggcaggcaggtgacctcaccctcctcagagccatggctctgctgctggaccctgtggggctgggctcccccagccaagcccagggacccagcaccacttggggcaggatgtcaggaacacagagcctacccttccaacctgggcccggctcgggtctggtcatttgggacagtgaggccacctggatatctagggtcccacagtagacagggatggggtggtcctgggggacagggacacctgccttccacacaaccgcactggggctgaagacgccagcctgggagactgtgatttggaccctgacagtagcatgtggtcttagcatgtgtgaggtcttagcgtgtgtggtcttagtgtgtgtgaggtcgtagcgtgtgtgaggtattagcatacgtgtgtggtcttagcatgtgtggggtcttagtgtgttgtgaatcactttcttttttttttttttgagacggagtcttgctctgtcgcccaggctggagtgcagtggcacgatctcggctcactgcaagctccgcctcctgggttcacaccattctcctgcctcagcctccccagtagctgggactacaggtgcctgccaccgcgcccacctaattttttgtatttttagtagagacggggtttcaccgtgttaggcaggatggtctcaaactcctgaccttgtgatccgcccgcctcggcctcccaaagtgctgagattacaggcgtgagccaccgcgcctggtggtcgtgagtcacttccatgtgtgccagcatcttggtgtgtgtggtgtgggtgtggactgaaagtcttagtgtgtggcgcgtcatcttagtgtgtggtgtggttggtggcagctatagtgtccagcagggagggcgagcccctgt

SEQ ID NO: 4534 - DNA, 6000 bp, Homo sapiens
ggaggaaggccacgccacaccaggggtagggatcgtggggagccctgggagaaggctgccaacccaccttcctgctggacggtcccgttaatgagctgccgcgagttccattcgcggccagatcttgtctccccagcagcccactttaggcgtcttcgtgccgttgcctcagtcgtgcttgtatctaaaagtaggacgtgtttgtcacttgatcgacagcccttttgttagaaacgttactttgtgtttaaggttttctatcgcacgaaataattcaaattgccactttaaaaaacatagaacacgagaatagaataccgacttctccacattaaaaacgagtaatggttcttggatatctatttaactcaagtatagaaaaaatgttctaagcggccaagctgggttgttcattggttctcagggcctggatggctaaagacagctactcagctaagcgtggtttccgactgaactgcatcctttgtttcagtagacggccggtctcaggctgctacacgtattttgcatttggtcgtttctgccaaatttcctctgcttatccacatgaacggagtccgtctgaaaatcacaggattaataattaccacctaactcgataacgttcttctctgtgtccctgccattttctctgtttggtgcatttccccaggaaagtaacagaacaacctcacaaatacatcaggaaggaggtttaaatttagcgagcgccgtttcctctcccaggtcccggtgactcacctccacctcccagggctgtcctgctgctgcggagctgcagcaatggacgggggccagctccctgcccacgcctcggactctaggccgtcccttcccctgcgctgtgggcatctgagcatccggcaaggtgtcagtccaaaagaaacaatgtaagtgggctgcaggctggcatctgaatacccacctcaacccgcagaccacacttccgtggctttctgtgtgctccataggacattggtgtccagggaagaaccgagtcagtgactcccagggctaactaacgggtaggatgttcattccttccagagccaaaggtgcacgttctgctccgtgccatatggggaaagtgtaacgcctcccagcactgagcagaaggaagaggcagcagctattgccctgagcacccacccaaagggctctggatggatcctccccgatggagaagcagttccacgtgtccaggaagcaggaagagcgctgtgaaggaatactgggtgtgtagggatcaagggctctgggtgtgaagtctgagctgctttctcgtgactgttcccacaatctggtgctggagccccctcggtgtgcactctcagtggtgccaagacaaggaggtgggttttgttcaggagcctgggtaaggagcacacaccccatctcaaacggggagacttccattgatggagatcggccttgttactgattgtgaaaacctcaccagagcctcgttcggagggtgggttctcccacaggacaggagatggggcataacctccagtattccccagagagcgggcagcccaggtctctgcaaagtgggtagtcactgtcaaacaaaacaacctgagacgctttctaacagagttcagcacttctgacactaagaaaaccaatcacgactctcaccctgtcattttgtaaaagaagaaaacaaaactgggaaataacttcgctgaggtcacacggccagtttggagcagagctgggactggcacccagacctctgactcctggagctcttcccagattcttgaaaggggccaagaagtgagctgcttccatctcatgggcacagaaactccctgtcctggggctcacatccaccaggtgccagccacacaggccccagtcacacaggccccggctcctgacccctgggccaggctgctccccggctggccttcctggtgctggcgtggtcggagcttccctgggtggaggatgaggctaaggaagccgactggttatgcacatcacaatgggatggaagttcggaaatggcaacaaactaattctcaaaaaccttgaaaaagaaattatgaaaattcccgttcttcagatccaaactgaaacatcagttaggaggccgggtgtggtggctcacgcctgtaatcccagcactttgggaggccgatgtgggccgatcacttgaggtcaggagttcgagaccagcctggccaacatggtgaaaccctgtctctactaaaaatacaaaaattagctgggcatggtcgcaggcgcctgtaatcccagccacttgggaggctgaggcaggagaattgcttgaacccaggaggtggaggttgcaatgagctgagatagtgccactgccctccggcctaggcaacaagagcgaaactccatctcaaaaacaaaaaagaaagaaagaaagaaaaagaaagaaagaaagaaagaccagttaggaacaataaagaatggaaatgaagtgtgcagacttcaaaccttgcagaaacctgtgaatgatggatgggacatgcatttgcctctaggactgaaggaagaggagacaatttgatgccaccaaaccaccagatatttggctaagatgcccgcccagcttcaactgacatacacacaacagcacgactttccagcaaaagttcaacattggctgggcacggaggctcatgcctgcaatctcagcactttgggaggccacgggggaggatcccttgaggccaggagtttgagaccagcctgggaaacatagtgagaccccatctctacaaaaaatagaaaattatctgggtgcagtgacatgcctctgtggtcccagctcctccagaagctgaggtgcaaggatcccttgaacccgggaggtggaggctacagtgagctgagatcgtgccactgcactccagcctgggccacagagcaagaccttgtctcttaaaagaaaaagaagaaaattgaatgttaattttatgccccagataatagaggagcgtgaagaaaatggcaatagggtgtggcttatcctgaatgaatcggatccagtgagtcaagatcaacgctgcttctcagaggtgatcagcaccaagatatcctcagataagctcttcgcagatattgaagggattgcgaccatgaaccactctcactgcttagttccaaagctcaggaaggaaagacagggagggcggggcactgtccggaggcagtgatggcgtgctggccgcagtgggtgcatggactttgcagatgtggagtctgcacctcctcctacatttgctgagcacctacttcatccaatacaccaccaaggagaagacggacaagacccctgttctggagggggaagaataaaaataatgcctctcaccgggggccgggccaagctctgggcacctcttcatgaattaactcctaaattaatccatggaagggacacgtgggaaggggcacgtgtgcagagcacaggctcggacaggaaccccgggaacacagggaggtcagtgcttctgtacccaaaggacccctctcggcaggggccagtgagcagccgggaagggggccttggagttgagacctgttgggcttgttagagccccgttccttgatttaagaaagcaggctagggctgggtgcagtggctcacgcctgtaatcccagcactttgggaggccgaggcgggcggatcacggggtcaggagttcgagaccagcctggccaacatggtgaaattccgtctgtactaaagatacaaaaaaataaccgagcgtggtggcaggtgcctgtaatcccacctactcgggaagctgtggcaggagacttgcttgaacctgggaggcagaagttgcagtgagccgagattgtgctccagcctgggtaacagagccagattccatctcgaaaaataacataacataacataacataacataacataacataacataacataacataacataaataaagcaagcaaactggaaccagcctcattcttccacttcccacagtagggattgggctggaaattccgaagcaaatccctctctgcactttcctccacctgcccctgtgcggccagggcccttcatccagaagcacgcagcctcggggacagcttcgccatttttaagtgttttcacgaggggttgacactgtgctgtcagcgacatcgcgagcccagaagtgaataactgacacaacaatgattaaagtttgtgagcagcttcaggaaatggcagcgcaactttatgttcaaaagatccaaggcaggagagtgtgaggccttccctttcccagatcctaggggtgtggagggcgggcctggggccatgagaggtgtggagagtcagaactgcggcctgcggcgcagcccccacctgcttttcctctccccgcccccgtcgagggtccccagggatcaggacttgctcccaaagtcgcctggccccagctcccgcgaaggcaggagggttttggaagcagccgctggtgggggtctctctcctgacagctgcagggactggccccctccccacccaccgccggcgcagccagaagcagccacgcagacgtgcgaccccccacaaaccgcctcgggacgaggttctgccgcgcccgtgggccacagtgtccacgcggggcttgtgccggtgtcgcctcccatgaagacacccggagggtcccgtctgcggcgcgtgagggcagcggtcccggagagccagaccccggccagggagagctgcccgcgagggagggggcgcggctggcggaggggggcgggatggggcggggggcggggggaggagaggggagcggcgggcggggccgggctgcagggagcggcgggctggggcgggctcggggcgggctccgcgctccgtccgccccctcgcgcccgcgccgcgctcgctcagctcccgcccgcctgtgccgcctgtgcggccgccgggagccaagtttgcgcggaccccgtcccgagcccgccgcggccatggacgcgcccgcccggctgctggccccgctcctgctcctctgcgcgcagcagctccgcggcaccaggtgagcgggcggggtccgcgcggcgcggggtcgggggcggtggggggcccgcgtcggcccgagatagcggctgggagagcggccggcgcgagccccgggccccggaccccaagtctgagagccccgcgtcctccctccccggggtcttgccccgcgggcccctcgttggactcgcccggacgctgcccttgggctcgggacgcggcgacccccgcgctggccgcccccgcccggtgctgtccgccgtcctggtgctgaacctgggctgggcgagggcgtcggagcctcccggttcccctgctccgcggcgcgcgtggagggtccccgggtccgcggcactcgcgggtccctgcccggcgggtgccttgaggagaggaaagacctgagaactcggtgcggggaggctgctccctttgcgggggagccgttccccgttcccccagtgagcttccccagccggagggtctgggacggacggaggaggctgtctcgctgtggagggtgggcccggcctccggggtctcctttcagagtccgtttcaaatggcgtgggcagaactcctgagtgtgtgcaggtggacggcggccaggtgcccctggccacagaaaagagatggtggatttcttaactattttgggagggactccccagagaaggaagaggctgagaaggaggccccccggggctggagccccctctggcctacagtgcccccccatctcctctctggggatctgaaatgggctcctcagccacccaggcaacttggccccaccacggggcctggctggccgccttccctaggagtcacgagaggacatttaggggcgtctttgaaaatcacctcagtgcaaagactgcagaagaaacagcaaagagccatcccccagcattcaggatctcagagaccgtgaagatgtagatat

SEQ ID NO: 4535 - DNA, 6000 bp, Homo sapiens; identical to SEQ ID NO: 2659

SEQ ID NO: 4536 - DNA, 6000 bp, Homo sapiens
gtgatccacctgcctcggcctcccaaagtgctgggattacaggcgtgagccaccacacccggccctgaaaaatctgggcaacatagcaagatggagtcttgctatgttgcccagccttgtctcaaactcctgggctcaagcgttctgcctgcttcagcccgccagaatgctgggattataggcgtgagccaccacatctggccgaaaaatcacgtctattctgcccacttctccttatccttctgatattctgtccatccgaatgatgggccattcatttactcatttattcattcaggattcaggtgcctactgtgaacccagctctaggctgggcactatggacacagagaagaattggatgatttttgcttctccagaacttagaggctagtaggggagagggatgaatacacactcaaggacaatgtagggaccgtgtgctaagataaagggaaagcccaagggatatgtgggagcacagcagaggtgtccagtccatcctgaggagtccagatgccccctgacaatgcaatacctggcagttagttgcatgggaaggggaaagaaaaccaggaagagaaagcagcattcagaaagctcaggggtgtgaagcagtttggtttgtgtctactgaaggaacaaatgcatgagcaagctcttcttgtttggttttttggtttttgtttttgagacagagtcttgctttgtcacccaggctggagggcagtggcatgatctcagctcactacagcctcagcctcccaggttcaagcgatcctcctgcctcagcctcctgagtagctgggactacaggcacatgccaccatgcctagctaagttttttgtttgttttgttttgtttgagacgcagtctcgctctgttgcccaggctggagtgcagtggcgcaatcgcagctcatggcaaccttttcctcccaggttcgagcaattctcctacttcagcctcccgagtagctgggattacaggcacctgccaccatgcctggctaattttttgtatttttagtagagatggggtttcaccatgttggccaggctggtctcgaactcctgacctcatgatctgcccgcctcagcctcccaaagtgctgggattacaggtgtgagccaccacacccgacctaagtttttaattttttgtagaaatgggcttttttcccagtctggtctcaaactcctaggctcaaatggtcctcctgccttggcctcccaaagtgctgggattacaggcatgagccaccatgcccggccttcaggctcctcttttttttttttttggctgtttctctgatatctttggctcccctttcctggcttagaggcatcctttggccacatctcctaccctgaccccagattccagccctgagctccagaaacagagagacttgttagagagcccaggagatgccttctcctctccacaactctcaggagcccgaggggtaactaggagctgactgggccttgagggtattggggttccaacctgaccctcatgctgtgatccccccaggatgagaaggctgagggcctcatcaatgtctccaactatagtctggaaagtggacatgatcagaagaagaaatagttaagtcttggggtgtgatgggctgggggatggagacagaaagggagaggaagggtgatggggtagcagtgggaggtgtggcaagtggctggggcgcccagaatccagcctctctgggctgtgggtgggcacgcccaggctgagtgatgctcctccactacctggcagtgtgtttcagctcacccatgatgtgtacaaacccttcatcttcgctgctgataccctgacagatctgagcatgtgagtgccgcctcccttagcccctactctcatatgattcccaaactctgtgagcttgggagcctaggctcaggagcctggagatacaaattccagctctctgagagtggttggtcaagatactcacttctctttctcttttttttttttttttttttgagacagagtctcactatgtcacccaggctggagtgcagtggcgtgatcttggctcactgcaatctccgcctcctgggctcaagtgattctcctgcctcagcttcctaggtagctgagactacaggtgcctaccaccatacccggctaatttttgtatttttagtagagagggggtttcactatgttggccaggctggtcttgaactcctgaccttgtgatccgcctgcctcggcctcccaaagagctgggattacaggtgtgagccactgcacccggcatctctctttttttttaattaaaaagttttgtggggagatgggtttgccctagctggtctcaaacacttggcctcaagcaatcctcctgcctcagcttcccaaagtgctggggtgacagacgcgagccaccgcacgcagccagtactcacttctctaagcctcagtttcatcatctataaaatgggtgactaagagttcatccctctcagagttgctctgaggatcattagaagatgatgtgggtaaaaagcccccagcatacaagagggccccagtggatggaaaccctgtgagacctgcttgctctccataggtgggtgcgtcatctcattacctgcatctccaagtaccagtctccaggccgggcccccccaccccgagaggaaggtaggtgtctcgcagggttgagtgggaggaaccctcacctgagcctgtgcctttcctgggatgggggctaggaactcaaatgccctaggccactccctggcctcccaaaaacccactgctgctcctcaccccagactgctacagtgagaccgaagcagaggacccggacgatgaggctgggtcccactcagcctcggtgagtggggggctgccgggggtaggaggtggggataaacaacagggcgtggagctcagacagaaaccctctgtgctttccaccctgcctgcagcccagccctgctcaagctgggagtcccctccatggagacacatcacctgcagccacccccacacagcgcagcccacggacctcctttggctctctgacaggtgctgggctggagttgggagctgggctgggggctggggtgggcacatcctcatcctgctcttccctcccacagacagcagtgaagaggcactggaaggaatggtacgggggctgaggcagggtggcgtgtccctcctaggccagccacagcccctgacccaggaacagtggcggagctctttcatgcggcgcaaccgagaccctcagctcaatgagcgagtgcaccgtgtgcgggcgctacagagcacactcaaggtcagctggggggctctgggcacagcaagggactaggctctgggcttcaggctttggtttgcggctgtcacctccaccctgggcaccagactccagactccagactcagctccggaccctgggcttagcagctgacagcgggctcagctgtggactgggccaggctctgggttccgagtggggatttgagtctcacctaggctcctcgtgccacgctggccaggtgctggcttccaggcaccggacctccggagtgaagtctggcctcgggctctgcccacttccctgggtgatcatggtcccttagcccctcctctccacacaggcaaagctgcaggagctgcaggtcctagaagaagtgctgggtgaccctgagctgacaggagagaagttccgccagtggaaggagcagaaccgggagctgtactcagagggcctgggggcctggggagtggcacaggctgaaggcagctcccacatcttgacctctgactccacagaacagtccccccactccctgccctctgaccctgaagagcactcccatctctgccccctgacctcagagagcagcctccgacctcctgacctctgaccctggccagcactctagctcctgacctttgacccgagggccacctcaaccccagcttctgacgtgtccaggacagagcatccctggattctgttcagggtgggaagtagtactgctagtcatggtctcaccccgagctgacccctctgcctgggctttgtgccaccctctcccttgccaaagaagaaactctccccccaaatcctccaacctctggggccacagccctgcccctccagttccttggcagttctcccccaaaccaggtctgtacaggtgttctttattttacatgagggctactttccaaccaaataaagtcaatttttctaagaatgagtctacatgtaactttacttccatattcgaattggaaatctgcccccctgtggggactggggtgagtgctcttggccagagggtgggtggcagacccttcgtgcagcccgttggcctgggctctgtacccgagctccaagcctgccaggatggtgggggatgacccatggctaatgagggctccgactcatgtccacctctccccagctctttgaaggctaatggtgatctcctaccccattcccggggggcacacaatgagaaacttccactttgtagatggggaaatgcactttgcacggaaaggtggtggggacagtcctggagactgggctggtaggacagggcagctggtggggaagggtgcaggttgaggtctgccctgggaaggccctggggaaaacacttctctccttcactcctcattccagcctcacctccacctcctggatccaaggcagggacatgtccctgtgactccattcaggctgcacgggaaatctgacctgctcccatcagcctctgacttccaaccccagcccagcatccccacagcatccccagacttcctctgtgggatgcggaggagggccaatgggaggagcttctctccaggttggaattcctcagtagaatgcagacggctggaggtcacagaggcctctgtgatatcaccacgagggggagtgagaccacttggagtgaagattctttgaggagaaggaagagactgagcaaacatgagggataatgaaaaggcctggtggcagcaatggacctcccatacaggcctcgaggggtggggcgggactcaggaggaccgtatggggtttggaggggcagtagctgcactgaggggccgcccctctcccctgcagagtaccattcacgagtcctacggtcggccagaggagcaagtgctcatcaaccgccaggaaatcacgaacaaagcggtaaggatagctctcgccccacagtggccccttctgcagctgtgctcatgggcagcaggccctcatggtaactctgcccctctaccctctaaacgcccccagaagaccctccctagcactgatccctgagtgactgcccatgatatgttagtaactctctggcaatgccccccataggaacccttatataacgatcatcttcactatcagagagcccaaagagattctctggcaatgacttccacaaaatcccccgatagtaacccacttttagtggccatttagatagtgatctctacactgatgtctccattccatgatccactctcagatgatttcccccctctagagtgggccccaggaacccccattctctaagagcaaacccccaggcagaggcttcctatggtgacacctgcctgaaggaaggtcctgccctcttccaggacgcctgggacatgcaggagttcatcactcacatgtacatcaagcagctgctccgacaccccgccttccaactgctgctggccctgctgctggtgatcaatgccatcaccatcgctctccgtaccaactcctacctggaccaggtgggatgccagcatgacctctgccccactaaccctaatggggggcctggggcaagaactcttccggcctcaggctcctcatctgtctatgatggttggattggatgctcttcaagggtctgtcagctctgaccttctaggaatctggagatcaaggaagacttcatgatggagagggctctgcagcctggctttga

SEQ ID NO: 4537 - DNA, 6000 bp, Homo sapiens
cctctagataaatcctaaccctaatgctccttcatggatgatcagagcagtaaaaacagttaactgtcagctggccgctgtggctcacgcctgtaattccagcactttgggaggccgaggctggcggatcacgaggtcaggagattgagatcatcctggctaacatggtgaaaccccgcctctactaaaaatacaaaatattagccgggcgtggtggcgggcgcctgtagtcccagctactcgggaggctgaggcaggagaatggcgtgaacctgggaggcggagcttgcagtgagccaagatcgcgccactgcactccagcctgggcaacagagcaagaccccgtctcaaaaaaaaaaaaaaatagttaactgtctgactccaataagaacacagaacccagttttccactgcctctacccaggccagcagccatcacctctgctcattatcttggggccacatgggggaaaggtatcaccttgcctctgttggcactgtccttacttacttgtgtttgtggttaggtaagacaggaatgatggaggagtctagggaggaacttataaggaaccattcaagactcacccattttccccttttttcagcttctgagcagcagccttcttggacaggctgatctgtgaatcaagcttcttaaggaaatcagaggcagagaggtcatggatgggcgtgggggtttcctggccaggtgtggggaggacttcaccattggcacgtcctgctcctgtctcttgtttcttcctctcagttgagtgtggccaaacttcactgttacttgggtgtactttttcctctccatctttctcttcctcagagtccaaaccattgaacaggtctctgggctctgtcaggatggggatgtagagggttttcttcaggaagatggagtcattagtataaaggcggtttgcacgtttaatctgttccatcttaaaaaaaaaagtcaccaaaattaaggacagtaataatgatcaatcttacatcttgagctttttaaagtgactgtacagagtcttctttgattccataacaaccaagctaaagtacaaagggctgacattatttctattctatagatgagtggttttcacactttttggtcttagggcccccttacattttaaaaaattattgtgcaagccaggcgcaatgtctgatgcctataattccagctactcaggaggctgaggagggaggatagcttgagcccgggaattagagtccagcctgagtaatatagtgagacgccatttctaaaaattaaaaaattaaaaataaatgaataaataaattaatgaataaataaaaatgaaggaactgaggctcagagaggttaagctactttcctaaaattatctatcaagttaatgacagagctagaatgacaatcctgggtcttttcactgcttctgagaatgcttttcacactatactattaacaatgtcattaataaatatttattttgacctatttattcatcactggacatagtgactggcatcaccatctatctgcctggcctcccaaggtagaaacatcaatgtcatccttaactaatacttgcctttcatcaccataccaagtggtcaacaaaactgcttcaaaaatctctctcacatctggtctcaccttcctactgccaaagatttaaaatagaccctcagtatttctcatctggggttattgcaacagtttaactggccttcctcgctctatttctactcatcctcctcttggcatctatctttctaaaaaaataaatctgattaacccactacccacctatggctccgcactggctaaaagataaaaaccaaattagcattcaagggctttctcaatccagctcccaaaggaaatgtctagattaatctccctctgccacctctacattttgctatcctgaactttttatttttctttgaacattccatgatctttttcacactttattcatgctgttacttctgcctgaaatgctcccacccccctactatcccattctctgcttggaaaacttgtattcatcaactatcactccctttgtgctaccttcttcagggctcccaatgcatactgtaaatattgctataataatacataaccctactataatattattcacctctttaaatatctgctttgcctaaaccctataagtcctttaagggcaaggattgtgacttgctgtctctgtatccccaggaagtcattagcatcctacagaccttgacacatagcaggggctcattaatgctttatttaaaaactattacttataattatgtaattattatcataattagataatgaaatatagaaactacagatatagtgtattcgtattttctttctttctttctttctttttttggagacaaggtctcactctgtcgcccagcctggagtgtagtggcgcgatctcggctcactgaaacctccgcttccccagctcaagtgatcctctgcctcagcctccccagtaggtgggattacaggcacatgccaccatgcccggctaatttttgtatttgttgtagagatggggtttcaccacattgcccagaatggtcctgtactcccgagctcaagcaatccacccacctcagcctcccaaagtgctgggattacaggcatgagccaccacgcctggcccaccacagcccctttccaactgaaatttaatcttttctgatttcctatctttgtgtgtgtgtgtgtgtgtgtgtgtgtgtgtgtgtctcactctgttgcccaggctggagtgctggagtgcagtggtgcgatctcagctcatcgcaacctccccctcctgggttcaagcgattctcccgcctcagcctcctgagtagctgggattacaggtgagcaccaccacgcccggctaatttttgtatttttagtagagacagggtttcaccatgttggccagactggtctcgtactcgtaaccttaggtgatccacttgcctctgcctcccaaagtgctgggattacaggggtgagccaccatgcctgacccctattcgttgttaatacctttacaaactcaccacattctgtcacttgtaatcattatttgtgtccctgttcatttctcattaggccataaattacatgaggacagcaaccatatagtttaagtttctatctcccagaaaagttatcacagtgctttaaatacagcaagcataaaaatgttggctaaattcaacatttgtttgagtgagatggaacaagaaaacaggggcagggatagggggagtaaccccatcaacttcaatgctgtacatttttacatctatccaatttcccccatgcatgacctgaaatacttggtgtagagtacctgttttgcacaaaggaggccaccttactggaaagaaggcagagcattgaggaggaaccaagagcaaggagaggtgggcactttaggaactgagaactaaaaatcagctctccattagttgctgtaaacgtttaatcactctcaacataaaattttctgtgtggttaatagagtcagacagacctgtttgaatcccaaatctgacgctcattatttgaccttagccaaactggttaaccaatccaagtctcagtttcttcatctgccaaaagggaacgataaatgtatacttgatacagatgtgagggtgaaatgagctaacgtatgtgaagccctcagcacagtgtctggcataataaaataggagctgttcctctccgttggaatagtagggcaggacttgtgcaacactgtgatgggaaaacaaagataaaggcagaacagagtgcaacacattaggaacatttcaggggaggttacctagaagggccactacattcttctcaggactaaatccctcctgactgttgtcttcaccccaatcctggaaaactcaccgtcaccccatatttgagtgctagtccagccagggtgtctccgggctccaactgatgctccaggcgtctttccctcactggggagcaggccgattgcaccaggcttccatatgaacgagcccggctcccttgaagcagtcctgacccccctggcgggggctgtctagacggggaagccatctcttcaccctgccaacagctaaggttgcaactaggggaggtacgaccgagactgcgactgacaggcctgaagtctgggaatgaatattcaggggattcctttccccctctctcttcccctgtgtccccgcctccccagcactacgccatctgccccctcccggtttctcctccctccaagctacttatccacaaatctgtcccttgagtattcagtccctccctaattctcccctaagcacccctccgactttggactcccccacaactcctcgctacattgacctctgacctttgaactctagaaataatcctcaacactctttcctcagtttgcccccaagtagcctggcctcagggcgctccaacatcccagctctccccggtcccggggtttgtttgctagagtcaggaacaaatcaggcccaccccaggtgaactgtcgccgcagacgaagagcgtgaggattgcaagaatttgtagtacaccttccactcagagatcctcaaaggtccgctccgcataagataggtcacaccctcaaatttcggctccacatctaggttgttgtccctccaaacgcctcagatccgccaagatgcaagggcctggatccagttgagcggcaaggtctttgagaaaagacttcatttcccaaaaggctccgcgtctgcggagtcgcagggcaccataggaaatgcagttccctccgagcaccagagagtggatttccggatcgcgcaatgcatgcgtggaagtgcgtccccggaagtacggaggccgacaggaagagaaggaaaaaagagaaggcgctgtcccgctcttgctacggtggcctggaggagtggcgaaaccggaacagagaatttatcacttctgggactcacagtcgtgatgtctttcaagagggaaggagacgattggagtcaactcaatgtgctcaaagtaagcgtgagcggagaggatctggagccgcttcagtcgctccctgaaggttgggaaggagctttgtttcattgctctggcaacaactcgggggtgcaggagagaaccaggcgacttagagctgtgtagtgactcctttttcggtctatgatcgctgttctccccagggtccttattccatttcactcctcatttctataatttcacttccacccctctctcctatcccgctgatcccgtccggatttcttcccctactccctgcagaaaagaagagtcggggacctcctagccagttacattccagaggatgaggcgctgatgcttcgggatggacggtaagagcaaggagtggctcaagcctgagggttctgcggttagaggctcaatagacttttttttttttttcctttgagacggaggtctcgcggtgctgcccaggctgccctcgaactctagggctcaagtgatcctgcctcctcagcgtcgcgattagctgggtttacaagcgcatgccaccacgcctggcttcaacaaacttttgttattaattaggacagcaggagtacctaggattctttggcggccagtgaggactggaagaagtggagattgggtcaccagggagttgggttttgcaaagactgctaggacagggtgggacctatggcagggacgggcccaaccctcttcccctggaccacttatcctcttctctacccctgctcagctttgcttgtgccatctgcccccatcgaccggtactggacaccctggccatgctgactgcccaccgtgcaggcaagaaacatctgtccagtaagttagggggaagacgggatggggaataaaccctcgaaatctctgcacaccactcttggtgctatgcttttaattctgtttccctttctcctcaggcttgcagcttttctatggcaagaagc

SEQ ID NO: 4538 - DNA, 6000 bp, Homo sapiens
gtgaaacggataaatgatagtgtattcatacaatggaatagtccacagcaatgaagatgaatgaactacaactatattcagcagtgttcacgattctcactaacatgttttttaaaaaaacagacacaggccgggcatggtagctcacacatgtaatcccagcactttggaaggccgaggcaggtggatcacctgaggtcaggagttcaagaccagcctgaccaacatggtgaaaccccatctctactaaaaatgcaaaaaaattagccgggtgtggtggcacatgcctgtaatccaagctactcaggaggctgaggcaggagaattgcttgaacccgggaggcggaggttgcagtgagccaagatcatgccattgcactccagcctgggcaacaagagcaaaactcccatctcaaaacaaacaaacaaacaaaaaaaaccagacacacactgaagatgatgattccatttttccatttataaaaagttccacaggcaaagtcgatctatgctattagaagacaggacagtagttatttattttaccttcagtcatttttttaaaattgtggtaaaattacacataaaatctgccactttaactaatttaaagtgtatgactcagtggcattcagtgcattcacaagttgtataaccattactactgtctagttccaggtaagtagtcaccacctcccattcctccctcctcccaaggtgttttttttttgagatggagtctcgctctgtcgcccaggctagagtgtgcagtggtgcgatctcggctcactgcaagctccacctcccgggttcacgccattctcctgcctcagcctcccgagtagctggagctacaggtgcccgccacgatgcccggctaattttttttatatttttagtagagacggggtttcactgtgttaggatggtctcgatctcctgaccttgtgatccacccgcctcagcctcccaaagtgctgggattacaggtgtgagccatcacgcctggccccaaggtgttacttttgaagaagagagagtaactgctggaagggtcatcatggggacttctggatattagttatgtgtgtttctttaaaaaaaaaaatctaaattgcggctatatggctgtgtttatgttgtgaaaatttagctgtacacttgtatatactttgctgtatgaatgttatatccgagtatatatagataaatttggaggggtatgtgtgtgtgtgaaatatattattgctaacactgatttttttcctgggaggtaggagtatgaatccattttgtacttactatgttttgctgacttgttttccaattggtattcatgacgaatacatgtattacttttgtaataaaaattttaaaatttaaaacatctttttttttttttttgagatggcgtctcattctgttgcccaggctgggagtgaagaagtggtgcaatctcggctcactgcaacctctgcctcccaggttcaagcaattcttcctgcctcagtctcctgagtagctgggattacaggcatgcgccaccacaccaggctaatttttgtatttttcagtagagaccgggtttcaccacgttggccaggctggtcttgaattcctgatctcaggtgatctgccttggcctccctaagtgccaggattacaggtgcgagccaccacactcagcctaaaacgccttaaataaaggacaataacattgattttaagcctttccccccaacctttttttttttttttttttttgagacagggtctggctctgttgcccaggctggagttcagtgacatagtctcggctcactgcaaccacctccacggctcacgatatcctccctcctcagcctcccaagtactgggaggtgttgcccaggctgggagcacgtgccaccacacctggctaatatttttaaattttttgtagaaacagggtttcaccatgttgcccaggctgatcttgaactcttgagctcagtccatccacctgccccagcctcccaaagtgcttggattacggacgtgagccaccgctttccaccaattttaagcctttcaagagaaaacattccttatcatcagtggcaatgggagtgtctcaccaaaactttgcccaattactctttagcctcaggattgatacttctgcatctgttcatcaccctctgtggttctggacctgtccactcttcctggctgcctttcttcttggtgggtatggaaggagtatgtgtgggagagatgaggaaggaggtgttcccgccctgcttggacactgggtggttgtgctcagaagactcactccttgccaggctggaagtaaacttgaagcaaaagctgggggatttgagaagagaaggtagactggcctggaagttgcatcaggagaagccagaggctttaagcaagcaaatgaccccctagtttctcatcccataaacaagcaaccattacagaaagagatttttgttaagagaagactttcacagccttcctcaatcattctgcatccaccaaaactccctgtatttcttaggagtttggaatacctttaagtcatccttgtcttaatgactttctcacctttcaaatctcaattttcatcttcatcccttctaggttcttagacactattaacctcttcttcctctgtgcttccatccatagcacttcctttatatgtctgttagaacagccatcacattctataataatttgctgccaaactgtgatctccttaatagctgggactaagtctttttgatcactgcatcttcaacacatatggtccacaacacacatgcagtttcctggcaaaccacatatacctaacaaatgttgatctaaattgttgaaggaagatcttcccaccctctatcttttccttaagcagagggactacacacattccttctcttttccttaaggcttttcttcactacttttctttgttacaaggtttctttaattcttaagagattattgtgcgcttacacatgcgcatgccccggaacaagtcgtgcagatttacgcccatttccatgtgcatcatggggtctgtagtccttctacttctccagtcctcttctagaacttttctgcttcttcccttaattccacgacctggggacatggtcaataagttgcttttagctgggcttttatttatttatttgtttagtttttgaaatggggtcttgcttcattgcccaggctggagtgcagttgcgccatcatgccccaaactgcagccccgacctccctggcttaagtgatcctcccacctcagcctctcgagtagctgggactataggcacacaccatcatgcccgactaatttttaaactttttgtacacacgtgatctcattatgttgcccaggctggtttcaaacgcctgggctcaagtgatccttctgcctcagcctttgaaagtgctgagattacgggcttaagtcacctctcctggtccctagctgagcttttagagagaaattttccctacacattaaaaagtgtcagtccagtactagcccttttccttacctgttgagcccttataataatatgccaggcactgtgttgattcataatctagagaggcagccactgcctcaggtggattcatttattcattggacatgctctggaaacatataacaaagtatctgatctagttcttggtcaggcgcagcttccttaaggaattgacattcctgccaaatgctcaaagttaagtagaaggtgatgaggggaacatgggttataaaagagcccaagagaaccatgcatttaagtccctgaagtgtgggggatgatgggacggataagatgttcaaggatcctgaagaccttgccaatagttggaatgtggagctgggggtggagtgacccagatgaggttgaagtaagcagggacaaaacaggacagagccttgctgtatgctaagtctgctttagtcaggaatcttttggttgaaagtgacaacgaacccactgaaggaaaaaaaggggctaagagttcagggttctcatctttggtctcctttgtgttagcttctctcttgatcaggcctctgtgagtggtctctgatctccctagtcacacagaagccaacagctggagtcaagagaagggggtgaggaaggccgatgaataggggctacttgtctttccactattaccctcaagtctaccttctttgcaggcaagtctagacctcctcaggtagaccctcagtgggagggcaggaagcttagccttttagactccaaagccgtttgctttcttaaaaatagcaaacccacagccccctatctctttaaggggctaaacacattttctctgctgtatcctcagcctacctggggagcaggaccatttgggtttggtaagagaaaaaaggagggcgaaaaccccggacactcctcctgtctcccgacgctcgttctggccgtctggccctcagtactaagcaggccctgacctacttgtcttactcttgctgcttcttcccgccgggcctcttgccccttctccgaccatgctgcaggtcctgccccaactttaggacttcagaactcctccaccgtgccgtggaggaacagcccttcttccacctcacgcacaccctaccacggcagaaccaatcgaagactatcccagccggggaccccccttttttttcctgggacccagcgtttccgcctccggggcgcagactcctccccctcaccgtcccaattgtattccctggaagagcagccggaaaagcctccgcctgctcataccaggataggcaagaagctggtttctcctcgcagccggctccctgaggcccaggaaccaccgcggcggccggcaccacctggacccagctccaggcgggcgcggcttcagcaccacggacagcgccccacccgcggccctccccccggcggcgcgctccagccggtgtaggcgaggcagcgagctatgcccgcggcatggcccggcgctgcggccccgtggcgctgctccttggcttcggcctcctccggctgtgctcaggtaagggaaagacgggcactggccaggttctcctaccccagccaacggcccaagactcgccgccctctgactcacccctgctaggccggaaggtggaagaagggattccctagaggtgggggagtctgctggaggttaggggagagccccccgggactgcagagagcacctgggaggctggactgggaacgagacatactcgaaggagtaagtgaagcaagaaagagatggaaacctggccagcggtggtaggggtggtgcaggcacagagagcaaggaggcaggggatctccccaggcgtcctggggtggcaggaggccggctctgagggcgctaagatgccatctgactttttgtgaaacattatctcaagaaaggtacctggaccagcacccctccccgggctccccatcgtttcccatcccccacattgggctccagattctcgtcacccctcaggggcagagaaggggagaaaacggaacggacttttcaaccctcctgtagggtgggacaggaggcttggaagggaagaagctctgccaggctgaggactaggaaggaactctctgaggggatggggaggggtgtgttcgtgcagagttgcagagggggatgcagtgtgccggggaggggcaggtacaaagggaatgcacaactgaatgagctttccacacctacaggccacctctaggggtgggctgctgtgtgtgtgaaacttggggctacatatatgcctgacccacagcttaggcagcccagctattccactccaacccagtgcctttagggagaggggaggatggcatcgtgaccacagtcacatgtcattacgtgaggcacataatgtcatttgcacatgtaaatggtgaacgggaacagttatttgtgtcccaccacacatacactttctcctcaatcggcaggagaaaggat

SEQ ID NO: 4539 - DNA, 6000 bp, Homo sapiens
ctcacagcactgtcccctcaaaacatcactagcctacctttctcaagtttgaaatcttttgctttttcctttcttactcagaaaatccagaactcctacaggcaaattcttcctgcatgttccaagtgacacggtgatgtattcctcccctccagctttgattggacccgagtccaactttgatattccactccttcacatctctggaaccactcccatccttactctatcatcccttctagtctggttccgcccaagcttcctacaggtcttcttggtacatctaacgcaggccgacctccttccccctcatctccctactccgtcgcttcgtaggtctcaactctcctcctctccaaatctcgcccccgtcccttgcccccaacccaagcctaaccccgcccgccccgcggtcgccatcttttcgcgcggccagccaacccgcgcgctcaccgttctggcggcgaggcccgtgcgcttgtcccacaggaagtccgtgatggcggcgacactgcggccggagtcccggcacccccgcggcgacgaaatgctgctccacccccccaacccgggaccctgggacctcccgccccgttcccgggctccgcttcagtcccgcccgccccggctccgtccccgcccctaagatctgcttggcgccgctcgcaccgcccccgcccggggcccgatcccagctcggtctccggctctggcctctccgctccgccgccgccgccgtgagcgagcacgtacgcacggaccgacgtcctgcgtcgcttcccagctaccccctgggctccgcccccaggaccgcgcgcgccaccacgtgctcacgtagttggcaggcatccgcctgtcagagcctcggaggtactgggggcggaagttcataggggcgaggagggtccacagggacaagctggaagccttccaggcccgctatgccccgcctcctgtcctttcccactccgtcttcaatcttttaccctttgcatggagacgtgtggcttagttaggtttggagtttaaaagaaaggattgtcattgtcaatacagtgtcgctgctctgcaagcctgactgtagtgaggcttgatggtgaagtctcattcttctgcatagcctgaaaataaccatttcttaaaacacttcacctacctatccccaggacaaaagtctgccaccttttgtcatcaacaaaagttatgcacgactcggggtggggacacagccatggaggaaaggtttgagcaatggagggttggagaatcgggtgccgaaaagggggacttacttgagaactgtatcctaaggtggcttacataatgtgtgagaaatacaagtttactagggccgggcgcggtggctctcgcctataatcccaacactttgggaagccgaggcgggcggatcacgaggtcaggagttcgagattagcctgatcaacatggtgaaatcccgtctctactaaaaatacaaaaattagccgggcatggtggcgggcgcctgtaatcccagctactcaggaggctgaggtaggagaatcgcttgaacccgggaggcggaggttgcagtgagccgagatcgggccattgcactgcagcctgggtgacagagcgagactctgtctcaaaaaaaaaaaaaaaaaaaaaaaaaagcgcgcatcaccacgcccagctatttttttttttcttgtagagatagtgcctcactttgttacccaggctagtcttgaacccctgagctcaagcaatcctcccccatcggcctcccaaagtgctgggattacaagcatcagccacggcgcttggccagtttactaaatcttaaaaaagaacaggaaggctgggcgaggtggctcacgcctgtaataccaacactttgggaggccaacgtgggtggatcacttaagcataggagtttgagacagcctgggcaacagggcaaaacccagactcttaaaaaaatacaaggccgggcgcggtggctcacgcctgtaatcccagcactttgggaggccaaggcgggcggatcacgaggtcaggagatcgagaccatcctggctaacacggtgaaaccccgtctctactaaaaatacaaaaaattagccgggcgaggtggcgggcgcctgtagtcccagctactcgggaggctgaggcaggagaatggcgtgaaccccagggggcggagcctgcagtgagccgagattgcgccactgcactccagcctgggcgacagcgagactccgtctcaaaaaaaaaaaaaaaaaaaaaaaaaaaaatacaaaaattaggccaagcgcggtggctcatgcctgtaatcccaacagttttggaggcccaggaaggtggatcacttgagcacaggagttcgagaccagcctggccaacctggtgaaaccctgtctctactaaaaatacaaaaattagccgggtgtgatggcaggtgcctgtaatcccagctatttggaaggctgaggcacgagaatcgcttgaatccagaaggtggaggttgcagtgagccgagatggtgccattgcactccagcctgggcgacagagtgagactgtgtctaaaataaaataaaataaaaaataaaaattagccattcatggtgtctcccacctgtagtcccagctactcgggaggctgaggtgggaggatcacctgagcctggggaggttgaggctgtagtgacccgtgatcgtgccactgcactccagcttgggcgacagagtgagactctatctcaaaaaaaaaaaaaaaaaaaaaagaaaagaaaagaaaaaaagaaaatgagaaagagaaagagttagagactttacagaaggaattgagaagtggtcagaaaggtcaattgaaagagaaataatataatctgagaataacgatattaaagtcagggagctgagcaaggtggctcacacctgtagtcccagctactcaggaaactgaggtgggaagattgctttgaggctgcagtgggtcatgatcacaccactgcactccagcttgagcaacagagcaagaccctgactctagaatgagtaaataaataaagtcaggaaatattagagaggagctggatgaaggatggtcagatggaggttagatcagataaccagacatagtttagagaagttccctggaatagaacatggagagcaatcaatgaaggagtcggggagagagaagtaaagatttcacttccacctcctggaacattttcctagattattaattcattcaacaagcatttactgaatgtccactatgtgtccagaattatgccaggtgcaaggttcctgtttctcagagtttcacaatctaacaggagagaaaatctgtaaataaataatgagaccatgctcatgcctgtaatcctagcactttgggaagccaaggcaggaagatcacttgagctctgagttcaaaaccagcctgggcaacatagtgtgacctcatctctaaaataataataataatggtagccctgtgacatgagttgctcaaaacagtggtgccctggctgctgtaaaaaagctctagaatagaccctacctgaggaaaggagagttggaaatgtgttcctaggtttcctagagaaagcaagatctgaaccaactgttcgaaagtgaattggaggagaataccaggcagagaaaatatttgcaaaagcatagagacaaggcagcacaaagtctttcagcatgattggggctgtggctttcaagagagggactgtcagaagagagactgttgaaactaggtccaaattttttgggcctggtacaccatgctaagcagcttaaatgtacccctgtagaagatgggaaagcttgatgggcttcaagcaagtgacacagccatagttggattttaggaaggtaactggcagggaatggaagaagaattggcctggaagaggttgaagactcttttagaggtttccgaagtaatttaagtgaaaaaatgctgagggcttgaaatgaggcagtggtaataagaattggagatgaaggggagaatttgagatatttaggaatttgtagcacttcgcatagcactgcaatttacctgtctgtcgttgggcacagatgagcagtggctttatggctaggcctttgtttttgttttgttttgtgttgttttccattactacatggagatgctaagactaggacttttgtattcatttttgtttcctcagcatccactcaatgacaggcagagttgcacttggtgaaggctgacagaatgaattaggaaattaaatactaggggaagcagttcggaggagaccaaaagacaagaatatgcctaggacagtgttgagagaagacgggagcaggacagaagtccctgggcgagagtggagaagaatcccaaaagccatttccacttcttccattggtccccaatccctctccctcccaagtccttcaagctacaaacccgcgtccgattttcccgccactgcagggggctcctcctccctggttctcagtggatgaaaggccaacgctaggccacgccctctccctggctcaggctgcgctccccgccttctttgctaagccacgcccctctcggagttcctccaggatcccggcgtcccagccccgcccggtcttggcgcggccctcgccagggggcgccgcgcagcccgcccgccgcccgccagtctagcacacaccccctccgccccgcgcgccggcgattccgagcctacgacgcctccgctagagcccgcggggctgcgccgactcctgctctggaggggttgcgggtacctgatggccacagagggctctaggaggccgagcgtgtaagcggggtgggcgccatggaggcagagcagcggccggcggcgggggccagcgaaggggcgacccctggactggaggcggtgcctcccgttgctcccccgcctgcgaccgcggcctcaggtccgatccccaaatctgggcctgagcctaagaggaggcaccttgggacgctgctccagcctacggtcaacaagttctcccttcgggtgttcggcagccacaaagcagtggaaatcgagcaggagcgggtgaagtcagcgggggcctggatcatccacccctacagcgacttccggtattgggggcttggcggggagggcagggtacatcaatcccaccctcgcgggcagcgacaccgggacccggcccgccccaccctccacggtcacttcatttccagcccggggtcccttggtggggcgggagagtcacttgcaccagtctagcctgggaattcctgggcgggtatcccctgccggaggtcctccgtgcctggacaggctgggggcaccagaaggggcaagcagacatcaggggatctccagagacctggatttcctctttcaggaacccgggaccccatccggaccaaaggaactaccagagtttgggacccctgcctcctccagtcctgcttgctggagatctaggaaattatattctaagtatcggggccagtctgagggagaagccgagctccgccatctcccatccccacacccgctccttagcacctgcctagttcagcatgacagactaccaggaaaaatagggacgctgaagggggcggggggtccagacctcagctctggtcgctgtccctagtgctgaaggcgggggcggcggggcggggccgagactcagagtgactgaggcggcaaagcaggggcaggaccaccacccaggtgactcccagagaaggaacagagggtgggggtggggccatttcacagtctccgtcagggtgtacctctacatcaaggtcgctaggggaagacagcagccctgtccttgggggaaatgaaggacagctcttggatgaggcagggatgtgtgcaaagcacctaacctggggaactaaagaagcagagaggaagaggtgtgaatctggagcctcgaaatacagttgtagacccagacattatcttgaatccacatatatacacactccctc

SEQ ID NO: 4540 - DNA, 6000 bp, Homo sapiens
tatgtaagtagatcaccccctttaaataaatgcaatatacacaaacccacatttataagacataatttagggaatagttagttacctactaaagaattctttcctttaaaaaagaaaaacatggccaggcacggtggctcatgcctgtaatcccagcactttgggaagccaaggtgggtggatcacctaaggtcaggagttcaagaccagcctggccaacatggtgaaaccccatctctactgaaaatacaaaaaaaaaaaaaaaattagccaggcatagtggtgtgtgcctgtaatctcagctactcaggagggcgaggcaagagaatcacttgaatccgggcggtgggggttgcagtgagcggagatcgcgccactgcactccagcctgggcaacagagcggaactctgtctcaaaaaggaataaaaaaaaaggaaaaaagaaaaaaacaaatttctctaactagggacttctagtacctttccagttgggtccaattgatagaaattccattaacatccaatgcactgtgataggagggaggcaactgggaataaagaaacacgaggaatctcgagtcgggtggcctgagtcttagtcctgactatgttcttgggacctattcctacctgtaaagtaagggctaatcctgtaccacctctaaccgtcatataacttttaaatcttagcctatctctacccagtcctataaagcaagatagaactctgtgtgaaggcttctgatcctcctgctctgctgaaagtagccagaaaggcagcaagctcctcagcctcaggaacccagcctgaggcaaggggctggctgaaattgcctccgtctggcctggagctgtgctctgcttctccccatttcactctaatcttcagcttcagtcatttgccacatctactccttcaaccatatctttcctctgctctgagttttctagagccccatcccccttgaatttatacaaatttttgcaatcaaccagattggcctccctgctccactaaactcatatcctcaactgtctgctgtcttccccatcatgcttcctcttccacttgccagattttgcacaagatgtctcatgatcttgtccagggaagcctccccagtttggctgatctcagggctgccacaaaggcacctgctgatggggcaagttgaggactgaactgcattcagcttgccaattcctgcacccagctcagagctgtgtctgctggaggaagggaaccttttattttctcccaaaagtatcacctgttccctgttctccaagtgacaggccacagtaggctctttttaagctcttttcctattttgcaccacggttccttttttttttttttttttttttttttttttgagacaaggtctcactctgttgtccaggctggagtgcagtggcgcaatcacggctcactgcagccttgagctcccaggctcaggtgatcctcccacctcaacctccaaggtggctgggaccacatgcacataccactacacccatctaattttgtattttttgtagagacagggtttcgccatgttgcccaggctggtctccatctcctgggttcaagcgatccgtgtacctcagcctcccaaagtgctgggattataggttcgagccaccgtgccaagccaaaagctagaatcttgtctatgcttttgtgtcctggtgcctgggaaaactttttttctcctgcctcagttcagctcagtgataaataaggaactgaggttagataacaggtaaagtctaggacctgcaggatgagtgaatcaggtgagggagtggtagtcttcttccttgtcagccaggctaggttcaggggcacctggactgaggcgaggggctggctgaaattgccttgtggagggccctgccagtgatgccccctccagcaaatagggccagctctatgcaaatgtgttcttgcccaggagtttggtttcttctctctgagctcctggcacagtggaaccaatgtgagcagctgcttggcaggacagagaagggcaggctagcagtcccaaagctcgggtgacaggaccaggcccaggagacggggatgttgactggggctttaacagcactcttgatgccaatctcgggctgaaaactcgatatttccacttggaacaacaagaatcaccagcaagagagctgaggagagggcagtataccgggggcgccccctgcaggcctcacagggtggtgccagaacagaggaaggtggcacaggcagggtggggctttcaggacatccctgagatgatggtgatgacagtgacaatgatgatgaccatgaagaagacaatgaggaggaggaagaggaagacagtagctagcatttactgagtactaacaatgtgtcaggcattgccttatgtagtcttcatgacaaccctctaagagatgaataatatggttttcttttttttagatgaagaatctgaggtttaacgggttaaataattgctcaggttcacccagctagtagtggacagaggtgggatttgaacccaagtcattgcctcctgagcttatattatccagtaccgaatttcccaccttgccaggtcattccaggagcttctagccctccgtgtccatctctatgtcttcctgctcctctagctcatattttcttgatccaaatttaaaggatctggataagaatagatccatatctgggatataataatactgataacaacagcaacaacactttgcgtttgtaaaccactttcttctcttcattatttccctggggaaaaataaacaataagatatttctgtttctccaaattttgttctgatttttatcagtgttcctgaagctatttcaatatagtcatgatcaatttctaagaatatttttaggttctgcttttttatgtaacagtgtgttatatacacattcacatatttaaacacagcaattattatggctttacagtaacccatgatattaatattccacagatattacattactgaggcacactaggctaaggctgacaacaccaaatgctggcaggaatgtggagcaacaggaacaggaattcgtggctgatgggaatgcaaaatggtacagctactttggaagaaagtgtggcagtttcctaaaaaactaaacatactcttaccatacgatccaggaatcatgctccttggtatctacccaaaggagatgaaaacttacgtccacatgaaaatctgccgatggatgtttatagcagctgtattcatcatggccaaatcttgaaagcaaccgagatgtccttcagtaggtaaatagataaataaaccatggccatcctgaaatggaatattattcagtgccaaaaagaaatgaactacaaagccatgaaaagacatggaggaaccttaaatttacattactaagtgaaagaagccaatttgaaatggctacatattgtacaattccaacgacatgacattctggaaaaggaaaattatggaaacaggaaaaagagcagttgttgccaggggttagggaagggggattgactaggcagagcatagaggacttttacagcaatgagactataatggtggatacacatcattatatatttgtccaaacccacagagtgtacaacaccaaaagtgaaccctaatgtcagctatggactttgggcgattatgatgtcaatgtagcttcatcacttgtaacaaatgtgccattctggtggatgtgtggggacagggggcatacggaaaatctctataactttcctctcagttttgctctgaatctaaaactaccctttaagaagtcttcttttaaaacaatttacaaagcatgaggtgatacagatgtgggagtttggctcctgtctctgcccaactctgtgacattcgataaattacttaacatgtctctgtttcagtttcctcatctataactgggaaaaataacacctgtcttatagagttgccatggggatgacatgaggcatgtgtctcgttcatatcccatgctcagtgaattagtagcagcagccactgtgtgtttgtgtgtctttatccctcctgggttaatgagctccttgtgggcagggactcacccattctgtaaccaccccatctaacacactgcctggcacttgggctccgcagaagtttgccgagtgaatacttagtaagccctaacctaggcttttctctctggtggacatttgggttgtttctagggtttttgctatgaataaaacacatttcaaagccctttgtggtttttttggtttttgtttgtttgttttttcttcgtttgatctgctgactctgtgaagcaggcagaaaggggatatttgctcttgtccacaccctggtacagatggaataactgtggctcagggaagtgaagtgactcctatgggacacagtgcaaatcagtggcaataattagaacccctgaccctgcctcccttcctttagtagatctattttccttctagctaccgccttctggatccatggcctctccaaaactagaccatgatggtcagcctgacctgagagcagcacctgcacgcagagacccatgttgaaggtggtgagctgccagctaccagatggccctctgaaaccccagggaacctagcaccttattctcaaatacatgagggcttgtattttcccccaggaaggagcttcttaggaaagagccagcgtgccagctttgtttttctttcttcttctttttttttttttcctatgagggggtgaggagccaagctctgagttgtccaggaggagggactttggctaaaaatagctatggcgtgtggtttggatcaacccctagtggtacccaggactggggaggggagggggatgctctggagctgtcgccagactggttgccgtggaaacaagagaggagcaggggagcctgggaagtagggatgacacagatagcaagtcctagtcagagctgccgctacatttaggagaaacagcggtgtctgcggctcccacccttcggggggcccgtggggggggcggtgtcaggggcatggacgccaccccccaggggtctctgctgccggctactctcctctccacgtgctgtgagttgagttgcgggggacttggggtttgggcccctatttccaaggcaagtgggggtttgggaggagctggttcttgggggagttttcaccaggtctctccttccaaaaaatgagcccccttactccccagctctctagagggaggaagaggggcccaggaaaagtggtattgcaatcttctgcaaaggggtcatagcatgcacaagaaatgaggagtaggttggaggaactgaaattcttggagggaagatggagaaatcaagtccttgatcttgagatagaggtaacaatttcacacttttccttcccctgagaaaagtgcagtcccccactcaggaagacaggatgtgggacacattcaaaataaggtttacctagatccctggggcaatggagagtgagagagttctgggggtgatccgacatcggggttccttccccatccctgggcagagagatctgtctaggcaagccgactgggggtcagattacctaagaccctgagagaacatctggaagcccacctgggactaaagctaggataatgggagcagggtcgttttctgcatgacctggggtctctgagccagtcaatgcttactcttcctgaggacatctgagcttcagggaaggaaaaggaagcccattgttgggggcaggggaaaccctaatcttccattgccatggggctcttggaccctgtgtcccctgactccatggacaataaatgcagggggtgcccctaagctcaaagccatttcattttgatttctcttcctaccttctctaccccaagacacacaaacacacacacacacaccctctccagagtgctgactgcagaggacctcaccccagaacataagatgctggagtgcta

SEQ ID NO: 4541 - DNA, 6000 bp, Homo sapiens
ctctggttcaaggtcatgccttacctctctaaagctcaagatcctgcctataacttgactcttaagcaaggaaaatattattttgacatgcagtatgttaataatggtcacatattgtgaagaatcctgtccttattattaggagatccagctctgctatttcctagctctgtgcacttggacaagtccctgactctctgggtgttcagataacaggatgtgcctcacagtccttctgcaaagatgcaatgagaaaacattacggttggcacccaggaagtgatgggttgtcataaatgaatggtttttaaaacactttaaaaccaactttgctgacctgtggttagctgatagcatgttggagtgtggggcttctcaggcttaggtttgagagatgctgattctagggacggacattacataaggatgtgaagttatgttttcacccaagtaagggctgtgaggtattgtgaaagccaccagactcccaagatgtctgcattgccataatgctcctctgctccactatgcatttgcacatggtctcctgccaacttttttcttaagaacccactcccaaatcctctctgcattatgttccttagagcactgctttgcataagagtctatttcttggaaaagctcaacggaggaaaaatagaacaaaaggggctctgataacttaagcataagctatctgagtgtaactggcagggtgggggaagatgaaggagcaggcctggtgggaggggcacaggccatttggatgaagcccacattcacagacttctcagtgatgggtgaaaaatctcttatgaagatggcccaaggcctgacagatctgggaagagcttaagaatgagggtaataggccaactgcttctccaactttgccactcatgtccatctgtcttagtacaaactcccacaggctgcctgatctggggcagtgtggacaccttgttttctgccttttccagaagaggctggagggactacctaccagtccccttcacacctgattgcagctcgatgatacactgcagtagaggggctgcaggataaatgctttgaaatgtaatagtcttcatgggctttataaagtaggaaagttttccacttgcttccttagctcctgttgggtttccactttgcaggtcattgctttcagaaaaacatgtggagcatttggtaaccccatcttaacttgggagggtgtgtgtggggctgcactttccaactactgtgagatgggctggctgcattgtggtgaaatttagtacctcaacaaagtcccataggggagtagagggctgttgacaagaggtcagagcctaggaatatctaagctctgaggcatggtgcatggggtgctgggctgccaagcactcgtgctcagtgaccagtagatggtgctctgacaacaggaaaatacagttactgtccctctgagactggaaagggattttcagatggtcttcagactggtttccaatcagagttatgactaattgctaattttccacatttccatttgtggatccttaataggacagtggaactcggggcactggaaggagaatgcccaccaaattcccatatgaagaaattcccatatgaagtcatgcaataccgcatgactacagtattctggtcatgaactttttctgaggatcctcctggatattgagggcatggtgccaggaacacttggcctctgatcaaattcaatttgaggatggtaagcatagcatttccataggcttagtgtcattgtatagtttcttctcttgataaacaatttagaattaccctattgctgtcctgaagggcagcatgggttttagaaagagccgcagattggaagtcagatgtgttagaagtccacactctgccgcttatcagatgtgggcaaacggcttaacgttgctgaaactctgctgctttgtctgtcaagggtcgtgatacatgtgttaccaggctcacctcagaagtttggagtcaggctcagctgtggggcttatgtaaactgaaaactattaaacacatgtattattcaaccattaaaattgtagccactggcggggcgcaatggctcatgctagcactttgggaggctgaggcaggtggattgcttgagcctaggagttgccagctaggacaacatagtgagaccgtcgtctctataaaaaaaaataaaaacaacaactgtagctgccttgggggctggtagaatgggggattagagagtatgaaaccagtatagaaattcatagatctcaaagctctcaagagctatgacagccaggtgggggtggaagatgagagtctgtcttcctgctagcactgctgcccttaggccaagtctcttcacaaagccatttatgccattatgtttgcccctttcctttttggctgcaccctccaagaattatcccttttaactcacataggtgctgaaactccctaaggtattccacattaattcccaacctatgcatttatgattcctgtctccttggaaggcaagaaggcagatatcaactccagtgtgtcgtcgcatttgcacatgtagtatcccatcttgagtattctaggtctctgaagaattacaacagccaaagagaatacaggacgtggaatactggatctctgctgacatctgataacactgaagagacaagtcggggatctctgatgttccaagaactaagtctgggaagtaaaaggctagtgagccctgcttattctgggcattgagaaggtatgccgccagcctgctgaggcagaaccacaaaggaaaggggtgaggtgacagcatgagagtgaagttcatgaagctttctggcctgcaaggttatacaatctagtataatctagtgtaaaaagctacatgatttatgtcatcacccatcttgttcattatagtatcctcagtgcctaaaacagtgcctggcacctggaagggactcaaagatacttctctaatgatttgaatgaattttgtgctatggattatggtactgtctgaaaggagcgacatacacttaataatttctgaaagccctttttctaaccctatgtagtttacagggataccgagatagccacttgggactagttctaagtgactggctgatgggacttcatggttcacagcaccaccctccctccgtttcacgactgactaggtattcagacagaagaggaccctctgattaaagcaggaggaaggacagagtaaggcagtaatgtgaaatcaaagtaacaattacagctgactcaccttgaatagtaatttcacctgaaatgggctcccctgaatccaaaggtcaaatgccttccccaagggcagcaggctggacatgttgagaccattcctttggatttccagtagagaattttcctacacacacacacacacacacacacacacacacacactctcacatacattctcacacaacagacacatgtcagtgctcacagggccttgcccacagacagacacatacccgtagaaacacacatgccatgcactcagacatcacctcacttctcaacagttaatctcacttcacaggcgtgaagccatactcacccatggtttccaacctctgggctttggtcagtgtctgtttccttcctcagcccctcctttccttcttcccttccattgttcgggttggaaggatttggagaggcctatgtgttgagccaaggcaggaaaacacagaagacggtgtgccccagctagtgtggacatgggaggggacagctggtccctgccctcagttcaaaccaccagtcacctgtggggaagggcttggcggctaaacaggagctctttccctggggcttggagtccacctttcccacctctgcagctcagataccaattctatttttttttttttctacattaatgggttgggtttgagaaagtccgtggagcttatttgggagtaaaggatggggggcgggaggatccttctgattgttcgcatttcgagaagggtagttttagcccataactcaccatggagggcccttccaggagacgtcgggcagggctttcctacagcggaaccgggaggccgccccgtgagggcagaagctcccgccaggagccagcaccaccagcagagtgtggaacccccagaggtcctagcctcctccacggggcctcccaggtgctaagtggggagatggggagagggttctgccctctacttggaaatgcctggccgtgttcgtggagcctgggaggtgcggaggagcggcgacgcggccatggcgctaggcgcgcaaaggccccgacaccttactagggcggcggcgggcccgtggcaccgctcccggcaccgaacagggcacagcactggggacacctctctgcagggacccaagacgcgcgtgcgtgtgcgccccacgccaggccctcgctctcttgcggagactccgccgcatcgctggctgcacctgcctctctcttctcggcattacttgggggaaaggggactcttcactggacctttgcagaggtggctgctaccctttggccacataaatcaagaaggcaagccagcctcaccttccaggaacctccagccttccggctgcgtccccgcccctcccgcctggccagctcctcccccgcttctcccagcgctcttgcgcgcctcgctgcgcctctgcgcgccgctcgctgtcctctgcctcgcctccccattctccttccgcatcttctccagtgctccgccgagggcgctgcctgcggggaagagggagactgagccgttagtgaggaagttcggtctgtggacaagtgtggtgccaggccgccgcgaggctcggctgcaacctgttcctcgcccgccggtgctcgccgcccgcccgctcgcactcccgccctctcggcggcgcagccgcggatcgctgttgcatgctgatccggggaggcggcggtggcgagcgctccgggcggatgctggcactcaggcttcgctgctctctggatgctgctcaacttctagcccaagcgcaggagctttgaagtcatttgtcccttttcgcttggatcgacttcttattttgagattttgggcattgcggtttacgcaggaacctcaatatcgctctccccacctccctccctctttctccaacctttggatgcgtctctgctggcagatataaagacccaagtcttcgcggtggaatttcttagatggacttgcaggggctggcgttataaagcatgtcatcgtaaccccgtcctcgtctttgtttatttttttttaaagttcttttgttttcattttcccctccttcccaccccttcccccaaccaataaatcaccaaactgttacctagcgggccggtgcctgcctctctccctgaactaggtggtgcgtctgccagaagaggagctatgtttgaagagcagcctactccacccctctcctctctggtccctgaacaccaccacacactggcattttgaaaaaaatattttcctccagaaactgggcacccccaagccctaccacccgctttttttttcttttttcttttttttttttttccttcttgaggaatggagcttcgcagaggttgcatttagattcaacagttcacagcggcgggctgctgctgctgcctctccgaagagctcgcggagctccccagaggcggtggtccccgtgcttgtctggatgcggctctgagtctccgtgtgtctttctgcttgttgctgtgtgcgggtgttcggccgcgatcacctttgtgtgtcttctgtctgtttaaacctcaggatggctcgcttcggggaggcggtggtcgccaggccagggtccggcgatggagactcggaccagagcaggaaccggcaaggaacccccgtgccggcctcggggcaggcggccgcctacaagcagacgaaagcacagagggcgcggactatggctttgtacaaccccattcccgtccggcagaac

SEQ ID NO: 4542 - DNA, 6000 bp, Homo sapiens
gaggtttaattaattcatagttccgcatggctggggaggccttaggaaacttacagtcatggcagaaggcacctcttccagggcagcaggagagagaatcagtgccagtaggggaaatgccagattcttataaaaccatcagatctcatgaaactaactcactatcatgagaacagcatgggggaaactgcccccatgattcatttacctccacctgttcccacccttgacatgtgggaattatggagattacaagtcaaggtgagatatgggtggggacacagagccaaaccatatcaggaatggacatactgaacacataaatgctgtctcactttgattcttacaacaatctcttgtgagttcagtgtattatctccattttatagatgagaaaactgatgttcagaaataaaaagtgacttcttcaaattcacatggctcagaaatggtagaggcagaatacccacagacgtctctttgactccaaaatcctagatatgattggaactgcaagaaaaggcagtgacattctcattttttaattttaattttcactatgacattttgaataggccaaggtcaaaaatcaaaataaacataaaagtgaagtcctgtagatttcatgctgctagttggagcagaacaatagatctgaaagcaccagaataagggcagtatggaatttttggagaactaaattttttaattatataatttcagtttgcttattcattaaattaaagttaagaggtgttgagtagtcctgcagcatgaaataaatgtattccatcttttctttctattatactttcgatggggcttatatatattgagtgaattagtccattattgcattgttataaaggactagctgagactgggtaatttacgaagaaaagaggttggattgattcacagttcttcaggctgtacaggcagcatggttggaaagacctcaggaaacttacaatcatggcaggaggtgaaggggaaccaggcacatcttatatgactggagcaggaggaagagagtgaaggaatgatttcactcagatgtttatcaaacacatatttagtaccagatgctagttactgcagatattaaaagtgcttacatatttttaagcaaccagatgtcatgagaactcattatcagaacagcaaggggaacgtctggccccatgatccctatcacctcccaccagggcaatcctccaacattgaggattacaatttgacttgagatttgggcagggacacaaatccaaaccatatcactgagtgatgcaggaataaagctaaatgggataaaccatcctatttcctcattcctccagctgcaatgacatacaaattagtatactacattattttccctcttacttcaaacagcatgagtaagtctacatttggaacaagagggcttttaacgggggcagactgtgggaggactgggtggtttcttgattctttcaaattatttgtgaggctgagcatttggcttgttgggatgattcctgttaatgttacagtctgaaattttatctttttatcttaacatctctgtaagttacatcacttctcccccaacccccaagcaccctacatgaatgtggggcctaataatgaaaataatacaaaggggaatgtggaggacaactgctatgtatgaattgatagcaaaaagcagggaagatggcaatccagcatttgggattcatgatgagacctaagttccatgagtctggaaaaacagaagcgctatgcaagcatatatcaaaacatatttaatttattaaacaggcatattcaaactattaatctcccagtctagtaagcattagccagtttgacagaggactagtgctgggcaagatgcggttaaatttgcagaaaactcggaggggggaatgaaaaagaataatcgaattgcgaacaaaatgggaaaaatgaaaataatattcaaaaaaatttgaggaaatttcatctggagaacaaagagcctatgagacagggtagaaaatgattcagaatatagtgaattcatctcatttctcatgtatgtagggtataccctggttccaaatacctggagggagaccaggtgaatataagaaaatgtcagctatttagtaggaataacgatttcactcagatgtttatcaaacacgtatttagcagcagatgctagttactgcagatattatggtgaacagagagatatggtttatgccctcactgagcatacaatctagtttaaagaagcaaaacatcatgtgacaagtataaagatagatgaaagacgagttgacctgggaagcaaatagtaaaacacctgactggccaggattccagggaaatttctgggcagcatggagatttgcagggtaacacctgtgatggttagttttatgtgtcaacttgactaggctacagtgttcagttatttaatcaaacacgaatctaaaatctaagtgttgctgtgaaggtgtttcataaatgtgttcagcatctacagtaagacttcaaaacgagattgctctaggtaatgctggtgggcctatatcacaagcaattgtgagccaaaaattagatttcctggaaaaggagaaattctgccttaagactgaagcatcgactcttgcttgagtttccagcctgccagagctgccctgtagatttcagagggaccttccagcccccatcatcctgagccaattccttaaaataaatctgttaccccacacacgtacacgcaaatgtgtgtgtgtgtgtgtgtgtgtgtgtgtgtacatatgttccatttctctagagaaccttactgataaaataccttagtcatgtaaagttggtgtgtgtgtggtgtgtgcactgagggaaggtaactgcccaggaagacttagaatgaaaaagatttagccagatcaggaagcacattataggtgacctagagactttgtaaggattgtgagaggatcagattcacattttagaaaggacatctgattgtattacttttgagcacataagttgagaaaaatgtgtttgaattccagcaggaaggatattaggaagatttttttttaataggggaaagaggtgctgaatgtattctggaatctagaaaaaattgcatttttatcattgacggtaacagttttgcaaaagatttacaagctttttttcccctacaattacgtctatatttttcactaagaagttcttgtaactgggaaaatactccaatctggccgagcagcagttatggaagaaaaactctagcaaacagcagttgggatgggagggtggaggtcatcaggggattcccgctgagaaagtgggaaggaagagagtttagaaacggattgaagttccactacatcacgtgtgttgttagagaattcgcctattacgacgacagcaacgtctgatctcctggctttcttcccctccttggtgggttccgttccgtccccctgtcgctgcgagtttggctgtccctacgccggggtcttggagtttgggcggggtctggtacctgccaaatacggatcctgatggggaggaggtcggggagcgctaagttcaggctggagtctgagttctcccaccctgctgctcccacccaccgcgcttagaaacctatgtttccagcaaaggggtcttgctctgagagaacctaaccgggttttcttccattccctttgcatctctagatgtcttcgccctggctccaggtgcgttccccatccttttcggtcccggacgttctgcagattatagcgcccagctcatgtccagcaccgccggaggtgaagtggggcgagctggtgactccttaacccttcccgaaggtgtagactggaagaagccagggtcttcattacctcccctactccagggctctcaaggcgccaacggggacacttccctgtacaggtctggggggccacgagggcgaggaggacgccctagtgcaggggtccaaggactcgcgtcccagagcttggtcccacacccggtcccacaccccgaacgctggtcgggaaggagataggatgcagcgcagtgtgatgtggatgccagacagcgagagtgaggattttgcggggtggggatgggggttagtggaaggggctgagaggggaggaggcagcaggtgagccaaggggttgtgcccccaggaagagggaagagaggatctttagaagggagcatcttgcaggggcgacgcaggcaagggtagggctaggaggaggtgcggggaagcaagccctggcggtgagacaggagggggaggaggcgaagaggagggagttccgaaaggagggaaacgagccggcaaggggcgacaggagcgagccgggaagggagagcagcggagggctgcagagctgcgggcgcccggaccgtgccacacaccccccgcggggcacggagggcattgcggggggagacacacaaagacatgcgaagaggggctgaacgaggctcgcgcacaaagacgccggggcgcacggcagctggggctgcacccaccgcccccgcgccgcgccgtgccggggccgggccagcgagcagcccggggctgagcgcgtggcggcggcggcggcggcggcggcggcgggcaggcgcgggacccgggtcgcccgcgctctccgggtgacccgggcccggcagcaggcgcgcgcgggggcggcggcgcccaagcccaacttggcctccgcctcgccctctgcccagcccgccggtgtcccctccttcccgcgatttcgtttcttctcacgctcccccccccgccccctcccgcgtccagccccgctctccccaccttgtaaaacaaagccggggaaaatgcctgcccgtgcagctcggagcgcgcagcccgtctctgaataagaagtgagtacaatggcgtgtttgtaaaaaaaagcttcaagtccgtctttttcaaaaaacattttgaatgctgcatgcctcatgcttcccagcgcctcgcgggagagacccggctatagagcaggaggtgagaccccccctccggtacccccacccctctggccgcacgctctcctgccccagccttttctgggaggactgcaaatgccccctctcagcaagcggccgtttcccatcttcgcttcgcgtccaaagtgttgggtcataatctggatttggaggcaaacccttgccagatcctctccacgccgcttctcccccctctcccgccggtgcccggggtttttgcatctgcctgaggtatgggtttggaacaccttgggggagtttcccatggagaaggagggtcagcccttgggagtagccggcaggcaggactcatggtgaccccggtcacacttgttgcccattgcctggtgggacaggcagtggtgctgaaaaaagcttgcttccgctgctattcagtggtcagtcgccgctggagcgaagacatatctgggtgagaacagaagaccgggattaacagaagactgtgatgagctgggggaggggagtgggtagtgacggtgctgagtgtgtgtggaaggggcagcttctctccctgatcatacatcaaatggcgtggaggtggaaaccaagaggttccctgtattaaagataaaagtctgcttttattttttaaaaatattattttggtatttcatcagtttctgtccattctgtctgccaaatgtacattacatatatttctgctaattaaaaaataaggcaacagcttaaaagaattaaactccttctggaaatgtattaggttaatgcacacacacacacacacacacacacacacacacacactcttaaaaatacctgcccctttccccaaaaagcatataatggccatgtggcaatgtcttaatggaatttcagattgggatttggtgccatcaaggtaaacagtcttagtgctttctggttctgcagagtgtaaaccactgatgtgaaaaatcacaaataggagagcacagagatctgaggagg

SEQ ID NO: 4543 - DNA, 6000 bp, Homo sapiens
ctctaggtacacataccagtggaatcatatagtatttgtctttttgtgaatgacttatttcacttagcataatgtcctcaaggttcatcaaatgtagagcaggtgtcagagtttctctccttcttaagactgaatactatatggctgtatgtatgtatcataatttttatccgtttatctgcggatggacacttgggttgcttccacctttcagttacggtgaatcatgctgctatgaacatgagtatacaaatatctgttcaagtccctgcttccaattattttgggtacatacccagaggtggaattgcaaatgctaactttttgtacttgttgctgattgactggattttcccaaccctgtatttgtaaatttcactttttgatcccaagttcctatagaaccactgtctctacaaattattctcatcatctcaacctgttgaggtcatgaagcccattgatgcccaagtatcatacaacacagtagtgatcatttacatcattagctctacatcagattaacttgcaaggctctgtgccaagcccagagtttgtttctcagaaagcatggtcaccagtccacaaattatgtcagttagaggggacactgatgcaggaagcagaaagaagccatggcctcttcccccactctctttactcccccactcctactccccttgatcccctcttttgtatctctgcactcttctctgagttttcttccatattcccattctcttctaaaacatgcttggggatagcgtgtggcatgctaggtgggggtgagtcagcagaaatgtcagcttgtatggtccctttaatccgtgttgggaggtccagagagaagtagctagtcagcagtgagttacacacagatcatgtggagtaaagatttcaaactttagaagaaaaaattctaacatttccgagattgctaacttctttgaagacaggagcatctgtctagagcagtggcccaggacgaggaaggaaggcagccaacctgtgttatcaggattcccatcaactcagacagccagaacctcagaagtctttgcatttcccagccccatatccaggctccactcaacgtacctcgtcctgcaggatgagatctatgcccccatcagaccacttccatgatatttccagtttctacttgtagtctgaggataatatgatttaaaaatatttggtatccttggcctagttgtgatgtagagctggggcagagtctcagccagagaagtgaactatggagaaaatggcaaatttgtctgaagaaaacttctaataataatttttaaaattcaatgtagtcaagatgcatgttgttccagttatctattattgtataacaagctagccaaaaactcgatggcttaagacagccatctgatgatatctcaggattcaggcagaactcagctgggagttctgttcctgggtagatagacagaggtaagacacccagtggtattcagcaggtggatgccctggtttgagagttgaagatggctacactcatctatctggtgtcttggcgagaatgataaggaagctgggctcactgggctgtcccttgaaacacctacatgtggcctctccagcatgacagcctcaagttaatcagacatcttatgtgatggctcagggctccaagaggggattgttccagtgaacaaagttggaggctgctggtcttttatcatctaaccttggaaattacctagtatcatctcttatgtactctgtcagttgaagtagtcacaagtttcaaggataggggacagaaaccctaccctttggtgagggactgtcaaagaatttgcaaccatatttcaaagctgccatatacatgttgggggaaccagccccacaccaaccggcgggtaccccgagtccagcggagacacaggagttagaaagaggcagaataagcatttaaaaggtgggtccaggggaccgttgtgtaggaggcttgctcatggcccagagctcttgggctccaactaatttattgttttacaagctctttgttcttagggcagatgggagggggaggaagggatgaggaaaaggattaatcagtgaaggagaacttgtgagtcattcaataagatgtacagcagtggtggtctctgtgaatttccttgagcaaaggcgtgtgtctaaactacttaagattgcgtgtgtctaaactacttaagatctttaacttattgggactgaaaggggtgggagcgggtttcaggaggagccaagatgtttgattatactccactgcttccagggcgtgttatctccctgagcagcctgtggaatgcccccgagcagttatgctctcagggcataaagacatgaaggcaataaggagacttttctcctcagaggtcacccatggctccccatgggtgtctcacacaggggagaacaactcaactggcactccagaaactctttttcccacaatacatgtatgtatatttgagtgtgatgatataaccacacctgcacctgcagttcatcacaagtaccccacacaatctggcattcaaagggttgtatgtcttgggaagaggaactcacatcctgttggggaatcacaggtttcatgagtgagccaggtcctgaaggatataaactgtgttacagatggagatggaggaggaactgtccaagcagaaggaatcaggtgagcagagacatagggagaaaaatgatcatgacaggcaggaggagaattctgagggtctgctacggccgggggtagcctcatgaatgaagaggtctctgaacagggcaaataggcaaagatcaaggataggatagggcaagcaagggttacagagcaggacagggaaggacattgtaggatggagacttgagggagaaggaggaattcaagttctaaaagagtagggcacttgctgatggggaagggttcccagaggcggaaggactgagagtggtaagtgcttcctttcaccttgaaaataaggaggtacattttttccttaggggtaagagcaaagggaagaaatggattaccgatgagtaaattttgaagtacagagaagtaaagtggagggctggcttcaatcttttgagtaacgtaggaggtaaggctattgactaaaagtgaaaaatcactgatatatatgttagacatttgcacaagtttctatgaaaatacaaaatatgacttgtttagagaacttcagtaaagtaggcaaatgttcagctaggtgttggaatgattaattgtacaattcagttttgtgtattttaaatgtttttcctgattacaaaaataatatatatccactgtagaaaatttgaaaaatattaaaaggtacaagaaaggaaagtcatctatatactctactattacccaaagacaactgcaaggagatagttttattcctatgcagttgattaataatgcagatgtcattttattttgtaacaaaatacaaatattttacatatttgagattctacacagttttgcttcaatagtctttagacacaactttaatgtgtttaatgtctatatggtgtccatgctgtagagatgccataacttatttaaccattctctattttggaatatttagattgttctgagtcttcattatttcatctataccgtgtgtgtgtgtgtgtgtgtgtgtgtgtcccacatgtgtatgcactatattatacaactacatgtatgtatatatagataccgtctatgaccagtctttgtaagtaagtgcctctctgattgttttttcttaggacatatcactgaatcagaacaaataaaccctttcaaggttcttgagacgtgtcgctaaattgcctttccagaaagggtgtaccaatttttattttcatccacaagcaggcggctcgctgaccctcgcccacatttttgtcactttaaaaagaagtgacagttgggaaagctcagtttcttctggcagttgacacatttgggatgttttttcaccaaaaaacctaaggtcatgttttagaaaattcgaactcagaaataggacttctctgagactctccttttccctcaagtcctttttgtgagggggatgggtgggagagaggagactgattcaaggagccttccaactctgatgttctggtattttcaccgtcattactggcaccagattgctcaatccttcgaccaataagacaaagaaggaaagtacttcagcgcttgctgttttgtaatactggctttgattgggagaaaataagtgggaaacaagagtagcttggacagggggcttggacggccagcgcattgaccagaagcggcccacactacacgcgcgcgaacacacacacacacacacgcacacgccgcgcgcggtcagctagagtttggctactggacccaggaagggagggagcgggaggagctggtggctgtcgggtcggggtctgggcgccaccgagcgcccgccccacctctggagtgcgcagaaggcggtgcgtcccgggccccggcagcccagcccaggcgctctggccaagtttgcgcgcggtctccgctgactctcgggttacctgagccggcaaccacgtcagcgccacatcatctgggctttttatattgcaaggaaacaggaaaagaaggaagaaaaacatcgcccgagagagccaatcgcaggaagacggcgctgcccggaggagcggggcgggcgggcgcgcgggggagcgggcggcgggcgggagccaggcccgggcgggggcgggggcggcggggccagaagaggcggcgggccgcgctccggccggtctgcggcgttggccttggcggcggcggtggagaagatgctgcagtccctggccggcagctcgtgcgtgcgcctggtggagcggcaccgctcggcctggtgcttcggcttcctggtgctgggctacttgctctacctggtcttcggcgcagtggtcttctcctcggtggagctgccctatgaggacctgctgcgccaggagctgcgcaagctgaagcgacgcttcttggaggagcacgagtgcctgtctgagcagcagctggagcagttcctgggccgggtgctggaggccagcaactacggcgtgtcggtgctcagcaacgcctcgggcaactggaactgggacttcacctccgcgctcttcttcgccagcaccgtgctctccaccacaggtagggtatcctgcgcgccccctggccgccccggccacctcgcccacaacccacacaccccggccccggcgccccgggcccctctaaccctcccaccccaccccccacctttcgccatcccggctcctccagcccgcctcccctcactgtcctcccgaccctccgaccttccccttactggcgtccccggcctctgcctgggtgactcgggagggcaagccctgcggagccggaagccagagaggtgactccagacgtgacttggttgttgccgtccgtaactctggggaagtggtccctaacttcggcctgggtggctgcaggtgcttcctccccttgagttcttttttcgcaacccactaagccaaactgtcgggtttgaatgtgtagcagcacctggccgccgtgcggcaaggcagcgggatgatggaaactcaccaccttcctcccgcacccatcccagaggccgaggctgcagtctggtaataataccttctaaagggtcaccttccggagtgtgccgtccctttggaccatgcacagatattccagctcttttgtaccttggaggcagttttgggggtagccgagtgacatcactctgctcttcccaggtgacctctgggcggacaggccgatccggtttcttttcagagtaggaggaagggtgagggagagtaaaggaaccataggattgcctaagatctgacttaattggggcaccctgattcagcagttccttcaacttgaggtgtgcgaggctccccataaacttcgaagcgccacgtccccgtacg

SEQ ID NO: 4544 - DNA, 6000 bp, Homo sapiens
aaagaatttatctaattttctagtctctcataagtgacataatggtacatcgtactggacttaatggtcgctagatgaggagttctcagattctaatcagcagaagaatcatcctgggtacctgctatgatgcagtttccccagctctatgcaagccagtaggtctggggtggggcctagaaatgtgtaaatagtccttactcagactatacttggataatcacagttctaaagtttcttactaattgatttgccaagttcagacgtaataatgagatagagtaaataaaatgaaattttgccatgatagtatttttttcactaataggtaacttcaaatatatgaggctcttgagtcacatttgaaacataagcctgttttgtcatctgtatactttataatcattctccacaaacaccagaatgaggaaaatgacagcatacacaagtgtctggcacctaggcattctctcaaatgtttgtttcttaatttgtaagtttctctaaagtcaatttagacatttatgtagtaattatgctccttggcagatactaatgggatgcttcatcacagagctagttttaagtactttcttttttttgtcagcagagagcagtctaacttgttaaatagagacaagctctgtggcagtgtacaatggctgacacctctgcccacctctctccattggctccacgcatggtggccaggacttcgcactttcgattctccaaaatctccataagggtggctctttcttatcactcaggtttcagctaaaaccccctgctccctcagtgaggccttcctttactatgcaatataaatcaacctctctgcttccacattgcccgacactaacctccctcatatagagcagtaggtctcaaactttagcatcacctggagggcttgcagaaacccagtttctgattcagtgggtctggagtaggacctgagaatgtgcatctctaacaagctcccaaaaaatgccaagaaccactgacatagagtgatggacactggaaacaaactgcacagattttcccccagctctttcactgactagccctgcaactgtggggaaatcatgtgacctctctgtgcttcaggtttctcgcctgcaaagtggggataatcatgcttacctcattggagttgctgtgaagatcaaataggttaacacatataaagtgtttagagctatgtttggcaagaaatgtgctcaatacatgttagctattgtgatttatcttctttctattacttactcctatctgaaagtattttgttatgtgtttgtttacttctttgtagtagaatagaagttccacagatcaagggccttgtctatcttgttcaccactgtatcctaacatctagaaaaatgcctgacacatagtgaatgcataataaatattttatacctagataagtacattttaatagaatatgcagggagatgggcctgggcatggtggctcatgtctgtaatctcagcactttgggaggctgaggtgagaggatcacttgagaccaggagttcaagaccaaccatggcaacaaagtgaaaccctgtctctacaaaaaaattaaaaattagcccggtatggtggcatacctatagttccagctacgagggaggctgaggaaaaaaaaaaagaatatgcagggaggtaattgtattaagaacaaaagactacaggcttataattaaagatcttggaatgatagttgtggtgatttttcttttttttttttttgagatggagtctcgctctgtcacccagcctggagtacagtggcatgatcttggctcactgcaaactccaccttccaggtccacgccattctgctgcctcagcctcccaagtagctgggactacaggcgctcaccaccatgcccggctaatttttttgtatttttagtagagacagggtttcaccgcattggccaggatggtcttgatctcctgaccttgtgatccgcctgcctcggcctcccaaagtgctgggattacaggcatgagccaccacacccagcctcagttgtggtgattttttaaaagaaagacttttgcccttcttcaaatactaattggaagaccgtttatcagggcttctttgttgtcttaccagaaagaatgcttgaattatttaaatgattctaaaaagaagatgtcaccatattaatgtcccactacataagcactatgtaatcctctttgctttcagttcagaagaacactcattacatgatgatctttgatgcctttgtcattctgacttgcttggtttcattaatcctctgcattagatctgtgattagaggacttcagcttcagcaggtagggaacgttgctttctaggaatgctactgacattttgattgacagagacattcactgtgcctcccctcttttccctaaaggagtttgtcaattttttcctcctccattataagaaggaagtttctgtttctgatcaaatggaatttgtcaatggatggtacattatgattattattagtgacatattgacaatcattggatcaattctaaaaatggaaatccaagctaaggtaatttttttcctaatcatgctattgttagtgtcagatttgcactaatggtaatgtatttttccagaatgtaagaattttcagaatgaattgtttcttccaaactgtatatcaagtagacttgaaattggtaatggtaattttcttaaatctagtcaggaggtctcttaggcagagtttttcaaagtgtgatccacaaaccattgcatcagaatcattgggtgcctggtaaagtgtaccatgttagacctactgaattcagactcttcggcggggcctgtgaattcttacacacaccaaaattcatacacaaccaaggtaactaaggtaagagttttttttttttttttaatcttacaagaaatgctcgaatctttaacaaaaatgagtggggctataggggaaagtgaggtcaaggcactatggtgtgcatgcttgcatttgtttcctccgtccattcaaagtgagaatgctcccattttcttactttaccattgatgtgctacaagcttatttattttaagactaacctagcctaaaaatcaactgtccccacaaaataaaaatcacattaaaaaaactaatagtgttcagactaatcttgctcaaacttatgtttccctagtcttgatgcaactgattgagtcacctggggagttggttataaacctgggcagagaccccaaatgcaatggctcagagaagataggagcttatttctgtcttatgcaatagtcagaatgggttttacagactggtgagtagctcaacatctcacagtcattcaggcacccatgttcctcccattttgtttctctgccaccccttaaggacttgccctgactgcatgattattgccgtgttgcctcaaacaggttgcagcttatgggaagcaaaaacacggtatggtagaagctctcccatagactgatggcttggctcaagagtggccgactttatttctgtacatatcccactggatagaatttagtcaatcctaactgcagagggagccagggaacacagcccaggcatgtgcctaggaaggggagaatgggtttaggttgacacttagcagctgccactatatgtggctatagtatgtatcattggaatagatgtttaactttagggacaaataaaaaaccaaaacaaaaaaaggagtaaggggagagatttgcagcaaatctttatttttaccaacctcaactatcattaatttcagtgaaccctaaatggtatccaacaaaatatctttctagaccattcaccgtctctgcctcatagatgatcatatcatgttttcttctcttctgaaacctctaatacccttgtcctatcctcattctaagctgatgaccttacttcctatttcacaaaaataatagaaaaaaaaaacagaatttccacaaacccccacctaatttatctgcctcctgccatcagtgccaatatactgtgcttttcttctgtggatacattatttaggccactattcagggccaacccctccacctgcctactagaggccatcaccacttgtttattcaagggcacagctccaggtagttttccttctcttggggatcatcagtttccttctgtctaccaggtcattcccattagcatgtttttgccgcttttcttaagagataatatctcaaccctaattcctcccgctaacttactaccatcatttatttagtaaaatatctcaaaaaagtagttaatcttgttgtttctgattctgctcctcccctcccccacctgttttttttaagagacaggatttcactctattgcccaggctggagtgcagtggcgcgattatagctcactgcagcctcaaactcccgggctcaagcaatcctcccacctcacagccccccaaaatctcattctttcggtgtctgttccaatcaggctgccctgccactccaaggaaagtgttcttttcagtgtcctctcatgctgataagtccaataaccaactatgtaccctcatgctgacctagcagcagctttgaatactgccaagcactccctttttgttgacatgctttcaatggactatcacctggttttcctcctaagtcactggctggtcttctgactttgctggttccctcacatctcaccaacctattaaggtgataatgcttcaaggcatagtgcttggacatcttctcttttctgccactgtcttggtaatctcatcctgtcccacagcttagtatctatatgccaatgattcccaaatctatacccccacttagaattcttccctgaactccagattcgcatatccaccatttagtctatatctccacttggatgtctgcttttcctctcaaatttaacacacctaaaacagaacatctaaagcccccacctctgcagtcaaaacctgcttttcccatagcctttcaaatttcggttaatggtaactctcatcagttactcaagccaaaaatcttggattcatcacagactcctctctttcactaatctcttctttcccacatctaatccaagaggaaatcctattgttctaccttcattggccaggcactgtgactcatataatcccagcacattgggaggctgaggcgggaggatggcttgagcccaggagttccagaccagcctgggaaacatagtgagaccccatctctacaaaaaattaaaaaaattagcagtcaaggtggcatgtgtctgtaatccaagctacttgggaggctaaggtgggaggatttcttgagcacaggaagtcgaggctgcattgagccacaattgtgccacggcactccagcctgggtgacagagtgagacccctgtttccaaaaaaaaaaaaaaaaaaaaaagaataaaaatcacctggtcaactccactattaccagcctggtccaagctactatctctcatttatattattgcaatagcatcctcactcctccaacaacctgctgtcaaccacagcagccaacatctgatcatatcacttctgtttgtggttctcaaatctccccaattgagttacagtaaaagacaaacttggtgagtgccaccttatctctataactgtataccctttctattgctcactccagccagatgcaatatccttgccaagcaccctcctgtctcagggcctttgcacttgccagtccctgtgcctggaaggcttctcccctagatttttgcatgacttctccctccctcccttcagatctttgctcaaatgccttctttttagtgtatgtaaaatgacaaacccatacccattccttatcccctcctctgaattttctcttcagcaattatcagcagcaagtgtcccaaagtttctattaacttatttctgttgtctctttcttccctccactagaatgtaagctttatgagagcagagactttt

SEQ ID NO: 4545 - DNA, 6000 bp, Homo sapiens
aggaggctgaccttgactttggaggtaagtagtgggctggagtggaggcccatgccacttccaagggaagttctcaaatgtcaggcagatgcacaacacaacatcagcaacaacagtgacattaacagagtcctgttccacactgaccaggctttgcttctccatgcacctccatgggtattatcctctgtagtcctaaccaatgagatgttaacacacactaacaatgaaggtccctttccttccttccttccttccttccttccttccttccttccttccttccttcctcattctgtctttaagccctatgaagcaagggggtgggcggggctagtgtcctacctattttataagtaaactgctactcagaaaggtcaagtgagtgagcttgggtcgcacagaccacggccctggtcagatgccttgccttgtcctcccctttgggagcctttgggtcctgactcttgcaccaccactgcctcaagtccctcagttaaggtatgaacagttaatcaccagcaccaactcccttctaaaccagattgcctgtgaggtcaggttgcctccaggagagacgacccctggggaatctctgttcctgagaccagaaattgagcccagaggcctggcactgagctaacagtaaaagtgggcagtagaatggcatggtgacttataaagtcacacagtcttgatctgttccagcctcactactaaccagctaaattaccttggtcctctctgagcttcagtatcttcatctgtaaaacagagacaatgatatctttcccactggctggttgcaaggattaaatcaaatgatctctggagggctgtcagcccagtgtcctcctgccctgcctacctgtgagtgagtggggactgtgccagcacatgggtggatgggctggtggggagcatcaagcagaggcagcagtcatgccaggaaggggagctggttccctgggagtgacacctgagaagattcacaaatgggaagaactaagagattctccctccagtccctctgtgtgggtgtgggtgtgtatgcatacacagtcataaactcttcttttaagatgactgtagtcaccagtcactcactgtgacagccaccacagcccttccctctgctgaaggcagggcctggctctcaagcaggaaaccaaaccaaagggaagggagtggtctttggggattttcaccatgccccagggaaaggatcaaaggacactctggctgctattgtgtggccaaaaataagaaatggagcccaccatagaactggaaagggggctcagttaagttagctggctgtccattctttatagctaattttgtccttactaccctgtaaagtagctttgctctcccattcgaccaactaggaaacgaacagtaggaggctcagagagtgtcagtaacttgctcaagttcatacagctagcaagtgttagtgccgggaatacggcctgtgttcttttcctatacagcactgccaaaccaaggtactgacagacacttttcagggcagaagccctgaaatgtgcctaaacaactgttatgatggttcttttttttcccccttctttagttaatttctttttttgtcattgttcacatttaagtttaaaggatagagacaggacaacatacccctgaggccaagtcacaaaatagaagcagaggtcagaggaagatctcaaagagggaaatgaaattcaagagctgctcattccacctgcacagtgtggtgtgggggctaagggcacatgtcctagaatcacaaagacctaattccagtcctagagtcaccatttattaacctcaggcaggtgatttcacctctcactgcctccatttcctttccaatgaaatggtactaatgtatacattgacttctagggctgtgagaattaaatgttgccctgggtaagaagtgcttagcacagggtctgacacatggtaagcccatgtcaccaattatgacgattgattttccttcaagggcttttctctgtccacagcttctgttttcaagaaggaaggcaaaggaaatgtatacatatgatcagatggatagagtatctgactttggccacacaggattatctgactttaaatgacacgagaacccagtgtgccaaataggagaaacagagccccttggtgctggtcaggggaggctttcagaaggagtatatagggaagggaactggaggtcaatttggtagaggggtgggaatggtgagatctcaaggaaagtaaagggcggggcaatctgggaagcagagggaatggggcaacaaggacctggtgattgggagcctagagaaacaccccagagctaagctggaagctaagagctatgaggagagtttcacaaggaagcagagcagcgaaatcatcatgcattcagtgtctgctggatgctaaactcattcaacaattaaaacctcaccacacccttaggggcatcctgatttttcagaggagggcactggtgcccagagaagtgaaataacttatctagtaactgttagggagttacgtttccatctgactgcctccaaaacacccaagccgttcactgactgggacactaacaggccaggttcaaggtgctctaaaccataccagcccttctctatagtcatctgtcatcctttgggcccacggaggtcactgccctcccagaccaccccctgcagctctaggcaggctcccagtcttcaaccacacctcacagactaccacgatgaaacgccagaatccggagtcccgcttcatgggctttcagggctctccccacgaggtacacgcatagagaggagggtttcccggccggagggtaggggggagggcccagtggggacttcctggtgctagagcccatctgaatccagagctccgtgtctaccgcagtcttatctcaaggaaccaccactgtttggcacacctgtctaggtgaccctgacagggacctggagaacagaactagcaggggcttgaggctgtcgtctgcctcccaaaagcaccctggaccttctcggatgccctatctaggcagaaagtaggctgtgcctcccacacacatttcccgaaagcaaagggcatcctcgtctgcccacctagggtgctgtaagctgcactcctaagttcagagccctgtgggccacctggctttgcaagttctgccagagggcccgttttgtgagtagctgaccattcccaagggcagcggcgtgtcccccagccttccctgcccgggccctgggggagggagtcggggagtggagagggccagccctgcagtgctgcctgttcctgcggctcctctcggtgggggcgaacacagcagaagagtttctgccacactgcggaccgcacctgctgcatttccctgcgaagccaaatctttgctgggtaacagggaggtgggaagccgatctggagaaggggtcgcgctggcgggagaaagggcaagaaaggggtctgcagatcctgtctggaggcaccacaataatagcaacacgtctctcccggggctggatcccgctgtgggcctggggtagctgctattgattatctcctccttgcctacttcattacgttggcaggagcctctcaccagtgcccctcaacttctgccctcccccatctccccggcccggcagcacccagctgagctctcctggaggttctggttagtaagtcgggctctgccaaagaatgttttcctcgcggggcgggggctgaggcccgggggcccaacgaggtgacgagctcggtggcggcggagggcagcttgtcgccccggccccggccccggcccccgccggcccctttaattcgagttcgccgtcgagccaggtgcggcgctgcgtggcgcggtgcggctgcgggcggcggccgggagctccgtacgcgccgcccgcgggactgcagagccggctcccggctggccgcccgcaccccgccgccgcccgctgccggggttctgccggcgctggccgtaacctaggaacatggaggccccggtgcccatccggaagggtaaatccgtgtcggggcgttgcgcggcgcgtgctgccttccctgcccggctgcggcgcccagaggggctgcggggcacccggcggcgcagcctgcagcgcagcaggcttgggctgagtccgcggcggcaagcccttgccgaccactgccgtctgctcggcaggtcccagaccggggagatcaaggggaacttgcaccctgctcaagaagagtgcacagaatgggctcgggaccctctggggtttgcgtggcgcggggcggagggcacggagaggagctggtgggtggtgggaagtgcagctggcagcataaccatgtctggtaaatagcgcgggttggtaggacctgaaccacttgggacggccgggctgcattcgcctcttcggcacagaataacaaacggctttgctgcagagagggctttccccttcgctggggccgtgggctgccgccgagcccccgcgcttaaaaggaagctgagatctggggcggcagcctggcgcaggctactccccacccccagagatcaggttccgggattttgggttggacactgagcctcggcggtccctcggctggacgccgggggcttaagagctgaactgcgcttgggcccgcagcaggagccgaccgcgcgggcaggagggggttaaggtggcgctagcggccgcggccagcgggagggtctggtcctctgcgcggaggcgagcgctgagtgcgccgaacggaatcccggccggagcccggggcgatggggagagggcccagacccctccccgccctggggccggcgggattgggtcggcagggggccagtccggaagccggcttcctccaggctccccctctcgctgctgccaagccgcctcgcagctaggcaggcggagcgtttattctgtgctccctgccgaggagatgtgagggattttctcttgggggagaaatcagtggtcgagcgcctgcccagctcaaatgccacccggctcagagggaggcctgcggcccagggatcccggagggagagtaagttcatccagttttcgtacagtgcagactttgttgtgtggggtctccctagatgcgctctgaaggagtgtgtgtgctggggggtggggtgcttcttttccaggactggctgaggtcagagcttgtagacaggctgcagtgagctaagccctcctcttgggagctgctgtgtcctgacatgtgggggtaggagtgcttcttccagagtccttcctgagagcagctggggactagcaacctggatcaacccagggaggcccctggagaaggcaggcccagccaagcctgagtcttgctccctgggagaaaatgcttcaagctgatgggaagcctgcccagaagaggcaaggaggctgagggatagtcctcaggcctggcatcagaatagaggatgggcatgggggcctgttacctcccatgagggaagctgccagaccctcctaaatcttggcaccagctggttcaaatgccctggttccaccttgctgctgtttttttccaggcaacgtcacacctcctgaggacagccaggactccagcttttgctgagctttgcatcttgcctccttccttcaaaaggctccaggcccatgctcggctgtcttcaagtcccgcatgcccctggccaggcacctcaccgcccctccagcccagcccaatcctagagctcacctccaggacccagagtctgcccttctgcccagaatgactcaccattatttctagctcgagtgagaagacgtgatgaggagttgggctgcctgttggtgcatctcagattcctgcagcatctgatcagctctgcaaggaagagagcttcacgtctctggtcaggtaaatcaatctatcatttaataacagccttgtgtagaatcactggggtggaggccaatgagaaagacccaggcccaagct

SEQ ID NO: 4546 - DNA, 6000 bp, Homo sapiens
gcttacacagggccaaaagagcaagtaatcaaaactcaatatcaattggctcgaagggcagagttggttgcagtcattacagtgttacaagattttgatcaacctatcaatattgtatcagattctgcatatgtagtacaggctacaagggatgtaaagacagctctaattaaatatagcatggatgatcagttaaaccagctattcaatttattacaacaaactgtaagaaaaagaaatttcccattttatattactcatattcgagcacacactaatttaccagggcctttgactaaagcaaatgaaccagctgacttactggtatcatctgcattcataaaagcacaaaaatttcatgctttgactcatgtaaatgcagcaggattaaaaaacaaatttgatgtcacatggaaacaggcaaaagatattgtacgacattgcacccagtgtcaagtcctacacctgcccactcaagaggcaggagttaatcccaggggtctgtgtcctaatgcattacggcaaatggatgtcacgcatgtaccttcatttggaagattattatatgttcatgtaacagttgatacttattcacatttcatatgggcaacctgccagacaggagaaagtacttcccatgttaaaaaacatttattaccttgttttgctgtaatgagagttccagaaaaaattaaaactgacaatggggcaggatactgtagtaaagctttccaaaaattcttaagtcagtggaaaatttcacatacaacaggaattccttataattcccaaggacaggccatagttgaaagaactaatagaacactcaaaactcaattagttaaataaaaagaagggggagacagtaaggaatgtaccacgcctcagatgcaacttaatctagcactttatattttttaaacatttatagaaatcagactactacttctgcagaacaacatcttactggtaaaaagaacagcccacatgaaggaaaactgatttggtagaaagataataaaaataagacatgggaaatagggaaggtggtaacatgggggagaggttttgcttgtgtttcaccaggagaaaatcagcttcctgtttggatacccactagacatttgaagttctacaatgaacccatcggagatgcaaagaaaagcacctccacggagacagaaacaccgcaatcgtgcgccatcgactcacaagatgaacaaaatggagtctcttatatctacttctttctacacagacacagtaacagtctgatctctctttcttttccccacagctgaggcaggagaatcacttgaacctgggagggggaggttgcagtgagccgagatatcacatcattgcactccagcctgggcaacaagaattaaactcagtctcaaaaaaaaggacaaatgtataatttaaatcaatcgttcctttagcaatcatagtttttacacattattcttaagcagagcttggaattagaaatagcttgatcagaaagtatttcccaaaagaattattcatcttttagatgaatcccaaagtgctggggttacaggcgtgagccaccacatccagcctcattcgccttttctaaaaacatgcttgagtcttgcctattccccaaaagaaaatctgctgctacagctctgccctttccttgctttactgttaaatattgctaccactgttcaatattggtaccacctcctcgctccttaacgtcttgcgattgacctctatcacctccatctttaatttctgtatcacatttaacattgacaacctgccctccctttcttcatttgctttccatggctcttctctcttctaattctctccctaccactctgatcatttgtatgtcttttgccaacttttccccacgtttctgtcttgggagttttttttttttttttttttttaagagacgggttcactctgttgcctaggctggagtgcaatggcatgatcatagctcactgtaacctcaaactcctggcttcaggcgatcctctcaccttgaccattcaaagtgttgggattacaggtgtaagccaccgcacctgactggaacctctttttttcctacattctcctttgtgatcccatcaacttccacaactttacttacatttatgtgaaaaagtccaaaatttgtacatcttcagcgtctacttttctcccaaactcccacacttacatttcctagaacccttaaatttcagatatggagatcttagaggtcatttatcctaagtcttcattgcctggatgtctccaccaaatggttcattcgcttttaataaagtccatgttttcaggccgggcacggtggttcacgcccgtaatcccagcatttgggaggccgaggcaggcaggtcacctgagttcaggagtttgagaccagcctggccaacatggcgaaaccctgtctctactaaaaatacaaaaatcagccgggcatggtggcgcacacctgtagtcgggaggctgaggcaggagaatcactttaacccgcgaggcagaggttgtagggaactgagattgtgctactgcactacagcctgggtgacagagcgagactccgtctcaaaaaaaaaaaaaaaaaaaaaaaaaagtccatgttttcaaaactgaatgccttattttctctctgcttttcagctccattcccaaattgactcctcttcttgaatttattgtttctataaataatcaccttgaggcacacagtcttctcattctctattcagtcagctgctagtctagtggattccattgtcacagactctcttggttaggttcactattttctattcttaactactacgtttctaggttaaatcctaattatctcccacctaacgtttgcagaggactcggctagactgttcatctctggtagttttctgcttggaattctgagtctttttattcattaccaccaaattatctccataaagagcacttcttatctgccactctttttttttttttttttttgagacggactctcactgtcacccaggctggagttcagtggcgagatgcgatctcggttcactgcaacctccgcctcccaggtaaaagcgattctcctgcctcaggctcctgagtagctgggactacaggtgcacgccaccacgcctggctaatttttgtatttttagtagagacggggtttctccatgttgaccaggatggtttctatcgcctgacatcatgatccaccctcatcggcctcccaaggtgctgggattacatgcgtgggccaccgtgcccagccttgttttgtatttctagtagagacagggtttcaccatgttggccaggctggtttcgaactcctgacctcaagtgattcgcccgcctacgcctcccagagtgctggcattacaggcgtgagtcaccgcgcccagccaggcctgtaagctttctaagggcagagactgccttactatacacgtaccccccccaactaacacagtaccatccacatacagacagacgcccaggaaatgttaaactgtaattctggataggttaactagtattaaccgtatttaccaaatgtttaccacatacttacactgtcctccttgtttcaaggagcgtagtccccaagggatcaccctgatggaatataaaaactacacataagagtgaaactacggaacgtaagccattagtgttttgcaagacagctcgggttgagactcagtctctctcttccacaggccaagtgacacatcgtaataccattggtaccgttttattttatttttcgcgacaaagtctcgtcctgtcacccaggctggagtgcagtggcgcgatttcggctcactgcaacctccgcctgcagggttcaagcgattctcctgcctcagcctcccaagtaattgggattacaaacgcccgccaccacgcccggctaatatttgtatttttagtagagacggggtttcaccatgttggtcaggctggtctcgaactcctaacctcaggtgatccgcccacctcggcctcccaaagtgctaggattacaggcgtgaggcaccgcgcccggcctgttagtactactttaaaatcgaatctgacctccaaatcattttctggagctcgatcattttctgctaacaccgcaaagcttaatcctctccacctgagaataaaaggttccatccttccgctctccagtttgacgccctgctaagtctctcggacgcggtgggctggagtgaaggaagccggagcccaccaaagctgcaaaagtaccacagccagcagccccgcccccgatatcccccacaggcttccaattggtccttgtggctcactctctttccaggttggtgttccagcttgccggtcgcctctatagagcccacctttagacggcgactattggtagatcgttacgtcattgccctatctacctcactcccactggctctcataggaaggggcggtcgcaacgtcacgggcaagggccgccattttgactgagcaaccctagtgacaggagccgaagcagcagcgcaggttgtccccgtttcccctcccccttcccttctccggttgccttcccgggccccttacactccacagtcccggtcccgccatgtcccagaaacaagaagaagagaaccctgcggaggagaccggcgaggagaagcaggtgaagtggaaggggtgcgggcgggcgagctggggagaccgtgatggggcgggagacggtctcccaccagtgcggattggtcgccatggtctcaggctccgcaggggttggccactttttgcgtcacgctgggtgagcttcaacacgacatgctgctttggcgctggttagttgggtcgtttgtcactcagtactgtactcttcctgattggccaataggcctaccgctcaaaccttggacgctgtgctataattggccgagcatggacgtggggcgggtggttggaaagacggtgaatggaaaggggatggctggtggtcttgggtgtgatgtgtgttattggtttgtagaggtaagtgacccagcaaccgggctggggcccgcagcctcaatccgcaaagataggggtcgaggtaaagacgtttaaaaaaaaaccagtattgggggaggggagaagtgtagttattataatggctagtttaaggcggcaactttctcaagagacctattttagtagctaaggatggtctattgctcaccttcagtgaggacccagcaatattgaagagggctagagttccaaacagaatcatggtaattaaacttggaaaagacgccgacagggtcgtgagaaagacacttctctcttcccctagacttccaaggcagggacttagtgcacctgcgattccgtgatggaaacactaacgccaaataaaccccttattggggtttgtatttgacttttaaaatttagtactgggttcaggtactcattaaatacacttggtgttatatctatgcgtaatttccaagagaaaggaatataattccactaaaaagagtcatacgttgacttcatatcttttcaaaaagtcactaaagggcagcagggaccacaaaaaaaaaaaaaagagattgactacagtagtgagagtccctgcaccaccagggtaggtattgatttttttgatgaaaactggtgggtaaatactagtgagcctactgtatctttgttttcctgaggttaaaaacagtatcattttcctctctgtttatcagcttgctaccataatatttgtggaaatgttgaagcaaggctgtgccattactcaggtggagatctttggagaaggccacatagctagccgcctccacagggagacctaacaggtggcttagaccttgaataaagaaggaactgctttgtcgtgtagcaattttaaaaaagaaagaaaaaaataaggaggaaacatttagcaaactattttttgttgttgtagagacggggtttcaacatattgcccag

SEQ ID NO: 4547 - DNA, 6000 bp, Homo sapiens
actcccccaccatgctcctgtctcgcctgccccactgatttcctgcccctctgctcctctctgtggcccctgcctggcctcgttgctggggtaacccaggtggcagagaggagttggtgtgaagatgcttatccaggctgccctgtctgctcccacagtgtcttcttttcccacttctagttactctttcttcagacaacctcatgggaggccgcttctccgtatgcccaggggagcctggtcgtctggccattcactctttaaacagaatggccaaggccaacttgtctgtctctttgcagacctcacagaggtccctgagtccatccccagcctctagaccaaatgattgagtagtatcactggaaccagttctgatcctctgctctccctggtcacggaagccttgtctgcagaagggcagagcagcagtgcaggcttggctagccaagtggctctgcaccttctgtttggacccaggtgctgctttgggataggttgttggctgtcacagtgtcctggtatttttgagaagatgcctctgggtactggtgcctgtgtttcaggccatggtggaaaagtaggagtaggatagaccctttccagccctttccatggaccctccctgtggggtgacctgcaggaccaggatgcagaaggcaggagactggctgagagcctgcgagcccactgccgagggccctaggcacacattttgtcttcacaggtcacactgagtgtgtcggcccacaggagggcaagcgtgaaaatggccttttgacagcgtgaaaatggccttctccgccacccgccccagggtggtggtgactttatttataatctttgtggacagtctgtaaatgagtcaaacatctgtaacccacagggggacagctaactttttatatatgcttctcctttgcgtgtcatcacactatttataactgtcctggggaaagacttcatcacacatccggacttcccttccccacaggcggcattacccaggtgctccgccaggggcatcctggctggggcacttatctcctgcacagcctaagtagaaaggcggctgatgcctcgtatttctcttattgtgcttttaggaagagggatttgtaaggccatggtcaaaagatctgctttaaaaaaatataaggtaaagaaagtcaaaatgaaaagaaatttgagtaacctctgtagagaatctggggcctggatggaaatgtaagatcagaatagagcgcttcagctctgttgcagttatttgtgaagcacatttgggggagaaaatgagtgtgtgcgggggttgtgaggggcggctgtatattgatgaaataccactttactcagctcagtgacaggcaggccagcacattcatttgtagttctttttcttctctttctttcaaaaccccaaaaggagagcaagaaagcaaggcacctattcctctttaaataatgagggtggggaattctgagactgtgcttttcccaggagctgtagggaggaaaattctagtgccttttcttcgggtgaggaaagtccggaggaggcgaatgggtttttaagtgccccctcccccgaccctgtcattccacccccaggagctcagctgggatctgagggaaaggaggggaggagcagctgggggcagggaccacgctactttctggtcacccagcacttcgctgggctggccgggatgttgctgagtgacaggagaggggaaggcaaggaccatttgctgagtgctgggctggctttacattacacccgggagtacaaggagcaggtcgtgctcaccgccccctgtgtagatgaagtcaccgggccacactgacactgccagcggtggtggcactgagataagaacccaagcccgtttagctcccaagttcatgccctttcccttgcctgctgctgcccatatccttaaaagagaaaaattgagtttatggcactgagacccgtgatgcaaaatgttggaacaggaggaactttaccacgagctgggcaggaagggcttgatggagggcgggagatgctggcgcaggtcctggagaagacagtgctggaggggtggccagggcaagtgtgggcaccccaggttggcctgggatcagggtgagattgtggactggcccaaggtcagttcttgatgcctcctctctggggtctggtgctgctgccctcagggtgataccgggcaggttgtgaggagggtaggtgtggagaatacagggaaaatgaaagcccttcctgcaaaagctccttccacagcccctagcacccccaccttccacccctggagggccagcaggacccctagacctgactggacatgtccatacataactctctcacccctcacctccaccttgctcttctcttaggctgcctttctcctccagcactggctgtgtggctgtttatcgggggacagtcacatgagctcagcatcttacatcttacaaggcattttcacccctgggtccctcatgaccctcacggtggctggcccagggctcatgatgaccaactatctcagggatgagaaaactcggctgcacaggggttcccagggttgagtgcctcactccaggtgcccatctcaggaaagagagggttctagaatgagagctcaggtctcagtacacttctgatttccctattccaaaccccaccacaaacttctgctggggatttgagtgagggacctcgaagggcttctccattcctggttctagaagtttctttttcattcttgagtcccattttcctgcgtccctgtctgtgcctcatgcctctgttgagctctgtcatgggcagtgagtgccgagaaaaggcccgtctctgctttgagcccctcaggaggtgcttctgcctcttgcttccagcttgttgtgtgatctttgtcgagtcccttcccctctctgggcctcgtttctctggcctaaaaacaggagctgaactcccttcctgtgccgaggcttcgcaatctgattccagatcatgtttcatcacgaggatgagcagccacagtccggagagtcctgttcttaggggtgtcagacagcacccagatggcatccatcccaggcggacggtggtttatggtgttggtgcttgggaggactgaggaaggagacagtgactcagactggggatgctgggtggattccctgtaggaggttggggggtccctgaaggactagacaagccatgatgggaggggctcgggcaggggctcaattctgagtgtgagaagcccggggagagggggcagagtgtgtagggaatagagcaggcatgagggcagcttcaggttgctgccgtgtggtgcacacaggggcatgtagggaggaaagaggagactgtctcgtctggagaggctttgggcaggcagtgaacacaggcccagggcgagggcacagtgatggatggaatatttggtagcatcagtaaccaccagggctgcagagttctgcacactcaggccccgaagacctgatatccttccttttagaggtggccaggcttggtagttaaggacttggggccaggcgcggtggctcatacctgtaatcgcagcactttgagaggccaaggagggtggatcacctgaggtcaggagctcgagaccagcctggccaacatggcgaaacctcatctctactaaaaataagaaaattagccggacctggtggctcacgcctgttatcccagctccttgggaggctgaggctggagaatcgcttgaacccgggaggcggaggttgcagtgagccgagatcgcgccactgcactccagcctgggcaacagagtgagactccatctcaaaaaaaaaaaaaaaaaaaaacttgggtggcacaccagtgatgggcgctctgggaacttactgaacccaaagcctatttcctcagtgttaagagggaatcacaactactggctgtagcacagcagccaccacagagccagccacacactgggtctcagcagctggcaactgttgcctttattagagtggtggttagaagatgccacctggagcatcaagacaggaggggcatatgcgcccatgtcacccctccactgtctgcaggtgtccctgcctggagagcacgtgtggaacatgccccttttctcatgagccaaatggcttcccgtccgtgacaagctccccagtcatgtttctggatagaccttgttgggtgaatctgtgtgagtaaaaaggaagtgggctgttctccggagggcagggctgcagtggtggcctgggctggacttctggagccttcttaccccatggggccctgttattctacactcagttagcaatttgtggtctgggcagagctaaccgggtgtggacatgcaaatcggacaggtggagagagaacaaaaataaacccgtggggccaggccagaggctgagaggcctggaggaaggtcagggggacacacgatgaccaggcagaaaaaggctgagagagtagggccacagggagagccgaactaggaagctgacctgggacagaagcagggaagaaaagcattgccacagcttgcctgatgcgtcgtcaagagaacacaatttccccttcaagacttgagtcagggtgcttcctagaattctaaagattctttctgccccttcaccctgcttggagcaccagggctgtggcagtgggtgacgttcccagccaggtgccagggggcaggcagcaagagcagctgggcaggggagggacgtgcccagggcttgccctttgtggaagccatatctgtttcacaagccctgggcacagggtaaccagagttgtattctgagcagagccttgatgatactaaatgaacagcatgcaaatgatgtgtgaaataatatgcaaattggcatctgttatttttgagtcagcttgttgggcatttttcttaaaggacaggagtgctgctcagtgtcaaattaacaggaaagtcagcttaaaggacactccttgcagggactgagctggcacctactccttagagcttgctgataccaggcctgccacgcgacatctgcaaggacagttgtttggtgttttgcttcaggttatagatggagagacctataaaggtgggtgccctgcccaggttacccagtaggtagggaggaggaagcagatgacctgttgcctggcttgagccattgaaccttgctgacctgtcagtggctttgagctgagggggccctgcagggaggcagggagaggctgcccttgctcattctggtccatctgccaccgttggttttccttaagctctgtgcctcaaactctccgagcctcagtgtccccgtttgtaatggatgtggggagactgacatccactaacctggggaggatgacacttgctagtggttggtcaagtggccagcctggctgtgggtgctcctgggctgccagcaagtggtggctcctcctagcccctttgcctgagttggcatcagcctgcctcctcgcaagcttccactagcagcgatttttgcagagcaaaaccccttttgagatttctgattttaacgaattggagtttagctattttctttcttttctggcttccagtgggtaagatgttggctccccaaaaatctcccatacatgggaatggccggagctgcctgcatgggtgatgttaccttctcccaaggtgagggcttggggtaggcatgttgctcagggttgagccaccgcctttggagggctcagagctggatggcattggtggaggatgcaggggaggcctcctcaggggggcaccatacctgccctagatggccaagctctgtaggccagccaggtgtgctagcctgggtgggcaagatccctgcatatgcctcccagccctgtgaggaaggcagggaaaggaccatcctcctccttataggaccccaaggcccatagaagttatgcggtggctcacacctgtaatccagcactttgggaggctgaggcgg

SEQ ID NO: 4548 - DNA, 6000 bp, Homo sapiens
gcgcgcttccctccccatgtgccacggcccagggcggcaggcccggctgagggcgaccccggtggagaaagaaccccgaccctcccgcctcccggctcccgccttgtcctccgctcccacgccccacccggcccttaggggaggcgcggcgcggcccgggcatggagcgtcccgggcccctggaggctcagtggagggttgggctccagggagctcagagctctctcgttcagggacccgagagtgacacgcgtggcatctctttgcaacccacgtccgcgccgcagcaccctcccctgcaggtgcctgcccagccccgggatgcccctgacctccccttggacagactgcagaaagcgcggggcgctgcgtcctctccacctctctctgaccccagacacattgggagagagcggtaggtggcggggcgctggggtgggacgctgggggcaggcgcgcagcccaccgcctccctgagaggccgctgaggacagcggggagctgagggtggtcccctggtgggggatcaggaggtggacctcgccacctggctgcctgtggccctctcctttgccccaaccctgactgcctctcaggaacaaccacaggtcagcaaggtggctgaatattgagggtcagtcccgctgtggctacgggcagagggcaggctgtgtccatgctcagccctgactctggccctctgggacaccttggtgggtctgagacgttgctgcaggccgtggggcagaagccaggaggagtgtccacgcagcctcagcccgtgggaatccagcctgcctccattactgccgtcaccggctccaccttcggagaacatctcagcatccagcctccttcctctgcctcctctcaggcctctgccgttcccatgcagggcaggccaaactgttttcacagcatggaaagttatgtgagggaagccacaccggccgcagatacaggcaccagcacatccactcgcatgcacactcacggctgtggcccgcggcagatggaggcccgctctgccttgtctgtccctcagtagtgtgcgatgacagcacacctgtgggggccctgcagctgggaagactgcagcgaggctcaactcagaggcccctgctcaggagcatggctgagtcacaccccagggagaaggtgccccggacaggtgtggccagcacgtcttgccaagaccccaccaccccacccacccgcatctgtggccttctggtaagcaggacacaggctgcccaggcctctagccatagagccgatggccttggccagtgggatcggcacaagcagctaggttggtggcagatggtggctgtaaccttctcaaccctgagattgccctctgagggcaggagcagcccttctgctgtgggccagccctccggagggacttcctctggcagcttcaggaataggacaacagggaccaccctcagcatcttgagcagcggggggcaccctctgctttggcaaccaagaaaacatcccccaacccagttaccacctcctgcccccacctcctccagcccccagggttggaccagaaagccttggctgcctctgaacagcagggattgtctggccaggggatgcttgagggacagagaacccagcctggagggtgcaaactgaggaaggtctcagtccctttagaaagtttgttttgccaaggttaaggacacacccatgacatctcgggaggtgcccaaggtgcatgtggcacagctcgcttttatacattttagggagacatgatttatttacacgggttcaatctgaaagagcaggataaattggggtggtgtggggagacctctatgttataggcagattcaaaatgatcctgaccgacagtggttgaaagagttattatcaatagaaaggaatgtctgggttgcagtaaggggttgtggttttccacgcagctgaagcctcgggttgccggcttcagagagaatagattgttaatgtttcctatcagacttaaggcctgtgttgatgttaatgctagtcagcttttcctgaatttcaaaagggaggaggcatgacccacgaccccttcccgccatggcctgaacaagttcccaggttaacactggaacgcccttggctgagaggaagggtccatttggacggctgggggggccttagaatttaatttttggtttacattcacccccttctggccaagatttgccagaggcaacatccatgtccaccaaatctttattgtgtctcagcgttgctgggcgagtgtggctgcccaccctcagtcaatcctgtccctcagtttgactccctatgacccagggacttacagttaaaagatttacagcccattaaattttgtaggccagataggaatggacatggaccagcattcattacctcttaaaacaatttttttttttaaagttggagtctcactctgtcgcccaggctggagtacagtggcatgatctcggctcactgcaacctccgcctcccaggttccattgagtctcctgccccagcctcctgagcagctggaactacaggcatgcaccaccatgcctggctaatttttatatttttgtagagacagggtttcaccatgttggccaggctggtcttgaactcctgacctcaagtgatccgccctccttggcctcccaaagtgttgggattgcaggcatgagccaccacacccgatctatcatgtaacatttttataaattccttttttaccaaaggtattgcagcttacacagaccgttcacgacatgtggactttctagtttgtgctgaacatccctttttttaaacaaccagtcatttatttaaggacaaaaatttaccatacaagattctttctcatataaaattattttttttaaccttacttaacaaaaagacctctttatatctataactttccttggtctctcttatttccttgttctttttaactcattttatacataaactttaaataagctttgaattagacaaaattatttaccttataataagaatttttgtagaaagaacgttttcctataatttttttttttttagatggagtctcactctgtcgcccaggctggagtgcgatggtgcaatctcggctcactgcaacctccccctcccaggtccaagtgattctccggcctcagcttcccaagtagctgggattacaggcatgtgctaccacacctggctaatttttgtatttttcagtagagacggggttttgccatgttggccaggctggtctccaattcctgatctcaggtgatctacctgcctcggcctcccaaagttctgggattacaggtgtgagtccccatgcctggccttcagctgggtttagagttttacaatgcttatgccaagttttgaccccttataaatcaataaatgcaaacaaaaatgtatgctgacagtttttaagacactccttatattactttaccaatacttttggccgggcacggtggctcacgcctgtaatcccagcactttgggaggccgaggcaggtacatcacgaggtcaggagatggagaccgtcctggctaacatggtgaaaccccgtctctactaaaatatacaaaaaattagccgggcgtggtagcgggcgcctgtagtcccagctactcgggaggctgaggcaggagaatggcctgaacccagaaggcagagcttgcagtgagcccagatcgcaccaccgcactccagcctgggggacagagcgagactccgtctcaaaaaaaaaaaaattttttacttaagtcacatgaaatttgttattatgtactaaatgtatgcatactccttaagccactttgataccttgtggccacaaaacatgtatcagaatccacgcacgtacacataaacacatctaaacacacatatacactcatccaaaaaccctacagcttttgctttacacctctaaccatgacatatcaacacaaagtcactagttagaaaaacaataacagaaagaaacatctagatgcaaactgtggatgtcatctcagtagaaaagtaacagctggtcaggcacggtggctcacaactgtaatcccagcactttgggaggccaaggtgagtggattgcctcaggccaggagttcaagaccagcctggccaacatggtgaaaccacgtctctactaaatttacaaaaactagccaggcgtggtggcgcacacctgtaatcctggctacttggaaggctgaggcaggagaatcgtttgaacccaggaggcagagtttgcagtgcgccgagatcgcacccctgcactctagcctgggcaacacagtgagactctacctaaaaaaaacaaaaagtgtaacagcagctttaaggcaggcagcaaaggaaacagagagatagagaacttaggaactctatagttcttttttttttttttttttgaaacagagttttgttcttgcagccctggctggggtgcaatggcacgatctcagctcactgcaacctccgccttctagattcaagctattctcctgcctaagcctcccaagtagctgggattacaggtgcatgccaccacgctcggctcatttttgtatttttagtagtgatggggtttcactctgtcggtcaggctggtctcgaactcctgacctcaggtgatccgcccgccttggcctccaaaagtgctgggattacaggcgtgagccactgcgcctggccaggaactctatggttctgtagttgcaggctgacctttgggctctgaatttttcctggatggaatttgcccatcagtttaaaatgtgccccaaaagaccataatatggaaccagctggggcactaggaaacccagcatgcccgcgacatgttcagttttataccaacacttgcaggtagaggcgcctgaaaccagcggggtgcctggaaggaggtcgccctcttgtctttgctgaggcttacattatttatttcccacttttttttttcttgaaaggaaccgagctgtggcctggggttccatggagcaggtggggcgcggaggaactgagctgtggcctggggttccgtggagcaggttgagtatggaggaactggggttccgtggagcaggtggggcgcagaggaaccgagctgtggaatggggttccgtggagcaggttgagtgtgccggtcgtggacgggtcgtgggcgggactccccagtgtgtcaccactgaggcatcttcgccctcttacgtgtctctgtttctctctctagaagtccaacacctccgagaggactcaaaacacagagtgaccagctcctatgtgcatttcctggacaaaccttttttttttttttttttttgagacggagtctcgctctgtcgcccaggctggagtgcagtggcacgatctcggctcactgcaagctctgcctcccgggttcacgccattctcccgcctcagcctcccaagtagctgggactacaggctcccgccacaatgcccggctaattttttgtgtttttagcagagacgaggtttcaccgtgttagccaggatggtctcgatcacctgacctcgtgatccacccgcctcggcctcccaaagtgctgggattacaggcgtgagccactgcacccagcagacaaacctttttaaactaattgtgttggggggttccctgtggggctgctgcacgtcgtgggggatcagcccacgagatactcccacttggctcacagtcacccaggggcgcctttcagctgggaggagcaaaatgcctttctttctggagctgagaaaactcagtctctcatttatctatgcaaagaacaattcagttcctcatgcaaatgcacgcacaagccagttgggcttaattttgggagaaaaagcaacagagaagacccttaggaacgcacgtccgagctagaaaccaaatggggtacccaaaagggagtcgttctccttgtcttaagaaaaaggtggccgggcgcagtggttcacac

SEQ ID NO: 4549 - DNA, 6000 bp, Homo sapiens
acattcacagacttctcagtgatgggtgaaaaatctcttatgaagatggcccaaggcctgacagatctgggaagagcttaagaatgagggtaataggccaactgcttctccaactttgccactcatgtccatctgtcttagtacaaactcccacaggctgcctgatctggggcagtgtggacaccttgttttctgccttttccagaagaggctggagggactacctaccagtccccttcacacctgattgcagctcgatgatacactgcagtagaggggctgcaggataaatgctttgaaatgtaatagtcttcatgggctttataaagtaggaaagttttccacttgcttccttagctcctgttgggtttccactttgcaggtcattgctttcagaaaaacatgtggagcatttggtaaccccatcttaacttgggagggtgtgtgtggggctgcactttccaactactgtgagatgggctggctgcattgtggtgaaatttagtacctcaacaaagtcccataggggagtagagggctgttgacaagaggtcagagcctaggaatatctaagctctgaggcatggtgcatggggtgctgggctgccaagcactcgtgctcagtgaccagtagatggtgctctgacaacaggaaaatacagttactgtccctctgagactggaaagggattttcagatggtcttcagactggtttccaatcagagttatgactaattgctaattttccacatttccatttgtggatccttaataggacagtggaactcggggcactggaaggagaatgcccaccaaattcccatatgaagaaattcccatatgaagtcatgcaataccgcatgactacagtattctggtcatgaactttttctgaggatcctcctggatattgagggcatggtgccaggaacacttggcctctgatcaaattcaatttgaggatggtaagcatagcatttccataggcttagtgtcattgtatagtttcttctcttgataaacaatttagaattaccctattgctgtcctgaagggcagcatgggttttagaaagagccgcagattggaagtcagatgtgttagaagtccacactctgccgcttatcagatgtgggcaaacggcttaacgttgctgaaactctgctgctttgtctgtcaagggtcgtgatacatgtgttaccaggctcacctcagaagtttggagtcaggctcagctgtggggcttatgtaaactgaaaactattaaacacatgtattattcaaccattaaaattgtagccactggcggggcgcaatggctcatgctagcactttgggaggctgaggcaggtggattgcttgagcctaggagttgccagctaggacaacatagtgagaccgtcgtctctataaaaaaaaataaaaacaacaactgtagctgccttgggggctggtagaatgggggattagagagtatgaaaccagtatagaaattcatagatctcaaagctctcaagagctatgacagccaggtgggggtggaagatgagagtctgtcttcctgctagcactgctgcccttaggccaagtctcttcacaaagccatttatgccattatgtttgcccctttcctttttggctgcaccctccaagaattatcccttttaactcacataggtgctgaaactccctaaggtattccacattaattcccaacctatgcatttatgattcctgtctccttggaaggcaagaaggcagatatcaactccagtgtgtcgtcgcatttgcacatgtagtatcccatcttgagtattctaggtctctgaagaattacaacagccaaagagaatacaggacgtggaatactggatctctgctgacatctgataacactgaagagacaagtcggggatctctgatgttccaagaactaagtctgggaagtaaaaggctagtgagccctgcttattctgggcattgagaaggtatgccgccagcctgctgaggcagaaccacaaaggaaaggggtgaggtgacagcatgagagtgaagttcatgaagctttctggcctgcaaggttatacaatctagtataatctagtgtaaaaagctacatgatttatgtcatcacccatcttgttcattatagtatcctcagtgcctaaaacagtgcctggcacctggaagggactcaaagatacttctctaatgatttgaatgaattttgtgctatggattatggtactgtctgaaaggagcgacatacacttaataatttctgaaagccctttttctaaccctatgtagtttacagggataccgagatagccacttgggactagttctaagtgactggctgatgggacttcatggttcacagcaccaccctccctccgtttcacgactgactaggtattcagacagaagaggaccctctgattaaagcaggaggaaggacagagtaaggcagtaatgtgaaatcaaagtaacaattacagctgactcaccttgaatagtaatttcacctgaaatgggctcccctgaatccaaaggtcaaatgccttccccaagggcagcaggctggacatgttgagaccattcctttggatttccagtagagaattttcctacacacacacacacacacacacacacacacacacactctcacatacattctcacacaacagacacatgtcagtgctcacagggccttgcccacagacagacacatacccgtagaaacacacatgccatgcactcagacatcacctcacttctcaacagttaatctcacttcacaggcgtgaagccatactcacccatggtttccaacctctgggctttggtcagtgtctgtttccttcctcagcccctcctttccttcttcccttccattgttcgggttggaaggatttggagaggcctatgtgttgagccaaggcaggaaaacacagaagacggtgtgccccagctagtgtggacatgggaggggacagctggtccctgccctcagttcaaaccaccagtcacctgtggggaagggcttggcggctaaacaggagctctttccctggggcttggagtccacctttcccacctctgcagctcagataccaattctatttttttttttttctacattaatgggttgggtttgagaaagtccgtggagcttatttgggagtaaaggatggggggcgggaggatccttctgattgttcgcatttcgagaagggtagttttagcccataactcaccatggagggcccttccaggagacgtcgggcagggctttcctacagcggaaccgggaggccgccccgtgagggcagaagctcccgccaggagccagcaccaccagcagagtgtggaacccccagaggtcctagcctcctccacggggcctcccaggtgctaagtggggagatggggagagggttctgccctctacttggaaatgcctggccgtgttcgtggagcctgggaggtgcggaggagcggcgacgcggccatggcgctaggcgcgcaaaggccccgacaccttactagggcggcggcgggcccgtggcaccgctcccggcaccgaacagggcacagcactggggacacctctctgcagggacccaagacgcgcgtgcgtgtgcgccccacgccaggccctcgctctcttgcggagactccgccgcatcgctggctgcacctgcctctctcttctcggcattacttgggggaaaggggactcttcactggacctttgcagaggtggctgctaccctttggccacataaatcaagaaggcaagccagcctcaccttccaggaacctccagccttccggctgcgtccccgcccctcccgcctggccagctcctcccccgcttctcccagcgctcttgcgcgcctcgctgcgcctctgcgcgccgctcgctgtcctctgcctcgcctccccattctccttccgcatcttctccagtgctccgccgagggcgctgcctgcggggaagagggagactgagccgttagtgaggaagttcggtctgtggacaagtgtggtgccaggccgccgcgaggctcggctgcaacctgttcctcgcccgccggtgctcgccgcccgcccgctcgcactcccgccctctcggcggcgcagccgcggatcgctgttgcatgctgatccggggaggcggcggtggcgagcgctccgggcggatgctggcactcaggcttcgctgctctctggatgctgctcaacttctagcccaagcgcaggagctttgaagtcatttgtcccttttcgcttggatcgacttcttattttgagattttgggcattgcggtttacgcaggaacctcaatatcgctctccccacctccctccctctttctccaacctttggatgcgtctctgctggcagatataaagacccaagtcttcgcggtggaatttcttagatggacttgcaggggctggcgttataaagcatgtcatcgtaaccccgtcctcgtctttgtttatttttttttaaagttcttttgttttcattttcccctccttcccaccccttcccccaaccaataaatcaccaaactgttacctagcgggccggtgcctgcctctctccctgaactaggtggtgcgtctgccagaagaggagctatgtttgaagagcagcctactccacccctctcctctctggtccctgaacaccaccacacactggcattttgaaaaaaatattttcctccagaaactgggcacccccaagccctaccacccgctttttttttcttttttcttttttttttttttccttcttgaggaatggagcttcgcagaggttgcatttagattcaacagttcacagcggcgggctgctgctgctgcctctccgaagagctcgcggagctccccagaggcggtggtccccgtgcttgtctggatgcggctctgagtctccgtgtgtctttctgcttgttgctgtgtgcgggtgttcggccgcgatcacctttgtgtgtcttctgtctgtttaaacctcaggatggctcgcttcggggaggcggtggtcgccaggccagggtccggcgatggagactcggaccagagcaggaaccggcaaggaacccccgtgccggcctcggggcaggcggccgcctacaagcagacgaaagcacagagggcgcggactatggctttgtacaaccccattcccgtccggcagaactgtttcaccgtcaacagatccctgttcatcttcggagaagataacattgtcaggaaatatgccaagaagctcatcgattggccatatcctttcttgcccaccataactccctctccccctttgcatttcttcgggtgaaggggggtacctagcatggaatgtatcccccaccccttcctggtgccaatttgcccctttgctgaagcacactcttcggtgcatctaaggggcaagcttggtgccgtggagacccgtttgggcactagtgtttttcaaggtaagacttttggttttttatttttcctatgtggaaatctttagtgtccctgggtgcatccctttctgggctgggctttgtctgattcccagccccctccccacccctactcccttcacatgccgccctctacatagattgggttgccccaatgcttcctttcataattaattctcattttcctttctttaagccagccactctgcccgtatccccaccaaccaggagacaccgcactgtcttcctgtagggaagtcaaggctccatgaggggatttatcagttcagaagttcccagggccaaaaccctgtgtacagatagacaaatgaataaataaaacaggcttttgggtggggactcagctaactctagggacttaagtttaagttccactgaaagtggcatgagtgagtgtctgtcaggggaggtgatctctgttgccacagcccaaggagctcaaacttggagttctcctctcagccaagaaagagcagctca

SEQ ID NO: 4550 - DNA, 6000 bp, Homo sapiens
ctgcgatcactgtttttatttattgatgtcagtcctagtacaggaatttggacagccagtttaaggtagatagaggttgccccatggaaatgaaacctctacagtctggagttccagactggtggcctatggggtaaatcatgcctacaggtgtttttcaaagtgttttaaaaatcaggaaatattacataaaatttcaggcttctttaaaaaaatttaagagctggccattctatgcactcagtccttcagggaaaccactggctggagttgagtagtaggagtgcctgtaatacagtgctctccagtgaccttattctcaccactcttttatattgaatcaaatccattcaatcattcttgtctcctgtaggcaattgatgttgcgactgctctcctacccaaacaaccatccttcttaaaattatcccagagaagtgtcatcttttaactgcttgttagtgtttgtcaactttggttccaccattctgagtggttttatttggctctaattatatgttcttcattgtggtgtctggccatatctctaactcagcttctgacacaggtgtcatagattggtgttttgtctgtgctttcttgggacacatcccacccactccaacttggggtttggtttctcttttctgccctggtactgaaagctaactctagtttcacatgttgaggcatttgatactgtcctgggtccatccaactgactgaatatgactcgcttcctaccatcaacgtgcctatggttaattggttgcatgaatagctccaactttccatgcctccatatatgcccacatcccttggtagtgagtaccttcccacactgactctgagtttgaccttgtatcttgctttggccaatatgacctgaacaaattgacctaaacgcaggctttaaaatgtgctcatacattttcacttcccctcttggctctggttgccttgaaatcatacttaggttaagaacatgcttgggcttgcctgtgcaaggaaaatgaaagacctgtactagtgaggccaccttatatcagcctgcagtcagctcagtttcatgttaatgagtttggccaagatcagcaatcacctacacaacctgcaactcactgcccgaatgagcccagatgagatcagaattgtcatgttgacctgtagaatagcgaacaacaataaatgcctactgttctaagccattccattttgtagtaggtgtgtttcatagcaatatctgatacagtgtcccaattagtgagattttggttatatttatgacataattttctcatgagaaatgagcctattggaagagcttgtgcagttacacacttagcaatatgccaaaaataattctcattatattttgaagtcacccagaagaaaaagaacagaaaataattgaagggttgctttggggtaggttgtttagattctggagaatgtaaacatgtctcatctaaaaactgaacatattctggggacattcaaacccaatgtttgtgttgtaagtggcattccaaacccatttccacaaaggtagaaggattgtgggctggcatatagaaaatatttccaacaaaccattgaatgtcctgttacttcgaggtctttatgtagaaatgcaaatggaaataagtgcattgggggacctcagaaggtttggcagtacattctagatgcttatctgagccacacgagttaggaatctgggatggaaatctcctaagaataaccattctcacgaaatttccaatccctcttgtttttggcagaatttaaaattccgtggaaatggctcatgtcacaagacttctgtgtggtgctggccagcaccaggaaggagagcagcccaggaaaggaaaaccaaaccaatgtggctgcatgttttcacgcctttgaaaaggtttgggtttggctcaaatgaagaaaaagcacttggggtttttattttgtgccagttttttcaaataccatttacctgactcatgaagctttgaacatcaggaagaaacaagggagtgaataaattttcaatattcttgaggttcaaacatacttggaacaagactccttgctgggagaaagaacagaataccgttggagcaagatgtattcatccccaccttgctgggggtcacagtgacaatgcaatttgtttatcagtcaactcattatgtaccagaaatagaggtgagatcaaggtatacaagacttagtttttccctttagatagatcacatgagtaacagggactaacctgaattatcctgtcatttccagaagtcctctgcaattttattgtttttttgtttgtttatttttgttttggttttgttttgtttttttgagaaggagttttgctcctgtcgcccaggctggagtgcaatggcacaatctcagctcactgcaaccttcgcctcctgggttcaagaaattcttctgcctcagccccccgtgtagctgggattacaggcccgtaccaccatacctggctaattttttgtatttttagtagagacagggttttaccacattggccaggctggtctcgaactcctgatctcaggtgatccaccgaactcagcctcccaaagtgctgggatgataagcttgagccactgcacctgtcccgctttggaattttagaatccagtaatgcacattatttgtgtttttgagaataattttgccatttcactcatctcactattgcatacgctaactccgcgacctgtaatgttctatcacctgtcctctgcttgtaaaattccagtttctctcccaagtccagctaaaactcacccttaatcttgccaaatgtaattaactcctccctcatctttgctatttccctactttgcacatatttatattattgcatttaacacacaacgttgcattcttaacacagtgcctggggcatagtagatgtttgataaatagagatggattgtgcaatacaccactacaaaaccttttccctttttgtaacacaggagccctcaatcaacattagcctcatccttatctctcaaccaaatactaatctaccatttgtcattcccgacatgactgttgtctcagcagcttccacacactttctctgtccttcaagtccctctgtcagccttctcatgtacaaatataaaaggtcaacaaatgctcatggaatagtacttttccatcagttggcccaattctaaggtgctaatttaaagcgatcttaacttccggactctagcaccatttatagcgctgcattacttgatgtcttatattatggtaatatttggatttacaatacagaaactcccatgaagttataacaggagaaggataatttgatttagtttctttttcaggttgccagtgactgagtacttcagattatagtgtgagatagtactgatgaggcaaaggtcaggggttcacatctctgtctggtccacatcatattattatttttcaattctctttccattcctctcaatctcagccaaatttcctacagattagtgcaattgagtaaagggatatccagaaaagagggcataggaagggcctagtaaaaacttattactggaaaaaaacagctgacagtttatgtgctattgctgtgtgtgtgtgtgtgtgtgtgtgcgcgcacatgagtgtgtgcccatgggagggccattttttgcatgtgcacaaaaataagtgtctgtttctcatatgatctgaaaagtattcattatttcagtcagatggaaggattatgttacttgaacactggtatttaatgtacattatcacatttattaccatatcaaaaccagatgtttaaaattggggctagaaattccatcatacagattgtgttacttcaggactaccccactacctaatgttcagctgtattttgttatggctttaatagagcaataatgtgtttccacaagtcttagcctgatattagatgacatgtgggctaaatttggtgggttcagcagactggtagggggttatacaaaccagagcaacaataaggaaatatgtgaaaaattattgctaatagtcaaggcctctctctctctctgttgctctcacttttgctgtctctccttttctcttctcttctcttttattcatttttcactccttaagatttgttgtcatttttactgtctccaaatgtcccttaaacttcttccagaggcagcatctacctctaattactaactttcttatctcagcaaaaactatttaaaactttcctcttatttgacttttttacatggcttctacaatcataaaacaagcatgctcagaaatctgataacatttctgatttaagaaattattatcgatgcaatttagataaggtaagataaaaaataaaagcctatatggaacgcagccaacgattcatctgtttgcattaataggttccagcaatggttctacaggcacggaaagccaagccggtttgccactgcacttagcaagcacatgagcttaaaaataaacttttgacaatgcagatctctttgtccttttgggaatggaaaacattatgtacttcaaagcatactaagcctgatttgaaaatatagttgggatattgttactgtggcagttgggagggtctttagccttcacacagtgcgtggatgcttcgtgtgtaaatgcttgagccacaaacttgtgagaataagtgacgctggcaactttgatatgctcattcataaggaagaaacttctgtcttttaaattctctggaacaactgggatatagttcctcattttaatcagggaatttcttcctgaaccagactgtaaaaacagaggatttgagtagcacatttcacttgcatacagcagcgtttgttcgttttgagtgtttttgtacaggaaactgatctacagggtaacattcacacacaaaaaggaaacagtatgggacgatggcttgttagtacaagtgactctgttttggaaattacggacaagaaaccttggaggaagaacggcattaaagatcaaaagcatgatgactcctgatgaaaacatcaccaaatgatgaacccacgagcaaaaagggatttctactgtgagtatctttgcaataatcaagtaccttatttgttttcaaattttctagagtaggctgagtagatttccaagcaagtatttgatgtaaggagtcttcattatatgaaagtctataattaaactcattgggtggttccaacagagggttagttgctggaattttttccatgaccttgcaacactgaaataaattgcacgttaattcggtcatgttttatacaacaggcatgttacatcaggcttttatttgcgatgtgttacttctggcaatgtaaaaattgatcaacatgtgtatctataaattccattgcatttagattctggtaatttatgtttactttggtttcatgctgtggttagtcctgtcatcaatttgttcatatacagatttacacatattatttgtagtttacttagaatattagttatttcctgagggaatcttatgtgtatattgggaaaaaggtggcttagaatcttggaaatggggaagaaaaggtacgatagtttaaactaaatcttgagaactaagacctaagttctttttacatttccatagtttatttagcaagtagttttatttgaaattatttagatgtctctatgtgagacttctcacttcacaagaatactgttgtggtcttagaaatgtgaataaaactcatcaaaagtataatcctatgtacatattaaatgtagcaaagtccatctttagtgcctgtcatatagtatgtactaaataaatattttttgaatgctgaataaatgctggtgttgggtaataggacacgtttcctgtttgtatagtaatcattttacagcagggtttaattttatgaatgtatctttcagtgtgattgaattctatttaacaagaactatataataatggcatta

SEQ ID NO: 4551 - DNA, 6000 bp, Homo sapiens
ttggttactaggtgctactccaggcacttagggatatgtcagggaacaaaaccacaaaaatcacttttgccctcctggatgtgtcagtctgggttgggatcggagatacaattgtaggggccaagagaaaacttctccttcaccctctgaagtttcactgaaaatcacctgataaaaggcagattaataggagaaaaggcatatacagttgcttgaccatagtttatgtgacatgggagccttcagaatgaagacccaaaaacacaggggaaaccattcacttttatgcttaggttcaacaaagtataaacaggtgtgtaaaaaataggattggaccaaaagggaatgatctaaatcttataagaccaagcggggaagcccagcaaggcctgtctggaatcttctcggcctctctgagcatgtattccttccttctgggtgtggggcagcaccctctctggaatggggattcttatgacctacagtcaaacaagatgggtcatataatttcattggccagttttacatagaaaggtggaggaaaagttttatggttttatggctggctttggggaaatggggttctggtctctaggatccaccttggggaagaggtattccagattttatggctagcctgggggaggatgaggggtgagagataggagggcaggagaaggtcggagaaaaacttttgcttctgggaccttgattttgggttatcattttctgagctccagcatgaacaaagagataactaagggaaatgcacaggatgttaggtggtgataggtgctcaggaacaacaatgcagagcaaaggagatggggagtgtgtgattagtgtatggtgaagggggcagagtccaggatcgtagtcttccataaagttgcccgtgaaagccttactgagaagatggcacttacgtaaagagtgagaggaggtggggagtgccttatgcagttttctggggagctgtgttccagaacaaaggcacctattggaggtgcagctagaaagtgactgtggctggagctgagtaagaggggagtgatgaggtcaggaagaaggggagggagcagatgctgtaggatgtcctaggccactgcaaaacatctggcttttatctgagctaggggaaaagcaccaggagattttgagcaaagggttgacacaatctgactgactgttccaacgcgttcactctggctggtgtaggagggcaaggctgaggctgagactaaaaggaggctcttctgatgacccagggggtcatcggaccaccgatgcctctcggtgactcagaaaagtggtgatgagaagtggtcagattctggattcatattgttggccaaaccatctggctttgctgatggattggatgtgaggggtaaaagaaagaagagtgaagaatgacccccgggtttctgacctgagcccctggcaatgtggttcttctttacagaccaaaggaaggccatggaaggagaaggtgttggataaagaatctcaagcaggttccagaacctgctgaacttgagatcccttttgggtgtccaggaggatctatctacacaaggcacacagtaaaccctaatggggcgtgatgagggccacactcggagtgtaggtgacagtgccttctgttggtacagcatgccgtgatgtcatgttgtatcacacacatcgattaactcactgcagaggctgaagaaggcttttgggggtgatatctgattttgaccttgaaggaaaactagaatgtcagtaagtagaaaagaaagaagaggtcattcagactgagaatgtgagttccctgggctgatctgccatttaatgaatacatttaacaacagcgttaaatacttccaggctaagaaagagtacctaaactgtaatattgttttctaatttaatattacaaaaggttgtttgggaaactgtagagaaagcccccaaatgaagtatttgcttcatattttcttaaaattaacagtaggatatttagtatttgatataatcgtttaataaaaattatattttatataattcaaagaataaataaatatctccagtactcttttaaggagtagctaatattaaataaagccaccaaggaatgaatctaggtggtttctgtttttaggaagtaagtaagtaaaacatgattttttttttcacaaacaatctaaacattttaggagtgtgtcaggttcaaataaacacattgacgatttttacagtttgtactgatgggaggattttcatgtgactctcagaaaaacacctgagtgattttcatttttactgcattgttgctttactgtttgaaatgatcccatgagtataacagggctggctccttgctcattattgatcatctaaacatcttctttatttccctcaaatactgtattttttatgaagccacagcttgtaaataacaggaagggaaataaagtgttttaaactagaattaaaaggttaaaatatggttgtaactcacattcttcaaatgtttgaacacgggttaccaaggcacttaattatttaaaaaccatggttagatggattaagttaattaaagaacctggagaggctgttccgcagctgcctaggtgtcagactgactcagaaattctgactcagaaattctgagtagcaaagcgcccacatcgctacctacctgccacccagtgctctgacacgagccatctcagaaaaacagtctgtcgcccacgggccagctccagcagatgcacctcgcagtgggagggtgggcgggtgcggatgagctgagccgtttcgcacccccagacagcagggaagagcactgttgtgtggatccacaatctgtcatccactgctactcccatctcaccctcccctccactgcagagcagctgatgtttgaaaatccaaccaaccaagatggaataaggaaaaaaaactaaaattttaagaaagttggggagcacaaaaaagcaaatttctgttagtagttgatgggatgtgacctaaagcaatatttgctctttcagcaactctggtggaacaccagagttatttgtaatctgaatgaggctaaaaggatatgtttggcacctgaacttgcctgtctagattctctgtttcgcttcactcagaactatgttttgtgcgttgacttgtgttagtcatctctacccagatgtctgggctgtgtctcattgacccagtggcagtggagtatgtgtgccctcagaatttcttctgcctgtcttcagtgtcccagtctctacacaagctcagctaagggtggtgccatctcacgggagcattccctcataaccatcactggcttggggaatggagctggcaaatcaaattgtcatcggtgatatcaggctgaatgaatactattgaaaagtccaacctcgaagatggaaacagtaggtattggagaatccagaagagggaaggatggaaggagggccagggtccagaaactacccattggatactatgttcactatttgagtgatgagttcatgagaagcccaagcctcaccattatgcaacatacccaagtaacacacctgcacacgtacccccgaacctaaagtacaaaagaattgtaacaatttaaaaagtcggccggatgtggtggctcacgcctggaatcccagtactttgggaggccgaggtgggcagatcacctgagctcaggagttcgagaccagtctggccaacatggtgaaaccctcatctctactaaaattcaaaaattagccaggcgtggtggtgggtgcctgtaatcccagctacttgggaggctgaggtggagaattgcttgaacttgggaggcagagtttgcagtgaactgagattgtaccactgcactccaagcctgggcaacagagcaagactctgtctcaaataataataataataataataaattttaaaagcccaacctaatgtagtgaaaagtgagaatcatgaattatttttagggaaaatgtttatgttcagagatactgaatgaccttacatagactgaagtgaatgtgcggattggaagtgtgaaagcgttgaactggggattggtggcctgggttctcttcagacaagaattcattgtggatttctctagatttcggttgcttcagctatacaatgaaaaggctaagtaagacccccttctaactctaacattttataatcctaggtctttggaatatttactgagtacatcccaacatgtggggatgcattaaaaaatactgtaaagggataatcactgaaatataaaagcccacagccagctggggagactcgactgaaacatcaaagtcccagaaagctgcatagggtgtagagacctaactgttgaattgtatgggaccccatggtaattgggtaattgggtaagtgggtaacatctgtaggactttgatagggagatggctgaagtggtcagggaagctttatggagtaggcgcactgagataaacaggcagtatggtaaggttaggtagagtgggccggggaagagggttgttaaggaaagggacatatactcagcacacccatccagaagtggaaggcagccttgccttagagagaccgtgagggtgccagcctctcagagccaaagctccctgctggcacacagcagcaggcgacaggcactgaaggtggaggtgagacgtgggaagcagatctggcacttgagtcagtagaaaatggggagcctctgtgggctcctggtcctgcaccgtgataaatagcctgtcctgcaacctggcttaaaacagggaaagccggagttaggcaacagagtgcctagctttctcagtcattcaaacacaagcacggaagaagagattgcactgaccagaggaccgccagggtgtgatgctccgtagtcgcagggatgaaggaaaaccatgggcggagcttgtcatggacagctcctaggtggacataaatggaaactcattggttctggggcacggcgggaagagggagacggccctggacggccgcaccaagaatttcacaacccaaacccgactagaaagcctgggtgagtagcgaagttgttgctgtacgtaggaatataagttttttctggatgtgtatgtggcaggggatatagaagggaacaaccccagttctgtgtctcttcacctcctgatacctgtgtgggccggcctgaccccagacatcaggtgttcttctgagaggtgggcaatgggagctggttccaccatctgaattctcatggattcagccgtaaaatgatgagtaacctctcaagggtgtacctgtaggatgctgcttgtaattactgtgtcagttagttacaaatgggtacttctaagtagttttggaagcgtttgagtagttgctgcaatcgtgtttatactgttaattggctttaaataaattattttttgtcagagcaaaaccccaacttcagttcagttcctacgtcactgagttgtaacttaactaagctttagtttactctcatctttaaaagaaacaggcattctttgcattttgtacaatgctttgcattttgtaattgttcaagataacttcttggtacattggcctcagattaaggatatctggcttctctttaatctcttaatattttcatttttgctctagggctcccaatattacaagtctgttcttgacaaggaagttgggatgacagaactactgtatgaaaactcagaaatgctcagaagtgcagacctttggttctgttttcttcctcatcagataggaattttttttaactacgcacagaatcacacttgcgaagtcttcttttccttcttgttactttatttagaagctgtgaactcaagaagtaggtcccatgttgaatctacatgtgcgcaggtgattcttttagccaagtcatttccacactcatgcccaagtctggagatacacaggtatgtggaaatgtttgaaaagcaaaaccaggttgatgag

SEQ ID NO: 4552 - DNA, 6000 bp, Homo sapiens
aaaattggcaaagccaggttacaaaccctgggttcttaactagaaaagggttgcaaactacaatacctgcagacacctgggaatcagcgaaactgtgcaaatgtaagaaaggtggaggaagtagcacttgtgaaaaaccacagtgcatctgctttattcagaagaggcagctgccacccacgtaccatttattgttacatgagagagtaggaacttgggtgatcagatcctccgatttttaaaaagaggctatccatatagatttgtaagcataatctcccaatttgtgctgatgactgatgcaagttttttaaatcccagggcagagcaggccaacaccaagtgggttgcagacccacatctgtgagcaggattcagggtggtgcccattgtgactctactctagagtccaagatcttaaccattagactttactgtcttaaaatatcagctagctttatctctggtgagtcacaatttttcttcctattatctccatctattggcctcagttctgtcatctagagcaacagggattcaaaaaacactagcctcctatgcccttttctaggctaaacatccccagccccataagcatccccattttggcttggttgcaggacctttaccatgcaggccccatgattctaggcacgctccagacacactcccaccagctcacaggactccccacatccactgtggaactaagtcctacccatcatgtctggtctgtgtcaagcagagcaaagcaggcttctagcccactaggactcatctgagactagaacccaaagtcacctggcctccttggcagctaagaatttgccttagtttaattgaagagatactgaccccccaaacccagtgggaggcttcttggcctctgcagtgattgtcaatttgtgggaagtgacatcccaaacaccagcactttcccatcattgtcctgatggtccacccctatccttgcagggactgttccagggtcagccctttaacacccatggttttcaggcccacacctgaccgatcttcccttctgagaagacagccatgacaccaagaatccctcttcttataaaacaaatctcaagctccttccagtatctctgtctcaatgttgagagattttcccacgattcatcagacccactctaagattcacccccatttcctgattctcactgtccagaaaatgccatgtgccagactatgaacctggctgtagccacctgtggatcagaaaaaaaaaaaaaaaaagggcgatgagtcaaagtaaggatccagagggtcagagaagtatccctggtggcttagccaaaacctccacacccaacagctatgggcttcaccatctgagtacctcttttgattccagtcccactctcaacttccctcatgaaatgaagaactgcaaatacggtaacctgctatggaaactgagaaaagcaaagcagcctatcttttattctcgctctgccttctggtccttccccggggccactggggctggagctgagccgagcagctgggttttcccctgagcagtgactcacagatgtagtttctctggcacaaatcttcagaacagtcccagctgggaagtcttcctggtggccaagtgatccctcacagctgccagcctggcaacaagggatcccagctggtgctaagtgatgaagaacaggcctgggctttgttcctcagctaaagaacctgtctgttccactcactggatcccagatgtaattcatcatcaaggtcactgaggagcacccaagcccttggcccatcaataccactttagtaaagtcagatttctgagaggcgtcacaactaccactaaagagcatcagctcattgccaagtgcattacagaggtcctggcactacccatgttcctgccaagtgcttaggcattaaaattgactggggcaagcagaagggacacactgccaaggatacaccctccagtacaggaaggcaacaggctcacgcagtgtcagggctaggcaagatcatgatttttcacagttttaggcagcagaatcctctttccaaacaaaatctcatgcagaagtctagaattctggcagattcaagggtagctgctcagctggagaccaaggtggggccaggaactgatcccctgcagattccctgtaatcttcccaccccccagctctgcaacaccacccaggtacctttagcctctttcactgaatcgctggggtccacctgacaaggctgaaaacttgccactctggtcagcctcttggcattcagagggggaaactgaggctggtagaatatgacatgcatttcccaaggtcacatggtgaatatgtactacaaattcaggagaataaaaagtcttgtcaaccaagcttttagtgaaccagaacatctgtacagaccggcagtccataagggttggaagagtaagtgattacagacataaagttaatttttattttgtctcagccacttttttgctgcctgtcctcaggcaagtcacccaagtccagctggcctagggctggattacatccagtggccttttgaggcatcccctgctcatctttcattatctagaacacgacaagaccccctctcagagctgcccacccattccctcctcagccatcaaaggccttggcacctggctcccaggcttcccctcaaattcagttatcaccctgacatccagaatcctggggaccaaaacctttgaccttttcctctccaggctcctacaccctgactctgcttggggaccccactcaaggccacatcctgaactttgacgggacttgcactccttgggaattttaaactcaaacatcccactctcacctctctgccttcaagtttcttgcttctgaatcccatatgcatggtctctggcatgtttttgataccttccacccttgagcactgtcttctctccccagcctatcagtgtcctgctgtcagcactcccaccagtccagtagcccagaacccttaggcattgctttaagtactttcttgcaagatttccaactccagcaacccccttcctgctccctcaccagcacagtcccaccctgcatcaataacatggtggccttttcactcctttacccagtctaggggtcccaatagggaaaatcccatagccacaaggagaggaagtactgccacgtccttccttttcaccaggatctgggcagagttcggtctgtcttagtgaagacctttcagttccaggtgcctgaggaccctaacctcagccagcctctgtactctcagccaaagccaatcccaatccattctcacctcctaccatcaaagaagtgtcccaggtctgggccaggcgaggtggctgacacctgtaatcccagcactttgggaggccgaggcaggtggctcacctgaggtcaggagtccaagaccagcccggccaacatggtgaaaccccatctctactaaaaatacaaaaattagtctggcatgatggtgggctcctgtaatcccagctgcttgggaggctgagataggagaatcgcttgagcctggaaggtggaggttgcagtgagccaagattgcaccattgcgctccagcctgggcaacgagagcaaaactccatctcaaaaaataaaataaaaataaagaagtgtcccaggtcttatctgagcatggcccctccacctgtgctctgaatcccttcttacttctgccctccaggaattctctctccttattttcctgcatcttcaactactcattttgtatctatttctctccataagtttcttccatgttaaaacaaatgaaaaaccttaaacaaataaaaccttgtttaatcctacattcccttcacctaccacctaatttcatcattttatttacaatcaaatgtcttcaaagagtacctataagcccgttcctgcctcctcattgcccactcactcaacccatggagctccgcctctgcccaacatggctccactgagactgtgacctccgtgttgcttcctccaaatgacacattcagtctcttcttgcctgacctctcagctgcctttgagccagccttcatctgtggcttccaagacatcactctcccctgattcctcctctatctatggctgtaccttctccatttccttttctggctcctccttgtctttaggcttttaaatgttcccacttttctctcttctcttctacatgcacccctaccccctgcataatctcatacatctcagaggcctcatccgtacagacttctagatccagcccaggcctatctcccaagctccaggcaggaacatccaaatcccactgcactccccactcaggtatcccatggacccctcagactcaacaggtctacagggcttgtttagcctactgactccatccctgcagtatctcttttcagttcatacccacatcttctctgtctggaccactgcaacagcttcccggcaggtggtctccctacccctgcagtcattgccccctcagcagtccatcccccacagcagccagagtgatcttccttaatagaaaaatccagtcatgtcacctctctggcttaaaatcctttaagtttcccctacctccaaagtaaagtccaaataacgttggcagagccttctagaccttgtaagatctggtccctgctaccctctccatacacttctcttttattgcttgcacactgagctccagtcataatgaattacttgtacgcaactcccttcgccttccctgttgtctcctgccatgttttccaagtgctgattgctctttctaactctgcatggctaacccacccctgctagtctgcagtgctcagtttctgttttaagagaaaaacccgttcttgcactccctggctggggtgacaggaaacacctgaagattgttgatgaagcatcatgcaaccaggtcacctagaacctgaaaccctttgagcgctgaccaagaaaggaagtggtgatggggcacatagaagagtgagccatcatctggtttccagcgccaagacttctgcaggagagcctccgctgggctttcaagttggtgagagaagaggaggggcagcaagggtgagcatgcatgtgtggacataacaggcagggaatgatgtgagcaaagacagagaacaggaggtgactggtaggccattgctggggtgcagcaaagagtgaggcgagctgcgatggggagacacctcaagggccagacaagggatttgacaccttcatgaaaagcaacccggggatcagtaatggaatggaggctaaaggaaggcactccaggtactctgcgaaggattgtgaatgaggaccttgcaggtgtgaagtgactctagggtgaggggatggggtctgaggcttggaagtggaaaggaagggaccaatcccaaagcattaagtgtaactcccaaacagccgaccaaggccagacctgtgcttgagacagcagccctcctgcacggggcgttgtccatccgtgggctttgtgctgccatctggtggtggtggaaaggaagaccaggcttagtggttccggggctggctgcctggggtgtggccagggggacagatgattgtgagtgaatactggagtttgctgaggctctttggggagtgagcagggggaggcagtgacaatggggtcctcaaatccatacagcttttgaaagatgcaatttcttggcacttttgattgtccctttttgcacagcacttagcataaggtctgtttcaaagtaggtgcttagtgtctgttgtttttctcaattataataatgacttaacaattactgaatgcctaccatgcgcccagtgcttatgtattttatctaagttattcttcataacaactttgagatgaagatgacatgatgattttgggtaataggagaaagaactgaaaccatgaatccattgaacagcttggtaaatatttactgagcacccattctgtgtcatgctgtg

SEQ ID NO: 4553 - DNA, 6000 bp, Homo sapiens
gagctaacagtaaaagtgggcagtagaatggcatggtgacttataaagtcacacagtcttgatctgttccagcctcactactaaccagctaaattaccttggtcctctctgagcttcagtatcttcatctgtaaaacagagacaatgatatctttcccactggctggttgcaaggattaaatcaaatgatctctggagggctgtcagcccagtgtcctcctgccctgcctacctgtgagtgagtggggactgtgccagcacatgggtggatgggctggtggggagcatcaagcagaggcagcagtcatgccaggaaggggagctggttccctgggagtgacacctgagaagattcacaaatgggaagaactaagagattctccctccagtccctctgtgtgggtgtgggtgtgtatgcatacacagtcataaactcttcttttaagatgactgtagtcaccagtcactcactgtgacagccaccacagcccttccctctgctgaaggcagggcctggctctcaagcaggaaaccaaaccaaagggaagggagtggtctttggggattttcaccatgccccagggaaaggatcaaaggacactctggctgctattgtgtggccaaaaataagaaatggagcccaccatagaactggaaagggggctcagttaagttagctggctgtccattctttatagctaattttgtccttactaccctgtaaagtagctttgctctcccattcgaccaactaggaaacgaacagtaggaggctcagagagtgtcagtaacttgctcaagttcatacagctagcaagtgttagtgccgggaatacggcctgtgttcttttcctatacagcactgccaaaccaaggtactgacagacacttttcagggcagaagccctgaaatgtgcctaaacaactgttatgatggttcttttttttcccccttctttagttaatttctttttttgtcattgttcacatttaagtttaaaggatagagacaggacaacatacccctgaggccaagtcacaaaatagaagcagaggtcagaggaagatctcaaagagggaaatgaaattcaagagctgctcattccacctgcacagtgtggtgtgggggctaagggcacatgtcctagaatcacaaagacctaattccagtcctagagtcaccatttattaacctcaggcaggtgatttcacctctcactgcctccatttcctttccaatgaaatggtactaatgtatacattgacttctagggctgtgagaattaaatgttgccctgggtaagaagtgcttagcacagggtctgacacatggtaagcccatgtcaccaattatgacgattgattttccttcaagggcttttctctgtccacagcttctgttttcaagaaggaaggcaaaggaaatgtatacatatgatcagatggatagagtatctgactttggccacacaggattatctgactttaaatgacacgagaacccagtgtgccaaataggagaaacagagccccttggtgctggtcaggggaggctttcagaaggagtatatagggaagggaactggaggtcaatttggtagaggggtgggaatggtgagatctcaaggaaagtaaagggcggggcaatctgggaagcagagggaatggggcaacaaggacctggtgattgggagcctagagaaacaccccagagctaagctggaagctaagagctatgaggagagtttcacaaggaagcagagcagcgaaatcatcatgcattcagtgtctgctggatgctaaactcattcaacaattaaaacctcaccacacccttaggggcatcctgatttttcagaggagggcactggtgcccagagaagtgaaataacttatctagtaactgttagggagttacgtttccatctgactgcctccaaaacacccaagccgttcactgactgggacactaacaggccaggttcaaggtgctctaaaccataccagcccttctctatagtcatctgtcatcctttgggcccacggaggtcactgccctcccagaccaccccctgcagctctaggcaggctcccagtcttcaaccacacctcacagactaccacgatgaaacgccagaatccggagtcccgcttcatgggctttcagggctctccccacgaggtacacgcatagagaggagggtttcccggccggagggtaggggggagggcccagtggggacttcctggtgctagagcccatctgaatccagagctccgtgtctaccgcagtcttatctcaaggaaccaccactgtttggcacacctgtctaggtgaccctgacagggacctggagaacagaactagcaggggcttgaggctgtcgtctgcctcccaaaagcaccctggaccttctcggatgccctatctaggcagaaagtaggctgtgcctcccacacacatttcccgaaagcaaagggcatcctcgtctgcccacctagggtgctgtaagctgcactcctaagttcagagccctgtgggccacctggctttgcaagttctgccagagggcccgttttgtgagtagctgaccattcccaagggcagcggcgtgtcccccagccttccctgcccgggccctgggggagggagtcggggagtggagagggccagccctgcagtgctgcctgttcctgcggctcctctcggtgggggcgaacacagcagaagagtttctgccacactgcggaccgcacctgctgcatttccctgcgaagccaaatctttgctgggtaacagggaggtgggaagccgatctggagaaggggtcgcgctggcgggagaaagggcaagaaaggggtctgcagatcctgtctggaggcaccacaataatagcaacacgtctctcccggggctggatcccgctgtgggcctggggtagctgctattgattatctcctccttgcctacttcattacgttggcaggagcctctcaccagtgcccctcaacttctgccctcccccatctccccggcccggcagcacccagctgagctctcctggaggttctggttagtaagtcgggctctgccaaagaatgttttcctcgcggggcgggggctgaggcccgggggcccaacgaggtgacgagctcggtggcggcggagggcagcttgtcgccccggccccggccccggcccccgccggcccctttaattcgagttcgccgtcgagccaggtgcggcgctgcgtggcgcggtgcggctgcgggcggcggccgggagctccgtacgcgccgcccgcgggactgcagagccggctcccggctggccgcccgcaccccgccgccgcccgctgccggggttctgccggcgctggccgtaacctaggaacatggaggccccggtgcccatccggaagggtaaatccgtgtcggggcgttgcgcggcgcgtgctgccttccctgcccggctgcggcgcccagaggggctgcggggcacccggcggcgcagcctgcagcgcagcaggcttgggctgagtccgcggcggcaagcccttgccgaccactgccgtctgctcggcaggtcccagaccggggagatcaaggggaacttgcaccctgctcaagaagagtgcacagaatgggctcgggaccctctggggtttgcgtggcgcggggcggagggcacggagaggagctggtgggtggtgggaagtgcagctggcagcataaccatgtctggtaaatagcgcgggttggtaggacctgaaccacttgggacggccgggctgcattcgcctcttcggcacagaataacaaacggctttgctgcagagagggctttccccttcgctggggccgtgggctgccgccgagcccccgcgcttaaaaggaagctgagatctggggcggcagcctggcgcaggctactccccacccccagagatcaggttccgggattttgggttggacactgagcctcggcggtccctcggctggacgccgggggcttaagagctgaactgcgcttgggcccgcagcaggagccgaccgcgcgggcaggagggggttaaggtggcgctagcggccgcggccagcgggagggtctggtcctctgcgcggaggcgagcgctgagtgcgccgaacggaatcccggccggagcccggggcgatggggagagggcccagacccctccccgccctggggccggcgggattgggtcggcagggggccagtccggaagccggcttcctccaggctccccctctcgctgctgccaagccgcctcgcagctaggcaggcggagcgtttattctgtgctccctgccgaggagatgtgagggattttctcttgggggagaaatcagtggtcgagcgcctgcccagctcaaatgccacccggctcagagggaggcctgcggcccagggatcccggagggagagtaagttcatccagttttcgtacagtgcagactttgttgtgtggggtctccctagatgcgctctgaaggagtgtgtgtgctggggggtggggtgcttcttttccaggactggctgaggtcagagcttgtagacaggctgcagtgagctaagccctcctcttgggagctgctgtgtcctgacatgtgggggtaggagtgcttcttccagagtccttcctgagagcagctggggactagcaacctggatcaacccagggaggcccctggagaaggcaggcccagccaagcctgagtcttgctccctgggagaaaatgcttcaagctgatgggaagcctgcccagaagaggcaaggaggctgagggatagtcctcaggcctggcatcagaatagaggatgggcatgggggcctgttacctcccatgagggaagctgccagaccctcctaaatcttggcaccagctggttcaaatgccctggttccaccttgctgctgtttttttccaggcaacgtcacacctcctgaggacagccaggactccagcttttgctgagctttgcatcttgcctccttccttcaaaaggctccaggcccatgctcggctgtcttcaagtcccgcatgcccctggccaggcacctcaccgcccctccagcccagcccaatcctagagctcacctccaggacccagagtctgcccttctgcccagaatgactcaccattatttctagctcgagtgagaagacgtgatgaggagttgggctgcctgttggtgcatctcagattcctgcagcatctgatcagctctgcaaggaagagagcttcacgtctctggtcaggtaaatcaatctatcatttaataacagccttgtgtagaatcactggggtggaggccaatgagaaagacccaggcccaagctccccaaccatgaatacctccctgggtatgagtatctgagacattagtgcagcacctgggagagggtccacttttaacctattagcatggggttatgctccatgaagcctgtgtgctacaagcgggcctgtaccagccaccttcccccaatgcagggcattccagaggttcctggagagattgctacctgctccccctgatccccagacaagttacaaggtgaaagtaaattttgctttgtcgttgtggtggtggtgatcatgtgtctgaactcttggctgagagatgggagacaaaaagtggcaacccaggtcaggctgccaatgctgagtagcctcatgtcaataactgcctctgtctttcagccaagcgaggctgtctctccagctctcagagagctctcggggctctcctgcaggagaccaggccaatgctcctgtgcttcctggggccagtagcagcaccctgagctccctgccaccaggcagctgaaaggcatagcgtgaggtgcttctctcagtcccaattatgacagtggccaccggagacccagcagacgaggctgctgccctccctgggcacccacaggacacctatgacccagaggcagaccacgagtgctgtgagagggtggtga

SEQ ID NO: 4554 - DNA, 6000 bp, Homo sapiens
cctcctgcccccacctcctccagcccccagggttggaccagaaagccttggctgcctctgaacagcagggattgtctggccaggggatgcttgagggacagagaacccagcctggagggtgcaaactgaggaaggtctcagtccctttagaaagtttgttttgccaaggttaaggacacacccatgacatctcgggaggtgcccaaggtgcatgtggcacagctcgcttttatacattttagggagacatgatttatttacacgggttcaatctgaaagagcaggataaattggggtggtgtggggagacctctatgttataggcagattcaaaatgatcctgaccgacagtggttgaaagagttattatcaatagaaaggaatgtctgggttgcagtaaggggttgtggttttccacgcagctgaagcctcgggttgccggcttcagagagaatagattgttaatgtttcctatcagacttaaggcctgtgttgatgttaatgctagtcagcttttcctgaatttcaaaagggaggaggcatgacccacgaccccttcccgccatggcctgaacaagttcccaggttaacactggaacgcccttggctgagaggaagggtccatttggacggctgggggggccttagaatttaatttttggtttacattcacccccttctggccaagatttgccagaggcaacatccatgtccaccaaatctttattgtgtctcagcgttgctgggcgagtgtggctgcccaccctcagtcaatcctgtccctcagtttgactccctatgacccagggacttacagttaaaagatttacagcccattaaattttgtaggccagataggaatggacatggaccagcattcattacctcttaaaacaatttttttttttaaagttggagtctcactctgtcgcccaggctggagtacagtggcatgatctcggctcactgcaacctccgcctcccaggttccattgagtctcctgccccagcctcctgagcagctggaactacaggcatgcaccaccatgcctggctaatttttatatttttgtagagacagggtttcaccatgttggccaggctggtcttgaactcctgacctcaagtgatccgccctccttggcctcccaaagtgttgggattgcaggcatgagccaccacacccgatctatcatgtaacatttttataaattccttttttaccaaaggtattgcagcttacacagaccgttcacgacatgtggactttctagtttgtgctgaacatccctttttttaaacaaccagtcatttatttaaggacaaaaatttaccatacaagattctttctcatataaaattattttttttaaccttacttaacaaaaagacctctttatatctataactttccttggtctctcttatttccttgttctttttaactcattttatacataaactttaaataagctttgaattagacaaaattatttaccttataataagaatttttgtagaaagaacgttttcctataatttttttttttttagatggagtctcactctgtcgcccaggctggagtgcgatggtgcaatctcggctcactgcaacctccccctcccaggtccaagtgattctccggcctcagcttcccaagtagctgggattacaggcatgtgctaccacacctggctaatttttgtatttttcagtagagacggggttttgccatgttggccaggctggtctccaattcctgatctcaggtgatctacctgcctcggcctcccaaagttctgggattacaggtgtgagtccccatgcctggccttcagctgggtttagagttttacaatgcttatgccaagttttgaccccttataaatcaataaatgcaaacaaaaatgtatgctgacagtttttaagacactccttatattactttaccaatacttttggccgggcacggtggctcacgcctgtaatcccagcactttgggaggccgaggcaggtacatcacgaggtcaggagatggagaccgtcctggctaacatggtgaaaccccgtctctactaaaatatacaaaaaattagccgggcgtggtagcgggcgcctgtagtcccagctactcgggaggctgaggcaggagaatggcctgaacccagaaggcagagcttgcagtgagcccagatcgcaccaccgcactccagcctgggggacagagcgagactccgtctcaaaaaaaaaaaaattttttacttaagtcacatgaaatttgttattatgtactaaatgtatgcatactccttaagccactttgataccttgtggccacaaaacatgtatcagaatccacgcacgtacacataaacacatctaaacacacatatacactcatccaaaaaccctacagcttttgctttacacctctaaccatgacatatcaacacaaagtcactagttagaaaaacaataacagaaagaaacatctagatgcaaactgtggatgtcatctcagtagaaaagtaacagctggtcaggcacggtggctcacaactgtaatcccagcactttgggaggccaaggtgagtggattgcctcaggccaggagttcaagaccagcctggccaacatggtgaaaccacgtctctactaaatttacaaaaactagccaggcgtggtggcgcacacctgtaatcctggctacttggaaggctgaggcaggagaatcgtttgaacccaggaggcagagtttgcagtgcgccgagatcgcacccctgcactctagcctgggcaacacagtgagactctacctaaaaaaaacaaaaagtgtaacagcagctttaaggcaggcagcaaaggaaacagagagatagagaacttaggaactctatagttcttttttttttttttttttgaaacagagttttgttcttgcagccctggctggggtgcaatggcacgatctcagctcactgcaacctccgccttctagattcaagctattctcctgcctaagcctcccaagtagctgggattacaggtgcatgccaccacgctcggctcatttttgtatttttagtagtgatggggtttcactctgtcggtcaggctggtctcgaactcctgacctcaggtgatccgcccgccttggcctccaaaagtgctgggattacaggcgtgagccactgcgcctggccaggaactctatggttctgtagttgcaggctgacctttgggctctgaatttttcctggatggaatttgcccatcagtttaaaatgtgccccaaaagaccataatatggaaccagctggggcactaggaaacccagcatgcccgcgacatgttcagttttataccaacacttgcaggtagaggcgcctgaaaccagcggggtgcctggaaggaggtcgccctcttgtctttgctgaggcttacattatttatttcccacttttttttttcttgaaaggaaccgagctgtggcctggggttccatggagcaggtggggcgcggaggaactgagctgtggcctggggttccgtggagcaggttgagtatggaggaactggggttccgtggagcaggtggggcgcagaggaaccgagctgtggaatggggttccgtggagcaggttgagtgtgccggtcgtggacgggtcgtgggcgggactccccagtgtgtcaccactgaggcatcttcgccctcttacgtgtctctgtttctctctctagaagtccaacacctccgagaggactcaaaacacagagtgaccagctcctatgtgcatttcctggacaaaccttttttttttttttttttttgagacggagtctcgctctgtcgcccaggctggagtgcagtggcacgatctcggctcactgcaagctctgcctcccgggttcacgccattctcccgcctcagcctcccaagtagctgggactacaggctcccgccacaatgcccggctaattttttgtgtttttagcagagacgaggtttcaccgtgttagccaggatggtctcgatcacctgacctcgtgatccacccgcctcggcctcccaaagtgctgggattacaggcgtgagccactgcacccagcagacaaacctttttaaactaattgtgttggggggttccctgtggggctgctgcacgtcgtgggggatcagcccacgagatactcccacttggctcacagtcacccaggggcgcctttcagctgggaggagcaaaatgcctttctttctggagctgagaaaactcagtctctcatttatctatgcaaagaacaattcagttcctcatgcaaatgcacgcacaagccagttgggcttaattttgggagaaaaagcaacagagaagacccttaggaacgcacgtccgagctagaaaccaaatggggtacccaaaagggagtcgttctccttgtcttaagaaaaaggtggccgggcgcagtggttcacacccgtaatctcagcactttgggaggccgaggcaggcggatcaccaggtcaagagatcaagaccagcctggccaatatggtgaaaccccatctctactaaaaaaatatacaaaaattaggctgggcgcagtggcttatgcctgtaatcccagcactttgggaggccgaggtgggcggatcacgaggtcaggagatcgagaccatcctggctaacacggtgaaaccccgtctctactaaaaatacagaaaattagccagacgtggtggcgggcgcctgtagtcccaggtactcaggaggctgaggcaggagaatggcgtgaacccggggggcggagcctgcagtgagccgagatcgcgccactgccctccagcctgggcgacagcgagactccatctcaataaataaaaaaaaaaaagagttgttatcagtagaagggaatgtctggttacagtatggcgttgtgcagatgaaggtcttatcgcagatgaagccaccaggtcacaagcctcagagagaatcaactataaatgcttctcatcagactcaaggcctgaggtgatgctgatgctgtgcctgaattccagcagggaggaggcatgaggtgcgtccgactcccttcccatcacagctgagctagtttttcaggttaactttggaatgcccatggctaagaccaggggtccatccagacagttcagggcttataattttatttttggtttatgagggaacctagaaggcagcccacacgcaccttactcctcccagcaggggacaccggccagaccccaagctccacactcccaccctcagcacccacccaggccagcagccgggggcaccttggtgccaccttagtgcctgttctgcggaggctccactggacagtgcagttgatgcccggggccgagggggctctgcctgggaggctgttcacctgcctgggtgcaggaccccagagggaccccaggccacccctggcctgcccatgcccacgggaatcccgaccttgggctgcctgtctattgcaccagaaccgtcccagggctgactcagagtgaccctgagtgggggacgctcaccccaggggaggaaacggggctctgggataggaggtcctggctggggtcccacagatgccaggcgcctgccatctccagggcagtgctgtcacagaagacaacaccgctccctcgttacctgtggcccggccacctcagcggcccaaggaggtgagctcacagccatgctcggtcaatggggcctggccgtctttcctgggagagagcagaggcatgggcccaaagggagccagggatgcctgcccgtcccttctctcattcaggctcacctggtcatggtgcagtgaccacaggacccccacatgccgggagctgggttcgccccaccccaccccctgcaccgggccagcgaggggatggcccagaagagggggaggaccatgtggattcaccagtgctggacatgtgctctgtggctaccccctctgcctactctctgg

SEQ ID NO: 4555 - DNA, 6000 bp, Homo sapiens
ccattgcttagtgagttttaaaatcttatctccaaaatgtttctcaataaatatacagaatagtatctttcctattcttcatccatgctgtcattgtccaaactgaaactctctattgcttgattagctttttaaaactctctttgtcttcttatctcatcttgctcctctccattttgtcctcagttttgctgccagaatggtctttcaaaaatcatgtctttaatatttattgatattctgaatggcaggatgaatctgtcccagctcctgtccttgacgagtttttgatgttttacggttaacattgactctacctttcagttctgagtctagtcctttttttctgctatgcatcagctgccacatcatttccacaagatgccagtcactgaggaatgtaggaactatagccgatgtgtctccaccacgtgtaactttagctaattatttaaagaatgtagtttgacactttgtgtagaatgtagaaaaagtgctgtggaaatggacatggttttatgagtcaagaactgcacttgatcctggctttccctgatgacctgtgttttgacatttgaagctaagtagagcctgctgatgcctggtgaccctgatgaaagttaaaactgatttagaagttgatgatgttgcctgtgtcatgtccaagacatttatttactacacttaatcttagccaaataactgagaagtgatcaagacatttatacataaacaatgaagatatagcttgctgctggggtgaaatggatctggcatgcaaagacctagattctaattctggttctgctgtttactagttgtgtgacttttggcaagccactaaataactctgtgttctagtgtcctcatatttaaaacgggtgtgatagtacaaatcttgaaggattgttgaggggaataaaggaaacaacgtaactcatggagtttagcacaatccttgaaaccttttggtcagtttcaatggaacagataattcagatcaaacaataattattaagcaccttctgtgtgccaagaactgggctagtttctaggactacaaagataaggcctggttcctgctgttaagaagctaatggagggatactaatgaacactatgtaaattttttaactcaatctgagtcatgatgtttcaagatccccacagtttgcttatcccaaaagacatccgcaacatgagctattctgctgattagtctggaacatcaagtttctataggaagtgtatagtgtgttttgaggaggccatgtagcatgatgaaaagacaggtatgtgtttatatggactcagatactcgttaattcactaattaatactctcaggtacctgggtaagtttgttcatttctttgaatctcagtttccttatttgtaaaatgtggagattaaaatactcacagagttattgtgatggttaaaagtgataagatatataacattcctggcacagtccctggcatagggtagataataaatggtggaattaataagaaaaaaaatatccaaaaagaaacagaaatggctttgtaccacactcagttgcatgcatgtttcatgtcctggttagctcctgaataggaaccatgtctcttaaaccaagccttgccttttctttcttttcttttttttttttttgagacagggtcttgatctgttgccttgcctaggctggagtgcagtggcacgatctctgcttactgtatccttgacctcctgggctcaagcaatccccctgcctcagccccctaagtagctagtactacaggcatgagccaccacaacctcactaatttttaaattttttgtagagacaggctctcactttgttgtccaggctgttctttgttgctcaggagtttcactttgttgcccaggctggtctgtaactcctgggctcgagctgtcctcccaccttggattcccaaagtgctgggattacaggcatgagccactgagcctggcctggctttcttgaagatgccaaacgtctaccttattcccagaaacctttattaaattgtaatctatagaaaagaggcgatcccaaggaaaagaaaggaaaagagaaacaggatgctcatttttttggctgctatccctttcagatatattcttatttacttctttttcaaatttcttgtagagatatattcttatttacttctttttcaaatttcttttacagacagtgtctcagtctggcatccaactcaggctggagtgcagtgacatgatcttggctcactgcagtcttgacctcctgggctcaagcaatcctcctgcctcagcttcctgagtaggtaggactacagatgtgtgccaccataaccaacaaattttttttaattttaaattttattttttttgtagagatggggtcccactatgttgcccaggctggtcccaaactcctggcctgaagcgattctcccacctcaacttcccaaaacattgggattacaggtgtcagccaccaagcccggcccacaccacatttctttgggaaaattctaagaactaatatttatttatttatttatttatttctcctgttgcctgtataattgcagaataagagctaatattaattgagtgcttactatctaccaggctctgttctaagctctttacccataggagctcacttaatccttgaaacaacctttgtagacagctactattgttactcacattttaaagaaggggacaccgaggcacagagaagttagcaaacttgcctaaggccatatagctactaagtgatgaatctggatattaaaaccctggtactatggcaccaggatccacattcttaagtactaagctttgagcctctcctcaactagaagtagaaactccgcccagcgcaatggctcacacctgtaatcccaacactttgggaggccgaagtgggtggatcacctgaggtcaggagtttgagaccagcctggccaacatggtgaaacctcgtctctactaaaaatacaaaagttagccaggcgagcgcctgtaatcccagctacttgggaggctgcggcaagagaatctcttgaacttgggaggtggaggttgcagtgagccgagatcgtgccactgctctccagcctgggcgataagagtgaaactccatctcaaaaaaacaaaacaaaacaaaacaaaacaaacaaaaaaaacagaaactcattcatttctataccatctaactactgatccactggcatctgaacccatactctctgctcttctttcttgttactttggataaagtatctctgctagtatcaaaagtcaacctttgcacttgggcttggggtctcagtcttttcctttctttctttttttgtattttattccagtgttttgccaacacaaaaagaggtctcaatcttatgaagggcttcactgctgctattctctcttttctctaggatgtccccagtttttccctctcttgaaaatcagcaaagtaatattctctagtgtcttcgatctaaataataattttaaaaaaggacaaagaaagcccttcccttgaccacacctccgtttccagctagtgcctcatcttttagtttcctttttagctctttctcttgatatttgcacggctggccttttcttatcctccatatctaagtttaaagccacttcctaagaggcctgccctataaccaccccctataaattagctacccactgacttcctattaaaataatttattaaattatttgcagtgttaatcagtattggatatttttcttgtttacttgtttagtgtttgctttcaccacagaatttaagctctgagagagcttattcactgctgtattcccaggacctccaacagtgcctagatatagtaggtggtcaataaatcctttggtttttttttttttttttttttttttgtgtgagagagaatttggctctgtcacccaggctggagtgcagtgatgcaatctcggctccgaggttcaagtgattcttgtgcctcagctaggactacagggtgcgccaccacgcccagataatttttgtatgtttagtagagatgggcttttaccatgttggccaggctggtctcgaacgcctgatctcaagtgatctgcctgcctcggccacccaaagtgctgggataacaggtgcgagccaccgcgcccagccaataaatgcttaaattgcccctgtaggctgttagtgatctatccctacttctttgaccttatctcccaccactttctccctggctcactgctccacgcacactgacctccttgttgatccctcaagatgccacgctcactcctaacatttggtctttgcatttgctattccttcgtcttggaaggctcttccaccaggctccctccttcgctttcttcaggtctttgcttaaaagttaccttttcactcaggccttccctgtttgggaatttaaaatagcagtcccagcgctctctccttccttgcttatgtttttctccatagcatttatgattttttaatgtacgatataatttactatttattttaccattcccctcacctgtcatgaaggctctgttgtatccccaatgtctagaagaatgcctagcacaaaacagcgaatatttattaaatgaatggatttgtggaatgaatgcataaatgaatatcagatatgaaatcttttggaagtggaaggtatcatggccagtaaaattatttattaatatgttcataatcttttttctttactctaatcccatgacagattataaataatcttaatagcagtattcacgtttgcattctcgcatccgtggcatggagtcctacacacaataggcgccctaagaaagcgtgtttgacttgatcgctggagcatctgccggcaccgcccaggacccgcccaggacccgccccgccccctgcggccccgccccccgcatgctgaatgccatataggcgagtgacgtcaggccgtttgttgtcattggcggctcccaagatggcgtccatcatggaagggccgctgagcaaatggactaacgtgatgaagggctggcagtaccgttggttcgtgctggactacaatgcaggactgctctcctactacacggtgagtccttggagggcacagctccaggcgcctcggggccgcgtttcctgggtggaggtgggggaccggggttttaggtggctgagttgaggttgctagtctgggggtgccgccgtacgcgagggttcccttgttggggagggttttacgtctcggatagccaatgagggtgagggagagaggggcgcagccaataaatagaaactagctgtctgatttatgggttgggggtgagccaagtttctttcttagggtccgctattaagcggtagtggggtccagcatggttgtgagcgggtaagggtgatcgtagtcatggcttaaaaggtccagtcttgcggttcatgctgtcttcatatgttgtcatggactttacactgtcccaccaaggccctgtagccggccgcaccccttagcttccctccagggattgaagagctctgcttcctcggaggagtggccagaggagccgggacaggtccaaaagtgaccagccctcgggcaacaccagggggtccgaaatccctccagtcggttcaggttgtgtgtctcattcaagggacgcacccctctatttagcgggaggcgagctcaaacgacgccttaacttttgagagccaaggatttcctacacgcgagactcttgtcagcgaagagagacaagtgatagtgcagtgtccccttacagttacattctgggttcagggcttcactgttgttaacatgagttggtggccgtggaaaagtagatgaattgctgtgaatcttacgtggttgtgtgtgtgtgtgtgtgtgtgtgtgtggttttttttttgagacggagtctcgccctgttgcccaggctggcgtgcaatggcatcatctcggctcactgc

SEQ ID NO: 4556 - DNA, 6000 bp, Homo sapiens
ctctgttaaacattcaaaaaaattagctgggcgtggtggcgggcgcctgtaatcccagctacttgggaggctgaggcaggagaatcacttgaactcggaaggcacaggttcagtgagctgagatcgcgccactgcactccaggctgggcaatgagcgaaactgcgtcccaaaaaaaaaaattattctcttaaacacagtatatacaaagcactctcacattgctgatgtgaatgtctttaaatgaaaagcaactggtaatttatatcaaaattataaatgcacaagctcattgccccagaaattccaattttagaaatttaacctacagataaatccacacagctgtgaaatgacacgtgttcatggctgtacattgcagcattgtttataatagcaaaagactggaagcacatggtgctgtcatgtgcttctggtgaggcctcaggaagcttacaatcatggctgaaggtgacagggatccagcatgtcacatggcgagaataggaacaagaaaattaggtggggaggtcccagtttatcgccaaggggatggtgctaaaccattcacaagggatctgtccccatgatccagtcacctcccaacagggcccacctccaacattgggaatcatatttcaacgtgagatttggagggatccaacacccaaactatatcacagtctcaatatccatcaatagagggttggttaaataaattatggggctgtgtgtggtggctcaccctattattccaacactttggaaggccaaggcaggtaggtccctggaagccaggagtttgaaaccagcctgggaaatatagcaagcccctatctctacttaaaaaaaaaaaaaaggtacatcaataatctgaatactatgcagctataacaaaacacaggaaactgtttatgcattgatatgaaacaatcttcaaaatctattggtatatgaaacaagtcaaaatgcagaatagtgtgtaaagaaagctaaaatttggccgggtctggtggctcatgctcatgaacctagcactttgggaggccgagacaggaggattgcttgaggccaggagttcaagaccaacctagccaacatagcaaaaccccacctctattgaaagaaataataaagaaaacaaaaatttgtgttaacaagggggataagagtatgcatgtgtatatttgattgtatttacataaaacatctttggaaggatagggaagaagaaccgagaggctgggaataagggtaagagagacaagttttacggtttgacctgttatacgtttttggacacaggatgttgttgttgcccagattggagtgcagtggcagtatcttggctcactgcagcttctgcctcccgggctcaggtgatccttccacctcaccctcctgagtagctgggaccacaggtacatgccacaacattggctaatttttgtatttcttgtagagacggggttttgccatgttgccaaggttggtctcgaactcctgagctcaggcgatttgtccaccttggccttccaaagtgctgggattacaggtgtgaaccaccatgcctggccccttttatactttttgaatcttgatttttgttttaagtataacttactcaaaataaataatgaaaatgaaaacaaagcacaataacaaaaattaaaaacatgccttagcaaaaataaaactaatatatacacaaaatcaaaacatacaaactagccaggcccggtggctcatgcctgtaatcccagcactttaggaggctgaggtgggtgggtcacctgaggtcaggagttcaagaccagcctggccaacatggtgaaaccctgtctctactaaaaatacaaaaattagccaggcgtggttgtgggcagctgtaatcccagctactcaggaggctgaggtgcaagaatcgcttgaacccaggaggtggaggttgtagtgagctgagatcacaccactgcactccaacctgggcaacagagtgagattctgtcttaaaaaaaaaaaagaagcaaaaacaaaacatacaaactataattgggtataagattaaaagaaaaaccttccctcctccatattccatgcatttattgtattctattttattgagacagggtctcactctgttgcccacattggagtacagtggtgcagtcagttcactacaacctcagactcctgggctcaggggatcctcccgtctcagccttccgagtagctgggactacaggagtgggccaccacacttggctcattgttaaattttttgtagagacagaggtctccctatgttgccaggctggtctcaaacacctggcctcaagtgatcctcccacctcagcctcccaaagtgctgggattacaggtgtgagcccccatgcctggcatccacccatttaaaaagatttttcttgttttttcttctttttttttagagatagggagctatgttgcccaggttggtcttgaattcttgggctcaatcaatcctcccattttggcctcccaaagtgctgggattacaggcatgagccactgtgcctcgctgctttttgtctttttgtattaacagaaaaggtctcactatgctgtccaggctggagtgcagtggctattcacaggcataatcgtagctcactgcagccttgaactcctggactcaagcagcctttctgcctcagctcctcaagtagatgggattacagtctcgtaccaccacacccagcttaaaatgatatttattgtattttatctggcatttctgggtgtttttttttggtatacttattcatgccacaaagtaagtggtacttatataagtgtacagtgattttccaggttcctttctaacatagcttgcttaaattcacaggtcgactaatgtttcatttcatgtgcatgctaagtgaagctggttagtgatgaccataagcaggtggagaagctttcaatattttacttattttatcagtactcctgattttataaatgatgaggctcattaaccccattcctactcaaatctcctgataaacttggttataatagggcttcatggggatccaaacatttttaataatgttttgaagcatcttggtgtgggacaaacagctcaggctaccccagagccccacatccaatgacttagaaaagtctgtgttttatagtgggaaaagtttggattatttagtccttcacattggaaagggaagtgttttttctcagtcttttcggtattaacaaataccttttatattactatctatcccctctgccctctatggactcttattttgaaagcaatatccagtggacagccaggatttgttacataacaattaatcttgaccttaggacttgttgttctattaggttggtaactttgtctgatccaccaatcatattgctgtcttgtcagtccatcagtttcaagaaacaactgtacatgtcagtgccctgatttgtgtttgtttttcttttttttttttttttgtttcgttttggttttttagagacgtggtcttggtatgttgcccaggctggagtgcagtggctattcagaggtgtaatcatagcacatttgtagccttgaattcccaggctcaagtgatctttctgccgaagcctcctgagcagatgggaggcgtgcatcactgagcgcagcaattttactaagttggtctagtcctagctcagtagttctttacttagcacagagggggcttcttagaatctcctaaacttgatcttagccaaatggccaagaagcaatccttagaatcttctaggagagcctttctaaatgctgatactgcaaaccgaaaagtatatgaaacggatctcaattaatttagaagttaattttgccaagtttaaggacgtgcatcatctttggagacaggtccgtgcctttctccaaagatgattttgagggcttcagtttttataggggaaggggcagatattggggaaagatgaataaattttaaaaagatgtgggtagataagaggcaaacggttgcattcttctgagtctttgatcaaccttcacatgtgaggggggtagagaaatagtcacttatgcattcatctagctcaatgaatctgcatttttacataagataaaataaaccggggagccgggcgcggtggctcacgcctgtaatcccagcactttgggaggccaaggtgggtagatcacctaaggtcaggagttccagaccagcctggccaacatggcgaaaccccatctctactaaaaatacaaaaattagcggggcgtggtggcgcgcgcctgtaatcccagatactcgggaggctgaggcaggaggattgcttgaacctgggaggcggaggctgcagtgagccgagttcgcggcattgcactccagcctgggcgacagagcgagactccggtctccaataaacatggaaggctgtttctccccggtttgctggaataaagtctctgtcttccaaattccttttcggagaacttttgttcacaagattaaaaaggtcacgcagctggtgacggagcctgggttttttgatttagacattgtatccatgtgtgagatcctgcccatccccgctttcttggtgtcctgtgagtttaaattcatgaattcactctcaactgccaccgctaacaggacacaggccaattccaacacgaaccccaacggctctcctcagggtcacctttcatgagtccgctttccggccaacccctcctctcagtcttaggccccactgcaagcctactcccgctcaccgtacagaacctaagcacaggatcagagatggggacaggttgactcagtcccatgcccaagtccgcaaattagggattcggctgcctaagggctagagaacgctccccgccccacaggacgcgccccaccccgccccctcctcctgcccctacgcacgcgcactctcacgcgcctgtgttgccgcccgcggccctggcttcgggcttcagggagctctggtgcagtctccgcctgtcagtgccggcagtcgtccgcggcgcccgccccggtcccgcactggtgcagccatgtcctcttccccgtgggagcctgcgaccctgcgccgggtgttcgtggtgggggttggcatgaccaaggtaaaccgagcagcggccctgctggccctctgaggctcgggggcggtcggtgcctgggtttctctgtccctccggtctcctagcttcgactgctccgcgcgtgggtcatcggcgtggcgacttggtggcttgtactctgcggaatctctggggtcatagcgtctcgggctggttcctgcggccttctgcttcctccttcccttttcttctggtcagagttcatgaagcagccccgagataatccaaggatctcacctctttagattctgagcggagtcccgaggtgtgtgggctggcttgccccggagggaggcaggtcgcgaatgccgcctgctcggccctcccaggaacagcccccacaggagccctcacagagacagctccagatgtggatggcgaggagaaacgctcctgatgcccagcgcctcggcccgagtggcagattccggcctccctctgtccctccagtgactgcttgggacccggacgccgcaggctcccacggccgttttcccctcatcgcccgcatgctccttaatgccaaactgcctttcgtttctccccggacgcagttgtctgatgcctctgttgctttgcttctgttctgtttgtaccgtgtatcttcacctgttaacttttgtgcatcctgaaaggatccgttcagatcggatcttctccaggacgcctcggatcctcctgactttcccctagagccttgcactgtgcttacctctgtcctgcacttactgtgctcggcagtaccgggcagtactaaagctcataggcgtctgcgcgccctcttagcatggcagctcctctagactgggtacctggcttattcactgctgtgccc

SEQ ID NO: 4557 - DNA, 6000 bp, Homo sapiens
ataggaccaaaggaagagttgttcaagcaaaaagaccaaaatggatcttttttgttatgagatcttcgtgaaaattacatgagaaataaatgtggcaactttatgagaataccgatataatttaaacatattttatcataaaaactaaggttaagtaacattgaatactgacttttttgtaaaaacatttagtagtagctttagtttttcttgagtcatacatcattttcagtattgatgcagtcttatttaaatgttccaaaaattattttaatatactattttgatcaaattcatgtctctaatttacctttaaatcattttatggtccttaggacaatgtattttcaattatttggagaatggatataataaaaaatatggaagaacgtatttacagctggtctcctcctcccagatgcattcgtgtcagttagtgcactcatttgagatcccagtatgtccgtaactgtctaagatctagatatttaactggaaaattttgtacatcaactctgaagccgaatttatgtctttttattttaaaacagaagcctatctagtttccagttccaaatgtgtctgaatacatttaaaatttctggataattagtggattctgtcacttaatagggccaagcagcaatagaaatataagtcaggggccaggcgcagtggctcagtcctgtaatcccaggactgtgggagaccgagacgggcagatcactttaggtgaggagttcaagaccagcctggtcaacatggtgaaaccctgtctctactaaaaatacaaaaattagccgtgtgcagtggcacatgcctgtaatcccagctacccaggaggctgaggctggagaatggcttgaaccagggaggcggaggttgcagtgagctgagattagaccactgcactccagactcggtgatagagcaagactctgtctcaagaaaagaaaaaaacacatatatatatatatgtatatatatacacacacacacatatgtcatgaagatcacaaaatacactaaatacacattaaagtaacactgcttcagtatttatatcaaagtgaatgcattgatttaagtagattataaaattatagcattaattaacaatgcttgcccaaaggtcacttgtacatctctcacaattatatgacatctattcttatagctaatgctcatgctctgtcgctttaaatgaagacacattcagttatagctgactttcactttttaggtaaaggggtctctgaaagttgtttgtgtgtattgtttgcaatttacaaaacattccattatagaaactatatgataattaggatacaatagagataaaggacaatggtaatcttcttacacattcatagaagcactgccctcaacaacagcctaagcctctggaagggaagtcccttttgctcctgccataggcaccaactctgtcattaatccacttaacaaatattgttgtgtgtcaagtgcctttataggtatcgaaaataaaattgtttacgagagaaactgaatactgtagtttagagactggaggagattaatcgaaaagttgacaagaatagatcagaaaactcatgattatgacaaatgctttattataaacatgtatcatctttaacatgatttattttcctttcagatagtaaaattggtccatttacatttttttctaattactaaccaaaaaagaacatacacattattaataagttagaacatacgcattactaaaataattactaccttatacatatacccattagtaatgtatagaacacatacattgataatatataaagaacatatacattactaatatattagaacttatttttgctatcttgtttgttttttcctgcttacatttccacatttctctcaaacaccatggctatatgggtttaagcatccacttaagatgacaactattttaaattcctggagacaaaagatttacaaatttatttccttgcctgtggtagcagtgtgtactgtatctttgcctgggaaatggcatttgactaaatgaagtctaagacctcttaatagcaccagaaaggttcaggttattgcaaagtagccagaaactcttccaaataattatagggaattgagagtctgctagatctgcattcctcaaggcctgccagagctctgttgacagtctcaaagattctttgcttttattctgcccttccctgtgttttcactattttctttcaaaattcacagatgtctaggaaacttccagttttgctgttttcaattcattaacagatgtttcattgtttcaccatactgccatgtttttacttgttcccttctataaaagaagtattcaacaaatatttacttttttctctactttttctattttaggaacatgctcaaaatcagatgtagaaattgaaaatggattcatttctgaatcttcctctatttatattttaaatgaagaaacacaatataattgtaaaccaggatatgcaacagcagagggaaattcttcaggatcaattacatgtttgcaaaatggatggtcaacacaaccaatttgcattagtaagttatttacatattcccactcagtttctgtcaacttctttcctctctttgaggtgatagtgttttacagaaaaagatagaaaacacttttaggagtaaagagatataaatacttctaacatcatctaacattctgtgccaaactaagtcttttttgcctttttagagtaatggctacttgggaagatgatcattccatctctctcaattcaatttgcctttacgtaaaagcaatcccatcaggtacagactagttagggagctgcatgggaatatcagcacaatgtattacttgtcaataaaaactttgttcttttccctttctttgtatttcaaaattatcaactgcttgtattgtattccttgctcacactcttaagatgtacatgttagggaagggatgagtgcttaattctgagtttctgctagcatcaggaaaatgagacttcaataatttgtatcaatgatgcaactgaggagaaccaactcaaaaaattatttccagcttattgtctagtacagagaaaacaagtaaagaaaaagagtaagtgggtgggctgaatgtttacaaacctcatacttggcaatggattccttacaactaaagttctctaaaacattcccaacttgtaattatttattaataaagagattgcataatgaacaatggaaaccttgcagtggcaaaagtttatcttttttgtctttcctctttaggcattcaccaagatttgtaaagataaatcatttaatgtatttttaacacacatattgatatataatttacatactgcaaaatccacttcattttcaagggtacaattcaactatttttagccatgagacgaaatggaaaggactactgatatgtaattgaacatggatgaatctcaaaaatattaatctaagtgagaaaaaagaaaatgctacacttagaaagtgattatctcaaagttactctgaggtttgggagctataaaatatcaattcgtacatttctagaatactgttttcaatttctatgcttatcacgggctctgcaaaagacaaagctgtacacttcaatctgatttgaccagctttgataaatgatctaagatttgtaaaataaaagatgctttaaaatttttatagaacgtatatccaatgaatataattttaatccaacttataaaccctgtcagtaaactgagtacataaatatgtacattaacttttaaattcacaaaattttatcttctttaaaataatacattatagtgataaaggtagactgtaataacagtcaatgaggtgttcacaaataaaaatagatctgactaaatagtcttaatatgtttttcatagggtttgaataatgagaaggatcattatagggaaatgtatttttctcttgtaattaactgttatagcacaaaaaaaacactgattgtcggactatttttaatagtactcaatttattagcacacactgattggtaaattttattcctacaatgggactttcttagtcgagttgtacatcatatggcatagaaaagcaatcctcaattttattttgtttcagaattttgtgatatgcctgtttttgagaattccagagccaagagtaatggcatgtggtttaagctccatgacacattggactatgaatgctatgatggatatgaaagcagttatggaaacaccacagattccatagtgtgtggtgaagatggctggtcccatttgccaacatgctatagtaagtattttattcaagtatttctttttactagaattaaacaaatagaaacatacatatgtatatgtacacatatgtgtatgaatacatatgtgtacatatacatgtagtcctcatttgagtgtgaattaccttgaaacttaaaaaaaaaggttgaaaatacaaatgtcttcctaagaaatcaaataagatacatttaagagtatataaaaagctttattcagaaagtttccaataaaactgttgatttttccccaatgtaaagtattttttttcagattcttcagaaaactgtgggcctcctccacctattagcaatggagataccacgtccttcccgcaaaaagtgtatctgccatggtcaagagtcgagtaccagtgccagtcctactatgaacttcagggttctaaatatgtaacatgtagtaatggagactggtcagaaccaccaagatgcatatgtaagttcttaatattctggatctgagaaaattagagtaataactttgatccttgtttatttatactaaaatttttatgggttattaccctagaactgtgttcacaaacagctattctgctgaatatttgcctttcagatcttaatatataagtgtataagcttggaaaattttatgtaaacaatgacaaagtttccttttaaaaacaggaatgttcagagacctcaatttgttaatggacacaatgagtcttcaagaatgatatccatttattgcacacatatgaaatacagcatctcaccttaacatcaataaccattttcacattattaatacttaggtaaacagttttcaaagagttttgaaaacactgttttaaaaaccatggatgtggaaccaacccaaatgtccagacccaaatgacagactagataaagaaaatgtggcacatgtacaccatggaatactatgcagccataaaaatggatacgttcatgtccatgtcaaaagtgacatggaggaagctggaaaccatccttctcagcaaactatcacaagaacagaaaacctagcaccacatgttctcactcagatgtgggaactgaacaaggagaacaggtggactcagggaggggaacatcacacaccagggtctgtcacaggatggggagctaggggagggatagcattaagagaaacacctaatgtaggtgatgggttgatgggtgcagcaaaccaccatggcacatgtattcctatgtaaaaaaactgcatgtcctgcacatgtaccccgaacttaaagtataataaaaaccatgcactattaactaaaatcctacttgaaaacctgaaatgcttcctgatagagcacatagctagttaacactgagaagttctttctctgattattgtttttttcttacactttaccagtatttctagcaagaaagaaagaaattaacagaaagctcagccatttccaaatgccaatgctttctgttttcaccttcatctcctctcccctcgtcccagaatgaaaatgaatacactaaaaagccctcaagtctgtaatacaggtatactcttagaattttgtcccacaaatcctatgaacttgaagaaacacaattcaaaaaatatgagccaaaataattatggcagcaaaaagaaaacctaaaagaaaatttgccacaaatttctactagccta

SEQ ID NO: 4558 - DNA, 6000 bp, Homo sapiens
cctgcttggtgttttctgagctttcttcatctgcggtttaatgtctcacattaatttgtagaaattctctgtcattgtttcaaatttttcttcagttcttttctctgtttcttcttctggtgttcccattatgcttttgtggttgtcgtacagttattggatattttgttccaggcttttttttttccagtctttttttccttttgcttctcggttttgtaggtgtctgttgagatactctcaagtgcagatattctttcctcagctttgtctagtttactaataagcccattaaaggcagtcttcatttctgttacagtctttttgatcagtagcatttcttttttattctttcttaaaatttctgtctttctgcttacattgcccatctgttcttgcatggtttctactttgtccattagagttcttaggatatttatcataattatttcaaatttctggtgtaacaattccaacatccctgcaacatccaagtctagtttcgatgcttactgtgtctcttccagctgtgttttttcctatttaatatgtcttataattttttcttgatagccatacatgatgcattaggtaacagaaactgctgtgagtggacctttagtaatgtggtggtaaggtgtgcatggaggggaaacattttcagtctgttagtgaacttttgtcaacttcacatgtgcttctcaagtccatcctgtaagtgggagagtagggctagagaggactgaagttgggtatatattaaatactttctcctacaaagaagcctagaggggacgcattaggggattttttttcccccagtattcactgtgatgacccttattgagctcctggaggtaaaactcacaaaactgtggttctcccccctgcccatattactacatgtccctggagtttatatctttcagacttgtctgcactgagcttccaccaatttgtcaaatacagatcaggtttccctaccacccgtgcagttgaaaacccacatacaacttttgactcctccagagcttaactactcatagcctgctattgactggaagccttgccaataacataaacagttgattaatacatattttatatgttttctgtattatatattgtattcttacaataaagagaaaagaagatgttattaagaaaatcataaggaagataaaatatatttactgttcattaagtggttcccatgggtgctggttcccatggaggttgccccttgtgagtttttgctcagggaagttgtgattctctatatttgcctgttggtctcctaatttgggagtcatcagttttccctgtgacctcacttctcttacagagttaagaacagttgttggtttttcagtttgttcagtgttttacatgttgttagaacacagtggtacttctaagtttcttaacatgctagatcagaaacctgaagtctcacctaatttggctttttatattttttcttcttttttttcttccattgctaccaaagcatttttcatctgtgtctggggtgacattagagcagaatgtgatttctaggtaaacattattgggctccctagcagaaaaatttttgaaagtagtacatgaattctgtataattaaaattttcttttcatcttaataggtataggtaataggcacggcctattttttttttgctcaacagtctaaaatagtaatttaatcacctaatagccttagttatatagttgaaagaagagttggaaatctgattcatgggttggaaatcacctgtcacatatgagttttaggcactggtcactttattttgaaacagctttggggttttttcctttttcaactcataataggctttaacagcttttagttttgtttctgtttttttaacagcatgagttgccaaatttggttatagcttcttggtacaagatgggtaaatttgctttgtgttgtgtaattactttttattttaaatgctacctcttttatgaacactaactttacactaagattaggaaaatgagaattgcatgtctgcaacaaatagctatctgtagtattaaattgtgaaaatgtagactttggattggagctggcatctcttaatatgtaattgtaacatagagtaaataagtattttgtcccttgtagggtcaaacagtacagtgcatgggcagaattagagatgtaggcttttttttttttttttttttttactggcttagagaaccgtttgatcagctaatatggaattaagtccctagggctgcccaggcacaacattaactgctattaaaggaaaatttaaaagagtattagtgaaggttaaatactgaccatggacatctggcaaaattgatgttttttttcccctccaccattgtttatagtttattgttatttatcagagaattaatgtttattttcagaatctattaccataagaaatctgtttgaggacttcgtatgtgccaggaattctactaaataatgatataatgctgaacagaattagataggatcctcacttcgttaagcttacagtctagtggtatagatcaacattaatcaaagaataacacaaatagaaagcagagcagtggttcatgggattgactgtagagaagcatgagggaagttcccaggtgatggaaaatactttatttcttaatcgtggtggttacatgtgtgcatatgtttatgaaaatatattgtacatttaaagtggatacattttatcacatgtaaattatgactctataaagttaattaaaaagaataactcaggtaaggtggtgtgtgcgcctgtagtcccagctatttctgaggcaggaagatcacttgagcccaggagtttgagttcagcatgggcaacatgagacctgtgagactttgtctctaaaaaaatttaaataaataactaagataaatgtaaaattacagctgtagtaagttctacaaaggagagttacatgggctatgacgatgtaagatagcaagaactgacattggcagggaggaaatgatgatgagtagaagtaaataagtgaagtgtggggattgatgtcaaggggacagtataaaagaaataacagcatgcgccaaggccctaaaattggaaagtccttggcaaattaaaggagtttgaaaaaggccattgtgtgcaaagcagaaaataggtactacaaggtaaaagatggagctaagcggtaggtaaggctaaaccttgtcagccattgttaaatattgaattgtatcctaagcacaactcagtggaaagcagttaaagttctttaattgggggaggcaatgaaggggtaataaaattggttatagaaatactgctctggctctagtgttgagaatgaattggagtagccagagtagattcaagaagactttagtaagattattccaacaggccaggacctgttatagggtggtggcaatggagagagatggacagaatggagagtgtatttaggaggtaaaaatgacagaacttggtgatgcactgaatgtgaaatggggaaggtgtctaggaggactactaggtttatggtttgcgtattagggtggatgatagcagtttcatttactgagacagggagccctggcagagtacccagcttttagagtgggtagggggaaggggagagtgcatctggtgttgggcattttgaagtgatttacatacaacaaactgaaggtatctttaacactgagtccagcaggttagcatatttattcagcaagcattgcacctttttttgttgtttttggggtcttcaactcctggcctcgaatcctccctccttcccccgcctctcccagcctccgcctcccaaagtgctgggatttcaggagtgagccaccgcgcctggccagcatcgcgctgtttgtgcagtgtgccctgtgctaggtcttgcagtgggtaccagtagagacataaaagtacaaaagataattggacgtttagtagagtcctgaaagggggcgggataggaagatacctaaccataagaaaaaccagcaagagcggaaaaggagctagtcctccagatcaataagttaatcacttatgtttgtgattccctgcattttgggtgattctctgtcgaggtcctcttaagtccagacttttgatataatctgcagtttgcgccatttggattcctgaagcatctttacaagccacctacattccttatggagctgtggcacaacagcaagcccacgatgtctcaccggattaataaaaatataggcgctcacgcttttgtttaccgatatagtatctcctcctcccctcactccatcaacccccacgcgacacaactttccggaagtaagcaaaatccgttatcaaggtgaaactccggggaccaggctccacagctgccataaactggatggcacgttagaagccggtgggtgtaggtgaggcacgctggcgcccgcgggcccttctccagccgctacccagtgggaatccgcggggctgaagccccgaaaccaggctgagcgtcccagagcgcaacctccctttcccccagcagcgccggcgccgcagaagccgcgtgtccccaggcgcactcccccaaggtgaacccccgccccccacggaggcggctgggtcgcgggtctgggcggggcgctccggacgccctcccgccgctgcgcacccctcccgcgagctgccagctccctcggcctctccacccaaaactggcccaaccgccaatcgtctgcctctcacctcctacagcaggtgacccatggccaatcgccaggggtctctttgccaggagccgccagggccagccaatcggggcgacccctccgccggggaggggacgggaaaggggtggggggtgaagggggtgaagggggtgtcccgggggacgggctgaacctcagtcaggaccgcctgcaccgcagtccggggatcgggtcgaggggagaagaaaaaggggtgctcgggagcagcccccggctacctcccctggaggcacagagggcgggggccttggcgaatggctttcttgctggccacttgcggagtgagtagaccccgagggtctgggagaggggccggcccctacccctgagtccccggggtcccggccgccaggccggagcgcgaatgtcgtgctcaccctgcctccttcccgccgccccctggggtgagtaggacgacgtggctgcccgggcccctcttccttgggagttctcagttcctcagcctagatggggtggaggctgaggtcagggcctccagttccaccgagagggcattcgcccccaaatgagactttggaggaggtctctttttttctattcatttttgtggaactctgttttccttttgaaagctgtctcagaatatgattttaagcagaaaagttaagctttctcttatgtgaaagcttaattttgaccagttgcccattaatagaatctccagttgcaggccaagtgttttttggtggtggtttatttttggcacggtgttcgtgcctggccctgtattttttgtgtataaagtaattacggatgctattgtttttgagtatgtgtgtcgggaaggaggtgattttacgctttttgggtagcttgtgcaaaaatactgaaaactttggtatagttttatggggttcttagcccagccgagttatggaaagttgagtataattaatggactaggaagcatatttgagtaatgcactttttgctgacattcatactgtattataagtatttgttatgaaaggttgagagatgtattgaacaagaaaaccagttttgctaatttgaagtaatactttgttttgctttttgattaaactgtttacttttagctgtattaaggaagttaaaatcaagtaattcctagtttctcagtggagaagctggaagcatcttagaatagtagttgtagttttaaaagtttttacagtgaactttgaaactggaaattctcacgtagttaat

SEQ ID NO: 4559 - DNA, 6000 bp, Homo sapiens
aaagaagatatttatgcagccaacagacacatgaaaaaatgctcatcatcactggccatcagagaaatgcaaatcaaaaccacaatgagataccatctcacaccagttagaatggtgatcattaaaaagtcaggaaacaacaggtgctggagaggatgtggagaactaggaacacttttacactgttggtgggactgtaaactagttcaaccattgtggaagacagtgtggcaattcctcagggatctagaactagaaatagcatttgacccagccatcccattactgggtatatacccaaaggattataaatcatgctgctataaagacacatgcacacgtatgtttattgtggcactattcacaatagcaaagacttggaaccaacccaaatgtccatcaatgatatagtggattaagaaaatgtggcacatatacaccacggaatactatgcagccataaaaaaggatgagttcatgtcctttgtagggacatggatgaagctggaaaccatcattctgagcaaactgtcggaaggacagaaaaccaaacaccacatgttctcactcataggtgggaattgaacaatgagaacacttggacacatggtggggaacatcacacactggggtctgtcgttgggtgggggaagggggaagggatagcattaggagatatacctaatataaatgacgagttaatgggtgcagcacaccaacatggcacatgtatatatatgtaacaaagctgcacattgtgcacatggaccctagaacttaaagtataacaataaaaaaaggtactttgtagtattctccctgcccttgagaatgtactttgtgagattcaccccctgcccacaaaaaattgctcctaactccaccatctctcccaaaacctataagaactaatgataatcccaccaccttttgctgactcctttttcagactcagcccgcctgcacccaggtgaaataaacagccttgttgctcacacaaagcctgttgggtggtctcttcacatggacgtgcgtgacaaattttatatcttttggagagaaaaactgctctattataaatatacattcttcagtgtatgctgagtctatgaaaactttttgctgtttgaagctcaacaagccttttcttcctcaaaaattcaggctctgatagtagaaaaccatgctttttaatgttgtttttggaaaagcatttaaatgtctaatttgaaactaaagccggattatgactttattgtacttggctgtcttgatagtataggaaggtttatacgttcaaggagaaggaggaaaagacctcagagaataactcaaaatgttatctcctatagcttttccattctgtgtctattcatagcacttaacgtccttatctttgttagcactttgcatttacattacactgtgaatcctctgttatctttaacatttggtagagtgtttgatacatgttcgaatggtttatttttagaagcaaccagattgtatacccttatgtatgtagctgagtcctaggtcagttactttcatgtaaaaaggttgaccaacatcttgttaggaaatgtttgcagcaagatgatgttttgtaaccagttggttggaagtacaggtggcttggacttgcatttggcatctgaagtatgaacagcctggtgggactcagccctcaacccatgggatctgacactatctccaggtaaatagtgttagaattgaaatgaattacagaatacctcatcggtatctgtaaaagaatcgatttgctatttgggggaagccctcacctttccgacatctagtcacagaagtgtgctgtgagtatgttgagtagaaaggaaaaacagcttgctttttctatttacatctagcttttaatttacatcaccgttagggcttagaaaacaatacaccaaaataaaagcctcagaagcaaaaatttttctctggccttctcctggcctcctgtctctcagtcccattctccccaccaaggccagccgtagaaactagaatccctcttcctcaaggcagatcatgaaagccataaccccttttccccaaagccagtcataaaacctagaatactactataacttcccttcacctttctgtgtaaaaactagccataaagaaattatctgacctatcttgtttgactgggggtcataagacccccattccagaaagggacctgccccacgcccagaaggaaggaatgcgtgctcagagaggccaagaagaacctagatggacaggcctggctgggtttccccactcagtctattagcattagatcatatgctttttgtccaatcatatttctatagggctgttccatactttgttgaacttaagcataaaatggacaacttcccctgtatctttgggtctttattctgaatgctcctatgtatacatgttaaataaatttgtataccctttctctaattaatctgacttttacaagttgatttttcaggaaaccttcagagggccaaggagcatttgctccctttgcccctctctacgtaaccattccccagttacttcacttctagattatctagtttttcactgttataacagtatgatgaacagatagctttgtgtgtaaaactttccctacatttgattatttccatggaatggttttgaaggcattttaaagactcttcataactttgtacattgctttccaaaaaggttgtcctggtttaaactttgaccagttctgtatagaggtggctatcttgccatagtttcccctgcattgattattcccatttttacatattcttaccaatttgattggtgtaaaatggtatctatttgatttttatcaatggtgagattgagtattttctcaaatagttgtaaattgcatctgttcttttgtgaagacaactagcagcgtatctaagaccagtttgaatattttttgtcttttttgtcttacatattcatttataaaggcagatttccagtaaaactgattgcccccaagtttgggtataatagagtcatttcactttgaccttcctcattaatttctaaattgttcacaattcaaaaagttattaccagttgtggagctacctttttttttttttttttttttttgagacagggtctccccctataatcttgccctgctggagtgcagtggcatgattataactcactgcagccttgacttcctgggctcaggccatcctccttcctcagcctcttgagtagctagggctacagacatgtgtccccatgcctggctgatttaaaaaaattttatttttaggccgggtgcggtggctcatgcctgtaatcccagcacttggggaggccaaggtgggcagatcacgaggtcaggagttcaagaccagcctggcgaatatagtgaaaccccgtctctactaaaaaaaaaaaaaaaaaaaaaaaaatagctgggagtggtggcgcatgcctggagtcccagctacttgggaggctgaggcaggagaatcgctggaacctgggaggtggaggttgcagtgagccaagatcgtgccactgcactctatcctgggcaacagagcaagactctgtctcaaacataataaataaaataaatttatttttagtagagatgaggtcttgctatgttgtccacactgggagctacctatttttaaatagtgtttaagatacatggtctgtaaatatatagacactgcttagaaatgaaaagcagcagttaaatttcttggggaagttggggtttatacaggaaattgtcacaggtactcaggaattggaagttgtggctggggatgtgtatggaagaataggcactgtaagtagtagacctgcagaccagtctgccctgatagaacattctttttttttttttttttttttttttttttttgagacggagtcttgctctgtcgcccaggctggagtgcagtggcccgatctcagctcactgcaagctctgcctcccgggttcacgccattctcctgcctcagcctccctagtagctgggactagaggcgcctgccaccacgcccggctaattttttttttttttttgtatttttagtagagacggggtttcaccgtgttagccaggatggtcttgatctcctgacctcgtgatctgccctcctcggcctcccaaagtgctgggattacaggcgtgagccaccgcgcccggccctgatagaacattcttaacccagctctccttcaatagctggtccgatagaaaggcaaacaaatatacatctggagtcatgggttctaaccttacctctgaaattagcctgctttgtaaccattcacagattaacctttctgtttctcagtgtttacatcagtaagttcctttcagctctaaacatctttgattttattattcaggggacagaatgttatccttttgaatccagaacctttcttgtgaatatctgtgaataggtctggaaaacaactcattgttgttgggaactacttggaggaaaataataggaaaaatttcccataccagctaaacttttagggaatgtgaacttccaaatccttgtttattttcttttaatacattaaaaatggtaaaattaaattatttttatgccattttccctggactagagaattgtagattcggtgttttctctttcaacatgccagaaaacgacaggttaagttgaaagagtgcaggaaagaaatttagagagaaaataactagctgcaaaacccttcggtgttttaagagaagttactatttacacaaacgtggcctcggcttaatcaaatgctttaatttaaagtcacaaacatcccttttctggcttgagaaagctggtggaagcagctcagtgctctgtgttcgatttgttaggtcttgctcagtgtgcagaactctgctggcagctgagaggggaagccggaaagaggcaagttcctggtgcaaaggtggctctgcagcataatttaggcattggaggagctgtggttgtaacactctacaagatgggttttccggaagccgccaggtgagtgacattcagagttttgtgtgtcagttaatccttctgacttttcacagttgatgatgttttacatgtaaaaatttcttattttattgtcttagtatttaaggaaaagtatctcattacattgttttaagaacatggctttaaaagtggccatcaggttttaaatttaaccaactttaggtgaattctgttgaaaaaggacccaggatagtcacgagagtactgaactagaagcctgagctagctgggtatgggtctcggccctagcaacctaagttatttaggcaggtctcctcatggccttccaggcttctgaggtggtttagggagtcactaaatgtgctgattggatctttgcaaatttgtatttccgagtccagctaataagccctcgttgatgctagaattctttttgtctcttgctgactttcttcctctccttcaactgcccatgctcctcaatttgcaggcactttctttcgcatcccactcaggatccctcaactcccttgcttatctctcaaagaaatgttcctccccagaggaaaaaagcgcccctcctgtcaaaggctcagctttccttgttccatgcttttgtttccagtcactttctgtaacttggttatctttccattgactcctttccctctgtcagcatacatgttcaggtcttcccttagatctctttttctccttgccttaattgttgttgttcatgatgagccttttatgttgagccacctttatttttccaagccggaatacctcacagtctaatttttacctcaccactgaggtcagtgtcaggtaaggccaccaggatctaaatgaaattgaataactttgtctttattttccctatttactctctttaacccggctgtagcttttgacattaattggctcccttttttcttttgaaattcttggtaattatttaat

SEQ ID NO: 4560 - DNA, 6000 bp, Homo sapiens
ttctactccgattgattccatttaaatgtctccctgtgttgtgtgtgctctgcgaatcctttacctttttgttctctggtagtgttcttcatctgataggtatccttggtccattcttggggagttttactctactctccagagtgtcaatattcatccaaataatctagggagttgttgtggaaatttgtagagccctttcactccatagtttcttcttttctgactctctttcctgcagattctagtgacctcatcttctttgggaacattgagttttgtttcttctactcagcaagtctgccattttctgcttgaattctccttctccgtgcggctgtttggaaattttctcccagcataaagtcactttgatgatggaattcatctcattgtcactttttatctggaattaggtgcttcctgctttccaatgtctgaaaatgttattttcatctatttggttccatttccttatttgtggctggaactctgttttacttgattattcttgcctgagcttttacctttttaaattgtctctactgtttgttttctatttgatttctacttatatttgaatttgtttcaaaatttatactcatgctgtattttgtttgctttctttgttataatttattataaataataatttattttcagttttactcttttcttttatagctatgtaatgataaatttccctctaagcactatttgagtgtcatctcaccaagttttatttaatatgtttttattatcattcaattcaaaatatttgatgtttcctcttccaattttctccttatccatgagttatttataaatgaagctgatttctgggaggcaacctaggaaccaacagtaatttctatcatcagtttacagagacagtaatgtccactctttcaagttaagtactacataatttgaggaatcatcattttggcctttcaagataaataaatctgttactgtctctcatcttctttgaactccacatgtccatttactttgaagcacacagtaagaatggcatttcaaattcttggagccaaaggctatgacaattattttggcagattttctaagatcatcacgggatctcagacactccaattggttaaatgagttttggaattgcctaaaagatctaaaataggcaagattaaaaagtcttaagaaataatactcattgtctattgagttctgacatgctgtagaattccaaatccattagaccaacagatttccaataatttcttagaaataattgtaagagtcttaaataatgccttgttttagaaaatgatggagagtcttgatgtaatgtctttggcaactcagaacttattttctttgacttaagtatctgaatgcttatgattatccaagttttcagttacaaatcactcattattttttatatttgcatattatttacattcttataaaatgttattgaacatatgcttgtctttttcttattctcttcctttttagaaacatgttccaaatcaagtatcgatattgagaatgggtttatttctgaatctcagtatatatatgacttacataaacaagcaaaatatcaatgcaaactaggatatataacagcagatggtgaaacatcaggatcaattacatgtcagaaaaatggatggtcagctcaacccacatgcgttagtaatttattatgtttgtattgattatccagatgatacacaaaagtttactaactttagtctttttatgggggctgatataatttcatttgaaaacataagaaaaaaactttgaggaacaaagcagacatcaatttttttttccttttcacattaattactcaaatattagtgtgcttttccattcaggcttttcccactctaaagcattctgtgttacagagacgagttagggagctttatgtgtattctggtttaaacttatttctttttagctgagacctttataactgttgtatatacctgttttatgtgattagccttctatatcaaagtctttctcctagatataaaagtaatgtttttaatgaagatatggaggcatagtgcataatatcaaaataatttaaactctataatttgtagatttggcactgtaggatatgtccaattctgaatatcttcccccttagaaattttttgcaaatatataggtagtagagagacaaaatatttctagatggtacccatttctgctctattgaaagatttccctaccatactatctaaatatttatgaagattttctaggaacagttggctcagtttgtgctattttttgcaaagccactcggtaatatatgtatatttatatatatatatatcatatatataaagatatatatattatatatttatatttatatatatatgatatatatgatatatatcatatatatatgatatatatatgatatatatcatatatatgatatatatatatgatatatatcatatatatatatatatatagagagagagagagagagagggagagagagagagagagagagagtcttgctctgtcatcgtccaggatggagcacagtggcatgatcttggctcactgcaacttctgccttccatgttcaagcaattctcctgcctcaacctcctgaatagctgggattacaggcacctgccatcttacacccacctaatttttgtatttttagtagagacagggttttgccatgttagccaggctggtcttgaactcctgacctccagtgatctgcctgcctctcagtaatattagtgaagtaatgtttaatatactcacattaagtgaagttaatatttaggatattcatgcatactgttttcatttcttttttaaatgtctatgcttaatatgaggtctagtttacaaaaatgttactcatcataaaaaaatcttagtaaatttttattaattattcttttaagattttcttattatgaaagagaaaatgtcttgtataacaaaggaattcatctttttaatcctttttttccctttttacatatgtctcaactacaatttagcctggacttttaatgtataaaattctgttatgattttctttaaaatgtaatatacacctgtagtgacctgttttattactagcattgtcataaatgctttagtataaatgaattaagaaaaatgctcttaaaatagattttggggcttatcgggggaaaccagcccctggcaattcaatgtaggttcttttctatttccctaagtgtcagctggtctgagaaataaagggaaagagtacaaaagagagaaattttaaagctgggtgtccaggggagacatcacatgttggcagattccgtgatgccccccaagctgcaaaaccagcaagtttttattagtgattttcaaaggggagggaatgtacgaatagggtgtgggtcacagagatcacatgcttcacaagccaataaaatatcacaaggcaaatgggggcagagcaccaggacaaaattaaaattgctaatgaattttcaggcatgcattgtcattgataacatcttatcaggaggcagggtttgagagcaaacaacccgtctgactaaaatttactgggcgggatttcctcgtcctaataagcctgggagcactacccaaaaccagggcttatttcatcccttatctgcaaccgtataagacagacattcccagagcagccatttcagagatctccccctagtaatgcattctctttctcagggctgttccttgctgagagaaagaattcagtgatatttctcctatttgcttttgtaagaagagaaatgtggctctgttcttcccagctctcaggcagccagacctaatggttatctccattgttccttattgtaccttaaaataatacataccccaaaacacaagtttaaaaagattgagatatcaagaatatgctgaaacttttgtactcagtatgatccattgtgagttatcaaaatcagtatgctactctaaacacatgaaaatacagacagtggaatggggtccagacatactggtttgttttcatacgatccttaaataattaagttgggtattgggaagcaaaggacgatagaatattaaagtaacatggaccctgagagatattcatttatgattcatctgcttgtggaagaacttcaaacaattttccagtctttaattttaaaattagtgttctcgttgtaagaagagtatgtgtgtgataggagatagtattatgaccatttgtggaaaaaaaacaacctaccatgctcaaacagcaggattttcagaagtagaatagtgtgccagatgtttattttcaacgtgatgtcaacacggctcctatcttcattttcttctccattgcagaagataagtctgaaactacagtttctgaagcctgtttctccataacttgcttcttccttagattcccccatgagatgtacttaaagaagacttggaagaagagaaagacaaggcattatctgtcagcagctgctggtagcagctgagatcaccaacagtagctttccttgcttctggaagttttcctgagaaacatccactgcagcaccatggataattagtgagggcatcactaagattcctgaacttcagaattttctggaaatagcatttctgacctttgtccctcaatgcttccaatagttgcagaagcctttcattccctgtattaaaactctctttacttaaaaaataagaaataaaaatgaattaatgttttatgttacttttggagttggtccattactgtcactaaataaagctgtacatgtacataccagggaatcaattccagagatgattgtgaaaccactaacaagaatcattgaagcattttgcaaaactctctgaactttgatatttactaagtgaccttaaagccctagctttgtggtagtgcacttaaattcagaatcacacttggtaactaataatgaaagatttcaaaccccaaacagtgcaactgaaacttttgcattactatactactgagaatatctaacatgttgttactaatcaatgtcattctgaccttgtgggtttcctgtgctaatggacaaggtaagttgaaagagatctaaacactcagcttccctcttaaatgtaacttcgtgtaatatctaacttcatatgtctataatttttttataaatctgataggatatattcactatgctagcagaagtagcatattttgtgagagtataacagaaattaattttatgaaaaaatatctcataatttaaagaaaaaatgaataatattttctttgttttacaaattctacagtgtaaaaagcatctaatattcattatggagatatatgaatatactcataaaactttaagtaggaaacatgtcattagatagattctaaccttaaaatgttcagaattttcttattcataatacaagggaaactttgggagtgattgatactttcataatcttacatacagtgattttttattgattcatatatcaaaacagcaaataaaatattttaaattatgccatttcttatatttctattataccttaagaaagctgctacatctaattaacattaatatgaatttaatatttcaacaagattagcaatatgtaaatcacaacatatatgtaatcaaaaagcagaatatatacttaacttacattggaatgacagtaaattttaatttgcatttctgagttcactagcaaatgttcaataaataaatacataaataattttcatagctttatgtcattgttctctgatatgttttctcctcgatagtcatgtattttctatattaactatctctttgaatgcaggccttgcatattaaagaactatattgtatgtaacattagcagtggaaccacatgggtcaaaaatcatggacaatcaaaggtgtgtcaccattaatgaagaaaacaaattttataattatccaaaactttataatattc

SEQ ID NO: 4561 - DNA, 6000 bp, Homo sapiens
tcataacagtagccaggaggaagaagataggaaatcacttcagggaaagatcaatgaattctacttagcggacaaaagctttctcagacaaaaaacccaatcctgcagaacttgtgctcagagctcacccttcctccacaatgttatttggctcttaacaaaagccctgtctaatgagcatggcaggcaatggttattatctccatctagtattgaagctcagagaaataagaattgccgaaattatgcagctagtaagtcatgggagttagccctaggtctgtctgctcctctctccgtcacactaagctcctctagggaagaagaacatttggatgttatacagtgtcttcccctgtttcaagtgcagcgtgctatttttaaaatcctagggggttggggaaagcagcatagtccagcagtaatgaatatagtccctacagtcagatccagaatcagattctacctcttgccagctgtgtatatagccttgggcaaataacctctctgaggctcctctgaaaaactgggaaagtaatagtaatcacatattaaagttgttaggaagactaacggggatttgtggaagggcttagttttgaactcctgttattcaatgaatggacatattatatttgtggagagttcattcttttccatctgctaatttttttagtatatgtgctgccaaagtgagcactccatctactaattttttattttaggaaagagaaatgaattgggtgggccaggcgcagtggcactcacacctgtaatcccagcaatgcgggaggctgaggtgagcggatcacctgagatgaggagtttgagaccagtctgactaacatggtgaaatcctgtctctactaaaaatacaaaaattagctgggtgtgatggcacatgcctgtagtcccagctacttgggaggctgaggccagagaatcgcttgaaccagggaggcagaggttgcagtgagccaagattgtgccactacactccagcctgggtgacagagtgagactccatctccaaaaaaaaaaaaaaggtcgggtgcagtggctcacacctataatcccaacactttgggaggcagaggcagacagatcacctgaggttgggagtttgagatgagcctgaccaacatagtgaaactctgtctctactaaaaatacaaaattagccgggcatggtagtgcatgcctgtaatcccagctacttgggaggctgaggcaggagaatcacttgaacctgggaggccgaggttgtggtgagccgagattgtaccattgcacttcagcctgggaaacaagcatgaaactccatctcaaaaaaaaaaaaaaaaaaaaaaaaaggccaggcacggtggttcacacctgtaatcccagcattttgggaggctaaggcgggcagatcacaaggtcaagagatggagaccatcctggccaacatggtgagaccccgtctctactaaaaatataaacattagctgagcagggtggcgtgagcctttagtcccaactcctcaggaggctgaggcaggagaatcgcttgaacccgggaggcggaggttgcagtgagccgagattgcaccattgcactccagtctgagcgacagagtgagactccatctcaaaaaaaaaaaaaaaaggaaatgaatttggtgactgggtgatatcacagacaaaaacagttgtataaaagtcagaattttcccaattagtatattaatatacaataattatatgtgctaatactgagttccagtatttacctttatctttttctttgtctccataaaattatcctgcagcgagctgaaatttaccataatccggctgatgtttagactgcacccatcgttttttccattcatctatgagtaaaggagaaaaaaagaacgtaaagacaaaatgcagctaatactgaccaagacttacaggaacggtaaaggtatgtcaagggatgactctgatattcctgaaattcctttcattgtccaattgtctgaatcccactatttgtgtattatcatgtggagtggcttgaataccaagtagttgaggcacttctactttaatatcctacttcaccctcctccatgacaattaagagctgaaaatcaccatgggaatgtatggttgaaaggcatgaaacaggccgggcgcggtggctcatgcctgtaatcccaacactttaggaggccaacgtgggcagatcacaaggtcaggagttcgagaccagcctggccaatatggtgaaaccctgtctctactaaaaatataaaaaattagccaggcgcggtggcggatgcctgtagtcccagctactcaggaggctgaggcagaagaatcgcttgaacccaggaggcagaggttgcagtgagccgagaatgcaccattgcactccagcctgtgcgacagagcgagactctgtatcaaaaaaaaaataataataaaggaaatgaatttggtggttgggtgatcatagacaaaaacaaaaacaaaagaaaggcatgaaacatttattctcataaaagtagatggaaaaatgtgcttagagggactcatcccttacacatatttatgtttagtaaaataataaaatcagctcaccaagtaaagagattagcaacaacattttataccttcttgaattagtaatgatgacaatgagcaatcaatttccatttaccctgttctgtttcttaaactttttaatctctttcttgtagtttcaaggagatgctgataaatttgttttgctttggcatggatggcatgtagacaaagaggcattcttcttgggtcttggcactccaaccaaatgttcagtgcctttctgattttatgcttcagagttgctgactcccatttcctgggcccactatgggtcccagagtcacagggcaatttggcagcttgagctggaagaggccttcagggtaaactttatttgatcttctccttgtagttcaatggatagttctctactcccactccccaatatctaggttttgtttgtttgtttcatttttttgagacggagtcttgctctgtctcccaggctggagtgcagtggcctgatctcggctcactgcaacctcagcctcctaggttcaagggattctcctgccttagactcctgagtagctgggattacaggtgcccgccacctcacccggctaatttttttttttttttgtatttttagtagagatgcggtttcaccatgttggtcggtctggtttcgaattcctgacctcaagtgatccgcctgcctcggcctcccaaagtgctaggattacaggcgtgagccaccgtgcccagcccccaatacctaggtttattaccttatctctacctatgaatatcccacatcaacacacatccagtaagaccaccctgagctggctctgtcagctcctattactcacgtctgatgactcaactgtttccccttatgagacccaggggacttgagcttgcttttgaaagagttaagaacatggcactccaaaatatgctgctcttccatatcgactattttgaattaaaggcacttataaaacagcaagtgcaagaagatcactctgaccttcattctgtttctgaaaagcaggggataaaatccccacatgaaagatgtcttccctataccaaaaggaaagtaacatttttattatcaaagacaggaagttgaagccaaaggaaatctatataaacaaactttgttaaactaacccttatctccctcatcacttctctacctaattatcctggcccaagcccctttcccttaccacatttcacaacttactattctttgcccattcaccacataagtaattgactctaactgcttctataggtcttcatttccttaggagggctcccatgtcacataaaacttacattaaatacatttctatgcttttctcctgttaatctgtctgatgtcaatttaattttcaggcccagctgaaaaaattctaaaagggaagaggttttacctcctcaacactttctgtggtctccccgtctctttcaaggtcatggtaattagacaggtcttggtgaccacctctgtcactccctcctgagggaggggcctcagagcttctttgtgccttaacttgctgtggcttgaatgaagtggatcctgcttctctgaccatcatcgacccagtgaaggataagggtagatgccaaggcaaaaagatgtgttatgtattaggccctcatggggctccctaaaaacttcaccttattcatgctcatggacaatgctgtgagataggttttttgttggttgtttttgctttctgtttttagggtttttttgggtttttttgtttgtttgttttgggacagggtcttgctctgtcgcccaggttgcagtgcagtggcatgatcatggctcactgcagcctcaatctcctgggctcaagcaatcctcccaactcagcctcctaagcagctgggaccacaagcatgccactacacctggctaattttttgattctttgttgaaattaggatctcactatgttagccaggctggtctcaaactcctgggctcaagcgatcctacttccttggcctcccaaagtattgggattacaggcataagccaccaggcctggttagataggcatttttaaattccattttgcatcttgtaagtggtagacctgagatttgaacccaaatctgatttcaaaactgtctgatatagtttgaatgtatgtccccaccaaacctcatgttgaattgtaatttccaatgttggaggtggggcatggtgggaggtgtttggatcgtggggagaatccttcatgaatagcttggggtatcctcttggtgatcagtgagctcttgctctgagtttgctctgagatctggtggtttaaaagtgtgtggcacctccccttcctactctctctgtctccttcctgttttcaccatgtgacgtacctgctccctcttcactttccgccatgattataagcttcctgaggcctccctagaagctgagcagatggcagaaccatgcttcctgtaaatcctgcagaatcgtgagccaattaagcctcgtttctttataaattaccccgtctcaggcatttctctttttcttttcttttttttttttttttttttgacgaagtcttgctctggcccaggctggaatgcagtggcatgatctcggctcactgcaaccaacgcctctggttcaagcgtgccaccacgcccggctaattctttgtatttttagtagagacagggtttcatcgtgttagccaggatggtctccgtctcctgacctcgtgatccacccacctaggcctcccaaagtgctgggattacaggcgtgagccaccactcccggccctagtctcaggcatttctttatagcaatgcaagaatggcgtaatacattgtcttttctctgaaagaagaaagaaaaagtgctatgtagaaaaaatgtgtgtaataaccatagctactgtttagaactgtatgtcaggcattgtgctgagtactttcatgcatcatctcattgcattctcttaacagccctgtgatgaatgtcctgttttttcctcattcaaaagatagagaaacagaagctcagaatcttgcccaaaagcccagttgtaagtaagtgggtaagccaggctcagacccggttctaggtaacaccaaaatctgtacttttaacttctttatatgacttcccatgaaatcacgtgtgagaaaagccctttataacccgaaaagtgtgccacaaatttaagagtcaatcatagcacttcacggtctgtaattaatagtttgtgtataatttgagtaatgtctgtcttccctaccagactagtaaaatctataactattctgctgaccgttgtgtgccagtatttagcacagagtaataacgaaaaatatttgtgaataactgaatggatgcatgatcatgtcttttgcctaagccataagatt

SEQ ID NO: 4562 - DNA, 6000 bp, Homo sapiens
atgctgtttggtaggttagatgaattaaatgcatctttgacttaacaatattttcaacttaagatgggtttattgggaggtaaactccattgtaagttgaggagcgtcagtgcctccctttctcttccaacagcctcctactcttcaccccatccagcccttggcaactattaatctactttctctctctagatttgtctattcttgactcttcatgtaagttgaatcttacaatatgtggtcttttgtgactagcttctttcacttaacatcatgttttcaaaggttcatccatgtagagatcacttttgcctggaattttgaatgtgactacagttctacaggatatttccacgatgaacttagttaaatccctatatagaaaaataattgccatgctgttggtgttgattgttgtgtagccagagttagaattgtgtttggctaagaatgtacacatggaattaaaatcttagtggaggcagataaatcatgttctaacattattacttacctagtaaataagctttcttgtaggagaaatacacaaggagttacttacatgtaagaatgaagttaatatttttaacatttttccttaaggaccagagtaatgcggagaagcacgcagatggaatgatagtaagtttaatgtaatctttttgtttccctttacttctgcagagcattataaccagtcatatcaggagaagcctgaattactactcatttttcaatgccaactactcactgctttttgttgttgactcttgcagtttcctttaagctcccttctttcagcaatcatttgcaggggaaatgacaatcttaaaatttttctaagtgtgggttcagattgaatcactttgcatgtattaacttgaagggttaatcatggtatgaatactcagcttttacaattaaataatgcataactcagtgccacatttcttgtctaatttctatttttctcagatgaaagtgggggtgggggagtacaatattgaaacacaccttaatctatttgaatatatttataggttcctattatcttttatttttagtttttgtgtatgtgttaaccatcattgttaatgtggtatgtactgcatttttgttggaacaatttacaacatgaattctttctcttataaccatcttctcactctttcctctctcttatctttttacctttcctttatattcaacttcccctccaaaaagaaagaagaaaattgtattgttagtatttcccagatggaaataaaagagtttgaaggtttgtggtttgtgcttaccctagttttatggtaactgagtgaccttagtctgtattcctgaagcaggaggcagcttttttgtttgtcctagactttacaaatgccagcttgtctgagatctggaaaaacattctgtaaattttcaaaaacatctcctgattgtacttgaaaggatgagcatgttatctttatatttggtttaaaaattttttttaagttaaatctgtgtttgcgtatttcttaagaaagcagaagtaaaataagcatgtttggaatttgaattaaatatatcagaatttttgtcagttcaaagtatgatccatggtgatataatacaattgtatgatataaatgtaatacaaactgaaataatatctcttcatgagatactatcgaagattgttagcctcataggaaaggactgtatgtattgtctagcattttatggtctccaaagactccaaaggaaaaccatgttggctgttatttttatctcttttccctcaaagccaaattagttatattatgttaaataaaacaggcaggattttataaaacataccaaaaacacttgatcatttgcaatgaaaaacatctagaaagtttatactcatagaaaatttaacctaatagaaaaatatctttgaatcatttgcccagggactagagcatattttccttaagaatttttattttgaaaaaatagaggaactattcatggaataggccttagaggcaggctgcttgggttcaaataaaatagccctgccactcactacctgtgaccttggcaaattacttaacctttctgagtcttaatttcttttcctgtaaagaaagctgaaatgttctaccttagaagtttgttgtaaggtacagaacaagcgcatagtattcaatgaatgttagctatatgtacatgtatgtgtatgtgcaatacattgtattacgtgggtttcattaatgtcaaaacagattagggctgagtagtattatttttgcttctcaagttctgcacatttatttttaaagcaagttgtagaatgtaatgtgacatatttgagcctgaagttggctgaccaaggactgtggataagtgtagcatagttattttttctatcaaaaacaataacaaaaagattgagtacttttaatatacatgttgtcaaaagacaaaattacaacaaatttaatcatagatctaattggcttttattcaagatgcatgaatcggatcagcctccattctacaaaatagaatgagaggtctcactgggcagtggcaaagcagtgggttttgtaaggtgagaactgtaacaggaaaaaatgctgattggttaacatcagattacttttcttttaagggttaaaacagtgagcatttccgtattacactgattcgggtagactggaatctcctattttcagaaaaaaaaaaaaaaacctggtctattttgggatccacttgcttccttagagtttaatgatacggcatttaacaagagtgactccattttggtttggtctaatctgttgggccctagtacaagagctcagtccaaaacagtggcctctcataatttttgtttaacagtgcacaaagtttttaagtgttttctttggttgaccagcctaattgtaagaacgtttcatctggaaaataaaagattacatccaaaagagaattctggtcccttgttccaaagttattttatttcttattcccttcagtgggaggggtaaggaggtgtgacatattctcactgctatatatcaaagcgttaatggtggaattttgtctttgtaaagcatttggagttattttcgagaaaagcgctgtgtaaacaaggaatttattttaagaacaactccatgtttgttgagatacttgtttagttattatggcttggtctagtatctgaaaatagaatcaaagtaataaccagaaaacccttagcacccatgtaaatacagactttttattttgcagaccgggaaactgaggcccatagaggataagagacttaaagattctaagctattaaaaactccaagtctctgtttctttgcttttctcagtgcttcaaaacattccccacttcagtttcttagttgtttttttttttaattattactgattgttttgggggtgttttctctaagtgtccttcatttttcagttaaagtatttgtggcagataaactattttagtgacaagaatcagaattcctgtgttcaagtcacttgatcgaaaagaccttatttaatgagttttagatattcatgcagaaagagggctgggtttttttggttttaaattttctttaacagtcctgaacacagtgtatgtttgtttttcacatggcctggaaaaaaatttttaacttagatattacgtgagaatgctacaaaaactttaccattacctcagtttctattattaggtgattttaagtttttacaactgcttttttgggcttatttattggcaaagtatttcccttatatttctgttttagtatcttctgttataagcactacttaatatatatgtgaagttcagttttccagatcaattaaaggtaaagaacttacatttttatttcttgggtttgcccagtttagtcttctaaatggtaaatgtaaactttgctgtggcaaagactttggtttaacatgtacacactcgcacccccctgctgccctatggagttttctttttaaaatgccttcatgctgtcagaataatttcttgacttagaatcagagaatcctagacttttctcccctctaaaattaactacatgtctgaatttttctccctctcttctgaatcctcagaaagcaagccctcttctctacactccccagttagaagatgcatctctttctctttagtgaccataaaactagacacacagtcagccttctgcatctgtggattcaaccaaccatggattcaaaatatttgaggaaaaaaaaagtacctctttactgaatatgtatatactgttttccttgtcatgatttcctaaacaatacagtataatggtgatttatataatatttacataatattaggtgtcataagtaatttagagatgatttaacttatatgggagcgtatgtgtaggttgtatgcaaatactacacgatattttatcagggacttgagtgtctgtggattttggcatcctcggggggtgcttggaaccagtccccctggatacctgaggagtgactgtactgtgtgatagcagcagtatgggatggaaagatgagatcctagtggtgcaggtacatcagttggacatttggtgtaactcaccaaaagtgaaaaaaacagagaaacaatatttgtggtgaattaagagattgagaagcaccgaattgaattgagaggtggttttgacttcctgaaatctccccacaccattttataactcctcagtttttccatttagctttaccttcttctgtgacagagattcattcattgtctttccttactatgctttaagcaactcttacacttctgtatagaaaaggtgtttcattccctcttttcattttgatcaacatatctatatagctaccctcaggattttgaagtcataaatgtgggcatttgggagggtagcatgagaagagcatttaattaaaaatagctatattgtgtttctttattttagagtactattaatcccgtagatgcaatatatcaacctagtcctttggaacctgtgatcagcacaatgccttcccagactgtgttacctccaggtaatttgggaaaatgtttcttagattcattgatgagaaaaaaataatttgtgtggctgtcatagcagtcttagctattactgtttatttttgattttccttgtttttaataaaagcactcaaaaaataatacagccaaaagtgaactgaaaaaagatgataatgttttgatattggggctttactgaagtgtgatgaaagtggttttgttattcaaagtgagatagaaaacaaacttggttactacgatttggattcactggtagaacaggattctatgactcagaattcatggctagcgaggaaaaattactataccttattctggataatccagggatgttccgttttggggtattctgtgtagctctgaacaatacaaatggtatgttcatggtagattttaagataatgagaaagtgaagagggaaatttatgatgcctactgatcacatgacatctgggttttgttttgttttttttttttttgtataaagcaatacatgcaattttttaaaaactggcaaagaagggctcagggccaatacctagctacactgactgattccttttgcccttttgttatatccaacatttctatgttctcgatggcatagtgaagtcagaaattgtactgtaaaatggaaaactctttttaaaagtactagtaagtatgtgaaatccttttgtgagtttttacttcttaagtgaattagcttaaactacctcttggggctaaagaggaacaggtactgtactccacttcagattttttgtggtttgaggctcagaaacacattatcatcagaagcatttgttggttttacagcatagttatactgcagtattggcctactgtggctggttttttgatatcctgcctggtatcttagtactctgtagcctatcatcattgagtttaagaggctaggaagt

SEQ ID NO: 4563 - DNA, 6000 bp, Homo sapiens
caagctagaggcctgagcaggggaatgactccatgaagggctcctggggtgagggagaagagggccactgaggcaaggtgttccttaccggtggtccagggatgccttgctctccagaggcacccacatctcccttgggaccctaaagggcagggatgagctgtcagacaggcaggcagatggaaagacacatatacagacaagcaaagataccacctcttttccccagcacaagcagacgggagggactactacgaaccctacagtcctgtgttacagatagagaaaagccaagcaaggagacatgaccagagacatgccgacctggagcacaggcctccagcccccggctcaaggctctgtccccagaacccacaggggaaggggaagggacgaagaaggggacagagccctgtaggaccatctccacgtatccctgacccacagccctcagcccttgcactcaccggcttcccctggtggccaggatcacccagaatcccgcgtttgcccgcatgcccctgaagggaaggagagagctcaatacgaggtcccctcctgtcacctgcaccaccctcccaagattcaggccaggagctctcaccttcactccctgcagccctgggggacctttcattccgggtggacagttggttggacactggaaacagaaaatcccacagggtcctgtgatcagctgggcagtgcgcccccatctctccaagccccgtgctctcctccgcctcacctggtggaacccctgcactgcagcccctccccatctctccagacacccccatctccgtggccccgcctccccatctctgtggccccgcccccctgtgttagccccgccccagacctcgtctctcaccaggaaatccgcactgccttccagaccctggatggttcccgggcgaccctgagaggagacatgaagatggagcttggcctgaccctttcccgccgcaggcttgctcaaagacccttctccttcccctgcactttgccatgtcgggggtctggggacacttacaggtttcccagggggtcctgggggccccgatggtccatctggtccagggtccccctggaagcaaaagaagcccaaatcatacccctgaccagcccttaccagcttaccctagtgccctcctccaggtcctgcctctgccctctccaccctgtcttcccggtcactttgtgagatccaccatcttgggagatgaaggcctgattgacaggggatggggccagcggcgtccctaaaagacctagtgccgggtgggctcataggaggggtttctgccccagacctggaggagtttcccagtggccaggagcaggcccaggaacttccagaaagaccacccagcttgccagcttggagatagaaggcaggaggcagtgaacagagggtggctgaggctcaccttggggcctcggattccaatctcaccagggaggccaacaggtccaggaggcccctggggagcagagagttgatggtcaggatgcctcagagggtcagataccctgggcacaaaggtagagacaggcacccaaagcccgtttctccacttttactttttttttttttttgccaaccccagagagactgacagactgaggctttaaggaccagagaattgcagagccagtggacaggcccagagtgggctggccctgggtctctggcaggtccacttattcctgacactatcacagcaagctggctccttcccatggtggccattccctcgaagcctttctgttgtcccctccttccctgggagttctggggatcctgccccatccctgaggacttacaggaggtccagcaaaaccagggccctggaacagaaagaaagaaaattggcttcatggctccctctgcaggtcccctctcccccaagagtccctcgaagcccttgcaggttgtactcaccggaaggccaggaggaccaggaagcccgggctggccctgcagaagcaacgagaaaggctcagaggctggggtttccccggctcctacttcctctctacagccactcccaaacgctggccctagattgcccacgctgaggccccagcaggccccttaccttgactccagggatccccatggggccaggctcccccttggctccagttaaaccctggggaagaatgaaaatgtaggatcaatgagggccaacctgctccctgacccacagagcagggcaggttcaagggtccctcctgggtgggccgaggctcctttttgccacacctcatgaaggcctaggaacctccacacctttctttccttttccccagttcccatagtaaccctaggaggcaggcagaacaattcccttcttttgaaagatgagaaaccaaagcccaaagatttggctttatgccagacccaggcttcatgcctccgggttcaggagtctagaagacctagccatgggtcaagattggtcatttgcttgatgtcctaccttgacaactttttcattttcttttcttttctttcctttctcttttctttttctttcttttttttttcaattgagacacagtctcactctgttgctcaggctggagtgcagtggcacagtctcagctcactgcaacccccgcttcctgggttcaaatgattcttgtgccccagcctcccaagtagctaggaccaggggcatgcgccaccacgcttgggtaatttttgtatttttagtagagatggggtttcgccatgttggccaggctggtcttgagctcctgacctcaagtaatctgcccacctcggcctcccaaagtgctgggattacaggcataagccaccacgccaggccattggcaactttttctgagccttagtttctcatctgggtgcctctctgggtggatgtgagaactgatgcaacatagaaggcaatatgccttgtaatcgttgcagggtgtggatgagtttgaaggggtcctggtgactgtcccagccctggtcacacctcatgagccagcagggcagaggcaagtcatgggggtttctcctttctcccatctttcagtgactgacccagtgtaacccccatcagatgttgtcctcatgcccctggggctggctgtgttcaagagcctgtgaccttgggggccccctgggagctctgtggtatcagctaaatgatgtttctctcctgagtcatgcctggggctgtgggtaggggtcaggggaagagcggaggaaaggacagggcacacaaggacagccccacccaacatattcagcctgatccttggaggccagaaatgtgagactaagtcctgactgctgaggggtagcaggaggaacctgcacctcccagaaagcagaccctctctctggaccccggttgcctgcaaatcaatgaccctgggtgagagtgaggttccaggaaggtcacaagtcatatcaaggtgaggggggctcacagctggagaatctccatcctgctgcccatctctgaacagatcagtgaagatgccagagccaggccctggaggtcaattggcagagccctaccctgccccacccgacactcagctactcacatcaatcccgggcttcccgtctggcccatctggcccagctttgccaggctcgcccttgggtcccttgaaaacagagatggaacaaacatgagccagaggagggcaagagcaggaagggtcaaaggccaaagaggataaagcactcaccggagggccagcttttccagggggcccattgtcaccctgcaagatacaagttggtgagacagcacactacggctcacactaccccaagtgggcacacacaggccctggcaggccgctcccaaaggctctcctcactctcctctcttctgtccaggtcccctaagccttgcaatctttgggaaaagagcccccttttcctcaaaaataaaaaccaaaaacaaatcacaggagcatgagaataaccctggccgggctggagagggtgacagcaacatgcaagaaggtacagacatgctgatgtcatgaggtgccagctgtgagacccactaccagggctgggggctccaagctgatgcctcttggatttgggcacgtgtgggaggaaggttggggcttttagagaaacgtgaagggggatgagcgagttgggcagcagctctattccagactgcagggcaggagaacgggaagctgagccagtggcaaggaccaagggggactgcaagggggaaattcagtgttcccaaggagggaaggacctccttccagtgccaaaggacccttggtggtgggcaggcagggccggtagagtgcgattcagccccagagaggcctccaggcatttcagagccctcagcagccagggcctggccgggggcccagcatcctgtgtttggggggtgggggcaccaggttgaatagaagtctgtccagactggtaaacatcaagcggccctcctgcgggagctttcagaatgaggtatttaaccctcaccctgcagggaacaagcccagctgattctaaatcggggagagaaaaccgaagggaagagacaggagtctggcccaagctggtcggtggtctggccaaggctcccaagcgaacctgaagaagcgtccagatgtgccagaggcagggtgaggggttgagtcgcctcctaccccacaaggaggggaaaggagaggagggggatgaggcctcgctgtgagctgcggccggcggactgaacagcagctccttgtctgtcggcggctataacgggctccgcatgtcagggctggtttgaggtttttgcagaacaaacggcgtccttgtggtgcgggccggcgccgcctattggcgacgaggggcactacatctccgggcaccccgaagtccccacccccaccacagcgctcacaaagttctcctttgtctgccgcctccctcccgccctggtctcaggttagagacttacgtcgatgccgtcggatccaggcactcccggcggtcccgggggacccggggggccccgctctcccggtggacctctctgaaaaacacacacggggtggggcagtcctcagacagtgcaggaagctgggcgtccccggggctgcaagcgaccctgggagcggggtcctaggggcgcagctcttccgcgaactcccacgtattgagaatcttctgtatagcaggcactgtgtgccattacatgcattcattatcttacagaatactcagaaccgggaggcgggcgctattacgggccccagtttgcagtcgaagaaactggctcagaacgtgaagggtccatggtcactgagagtgggcggcggcgccaggagtccgccctggatctgcccgactccttccactgtgccagtttgcccttgcgcggtcgcggtggggaatagatggagacgtggacagctcaaataaatcacagatggaatgtaaggttgtgcctagcaggctgccggccctcagtgagcggtggctcgggttgttgttcttacgtgaacgacaggcagagacagcgcctcctcctctccccatggtgcgggaaaacccgacgggaaagtgggggaggcgcagagaaaggaggtgtagggaggtgaagcgggtactatcttcccactcggagcgccccttcggcagcacagctgcccggtcctccctctgctaagccctgactgctgcaggggagcaggaggagccggcacctcccagaaagcagaccctctctctggatcccgtttgcctgcaattcaatgcccctgggtgggtgtgaggtttcagggaggtcacaagtcatatcaagatgaggcgagctcacagctggagagtctccatcctgctgcccatctctgaacagatcagagatcttaaaaggcggcccttttaagaggccagctcggacccaggcaggggtcccggtgcccacgacctccccaggccgcgaagtgccaggctggcgccccgcaggcgagctcgaaaccacacccagcacc

SEQ ID NO: 4564 - DNA, 6000 bp, Homo sapiens
tgagctgggtggggggcagttggtgaggtggggggtgggcggtgagctgggggggtgggcagtgagctggagggggcggttggtgagatggggggggtgggcgcttggatccatgggaggagtggggggcgcaaggccattggggggaccgggcaggacaggggctctgcaggggggcgggcagggtgtagagctctatgcagcaaggcttggagggcagacagtgattgcaggtggagaaggccaaactgcaccccaccctacccgcagggacgcagaatctcaacggtcagagcgtgttcagcgtggcccccgtcaagggcgtcatggaccccgggaagacacaagacttcactgtcaccttcagccccgaccacgaaagcctctacttctccgacaagctccaggtggtgctctttgaaaaggtgcggctctggctctgcaagctcagcccggcccggccctggccccacgcagggccttgcctttggctgcactgctccactttggaggccctgagggtaccatggctgggggactcagcaccacactgagggccgtcagtggaaagaccagagtccagggccccacggggcccccaggccgtccctgcttccttccctgagccagcccagctctcaccagcaggacccctgccgccgagcttcggggacaaggccactccacttcttgtccccagaaaatctcccaccagatcctgctgaagggtgccgcctgtcagcacatgatgttcgtggagggcggcgaccccctggacgtgcccgtggagtctctgacagcgatccctgtatttgaccccaggcacagagagggtgagcccctccccagggagggaacagacacggggcctcccggtgcccctgtcccgtggatgggggccccgagacccagcggagcagggcagggattcccagccttctaccccagagccaagcaggacagccactgctaaccagagttcaggagtccagctgcagcctcaccccatgcctcagcctgaccctgaacagctcccctggccacacccctccagccagctcccggccaggccctctctctccagaagctgaggagctgaggcccatcctggtgaccctggactacatccagtttgacacagacacgccagccccacctgccacccgagagctgcaggtgggctgtatccggaccacccagccatctccaaagaaggtgcccacagcactgcccctggggacaccaggcagccccctcggcctcccctgccctgggcagccctgaccctcctggccttgcccctcactgggcttgtcctgacagccgggcttttctcggacttcctgtggcagctgtggggtgggcagcctggtcagagctgggagggtgagtggagctgggcaccctcacccctagtcccactgcttctgggagcggtgcctggtcgccagcctacaggagccccataccccacagaccgttgagttcagcatagacagcgtcgcatccctgcagcacaagggtttctctattgagccctccaggggctccgtggagcgcggccagacgaagaccatcagcatctcctgggtgccacctgcggactttgatgtaggtgcctttgggctccaggccagggagccctgggaacgccaaaggctgggtgggctgacacccctgcccagtcccaggggaggaggtggccgtggaggacccaagggagtcaggtgggcagggcagtgggaagacagcagatctcctctgggtgcccactgactgaaggcctcttctcccctcccctcctgttccagccagaccacccactcatggtgtcggccctgctgcagctaaggggggatgtgaaggagacctacaaggtcatctttgtagcccaggtgttgactggcccctaagcctctgcacagagcaccctcgggccctcctgtccaccctcaaagccctccccaggctgagggccaggtcatactaccctagagcctgggacctggccatcctctgccagattccaataggccgccctccacatggcgccacggccacttcctgctgccctggaccccgcaagcccagggacatccaagagcacccctcctgagaccccagactcagaagcagcgagaaggccaggccagccctcagccatcctagccagaccccctcagagcccccagcccccaggagagccctccacagcctgtcaataaattttttgtaggccaacacatgcagcctgcagtgtgggtgacagcaggttattccctggggtgagcacagaatgggaggtggggacagagccctggggaagcagcccctcccctcacagccatgacacccgctttgcctggcaagggcctcctagagtggggccatcctgcaggacacctgtggggaggccaccctgacccaaattcaaggagagcccccaagcctggcaccctgagcagcagcaggcagcccagagggccggggtacagctagagctgaggctgacccagaaccgaggggcctgggtggtggggagggcagggctgcaaagcccagggcaggccccgggaacctccagacttttcccaagttccaggaccccggatgaccccaagcaaaggtgagcagacggtggggaccccccagcctactcatgccctcccctccacccagcaggggccaggtgaggcccagctcctgcactgaagtctctatttgtctgagataagtctgggctcggctttctgggctctgacccacccttcaacagagaagacccctcgcagcccgtgagatgctcctgaagctcagagtggtgcctgcaccccaaccctgccctctggagtctggcttgttggacgctgtccccacagagcccacccagcctggccctcctgtcagtgcagcacacccactgtgccaccccaaccagcagccaccagcagactgtacgcagccttccctggccgggtcgggggagcagatggtgcttctgggagctttcctgggcacaggcctcagggacgccggtcttgagctgcctgccctcacccccagccccccagggcccacagtgcctaggaacttgccattgccccaaacttcaagccagtgacattgaccccgcagtggcgttttgcaggatttctgtccaatgggtcccttgctgcccttcctgcggccgacccaccatggctcaagcttgcgccacaccagatgggaggggaaggcaggttccgccaggtccaggccaggccccggccgcaggaggaggtgctactggatggcaatgtttcctgaataggcccctctcttctaaaccctgacccgactctcctgctggcaggcctctggtactgagtggcgaggcccgcccagctcctgcgtgggggccgtgcccacaccttccggaactcggggctgtggcctcaggctgtgctgtgcacatgcactcccattcccactcccgtgctgggcctccacgaccagtgcagtcaatgtggcaggaagaagggccaggggctgggggagctgggcaggcaggaagggcccttgaggaccgtggcacaggccttgggaggtgaaaggcaacttcaggcagagcccaacagtggaaggagtgatgcagtgaaggggcaggtatgggcagaagagccacgcagaggaggccctgccctccagggtcactgcccttgtggtaggggtgggggacactgagcagcgcccacatgtggaacagttctgagcaaggggtgcatgcccctcctgcagtaagatggaccctgccccttgctgtgctgaccacctcccttagcctgaccaccagagagacggtgtgctgttggtcccacggggagcagagggcaccaagagcctaacagggcccctggcctggtggcagagggataagggtctggggtccccctggaagaaatggccccaggcctgcccctgcacagggagcagcagacattgcaggctgagggaagggcactgggctccctgtggccctcgggaatggaggtcacattccccaggtggggcatggcccccaaggccaagtgctttgggaaagtggtctgcacccagcgcctcaacagcccagagccagggccaggctccagccccctgggccagcccccagacagcgcctgcagcgcaggtccacaatcaagtgtccaaacaccaagttcgggatgcccagcatcttggtggcgttaccctacagtccacctggagcccgcctgcgagactggacccgagggaccacacccaaggcagccacgactttccaggccagctcccgagggtccccgggccacgcccagaccagcagcagagcaggccacgctcggccgaggttaaggcgccgtgcccgggctgaggacgagacccaccgtcgcctcacgagtctgggccaggtggagctgcggggtagggcttgtggcggacaagccctctgaacacgttgggcgtggcccagtgggaggggattgcgctgagcggggtatggtgggcgaggcttacgttgggcatggggccagtgggcggggtttgcattgagtggaggcccagcgaatgggggcgtctcgtgggcgagggctcctgtgggcggggcctgcggcgaacaaggcttgcactgggcggggcccagtgggcggggtttatgctgcgtgaggcgtcctgtgggcgaggcctgcgacgaacgcggtttgctctgggcggtgcccggagggcggggtttaccctgcgtggggcgtccagtaggcgtgtgcgcctgtgggcggggcctgcggccagcggggcccggtgggcggggtttactctgagcgggcgttctgtgggcgtgtcatgtggtgggtgtgtcctgtggtgggcggggccccataaagccgcgccgccgggctttgctccaacctcctcagagcatggcccgggggccgctggccgcccgcggactgcggctgctgctgccgctcctgccgctcctgccgctcctgccgctgccgcaggtgggtcgggcggcgttctctctcggttcggccaccgcggggcgggtccctgctcggaccacgcccctcccgggctcacccttgtccccacaggtggcgctgggcttcgcggacggcagctgcgacccctcggaccagtaagtcgggggggagggagccggggcctggccccgccctatggggaggcacgggtggcgaggtcggccgtcccatgccccgcctgctccaggtgccgccgtccccacaggtgcccgccccaggcccgctggagcagcctgtggcacgtggggtaagtggaggccgcggcggagccgtgcgtccgacggttctggggcgggggtcaccggggccaggcccgccaggcccttacctcaccaggccgcctccgctgtcgcccagtcccggccgctggcgggaactgacctggagcaagcaggaccttccctcccacctctcccgcctggcctccgcgggagtcccctacgatcccgctcagcagtggggcactcgctgaggacagcgagtcctgggagtgagcccaaggccacccctggccagcccaggagagatagccagggcaggcccagcagcccgaggccaggctctggccacggcggtctccgacatggagagacattgtctgctttttatcctgttaacctgtcttcggtggttgtgccacgacattccccagggtgcaggtgcccggtggccgagggtcagtccagtggtagagccttgctctcctaggctcatcctgctggcggtcctcctgcttctgctgtgtggtgtcacagctggttgtgtccggttctgctgcctccggaagcaggcacaggcccagccacatctgccaccagcacggcagccctgcgacgtggcagtcatccctatggacagtgacagccctgtacacagcactgtgacctgtgagtgcctaggggcccgccagttgagggtggagatggcgggggtaaatgcc

SEQ ID NO: 4565 - DNA, 6000 bp, Homo sapiens
caattctcagcttcatctgagcccaaccagacatccccatgccaagcttcagcatccagttccttcccactcagtgcccacgtttcagtagtgaggctgtgagtgtgagccacacagcagtcacacaactcagagttaaactgtgcatccgagttgtagcagcagcagccccgaggctctcaggaacaagggactcttccatggccatggcagtcctgattctctgtctatgacttaaactgagtttagagacctgaacgtgtggttccttcctgttagtgctgctggacactcaggggaccccccacagccctcgtggttgtggtcatcctcgtggccgtgacagcctcacacagcagcacgtgggttcccgaggccctcaattctgctggtgcctcacagccagcatgggggatggcttggttaactgtgaagctcccccaacaacactgtgggccaacagcctccccttcccactggccaggagatcggcctgcagcccagcccaagcaacaaccacactaacctaatccccggaccccaccttttgatagtgacaggaggcagacaaatcctaggcagacagggacaggttcccagtgaaaccccacctccgagccaaagacagtttaaagcctgaaagccaagctacaaattaaatcctcagcctggattgagaacccatcttcccatttggctgctttcctctgattgatccccacccttcacctattttacatgtacctatcttttcctaattcattttctacactggcatgcccacctttgagtggtacctttgtttaagccttttttgcataatcagaagccaatcagcatgcactcccccattctgagcccataaatgccccggacccagccacactaggagagaaaccacctgacttcaggtcgggaaccacccgtgcatcccctctctgctgagagctgttccgtctctcaataaaattcttctctgcccttctcacacttcgattggcagcatctcctcattcttcttggacacgggacaagaacttgggaactgccatacatgggtacaagctataacacaagcaggctggaacatgcccagcccagccacaggctgagctggtgaacagccaggtgtggcccaggcaggctgagtgggtgggccacctcctgcggcaggtagcatggccaagagaggcctggggagggggggtgtcagcagccagaggtacctggctggcaaagtgaccaaagaggtacctgactgtgtcactttgagggcctgtctctggggaccccctcctagtatgaatttatgtatcagttggggtctacttgggagatggaaaccacaacagtgattctaatagcatgaatttaatgtgcagaatttttcattagttctgggtaaaaacagctctagggaatcatggaggttgcaaccacaaaattcagagaggtgacctggctggcgacactggtgataatggtcacctgccatgcagcctttcagctcaggtgggcacactcctctgcccctgcccacttcctctcccaggtgaatcttgaccacacctgtgcctggcactgtgcacacattctctgttgttcaactctgcgatcaatctggaaaaaaaagaaaaaaaaaaaacctttttaggagagtaaaaggaaaataaatcttggggccccaaaatcactaagccaaagggaaaagtcaagctgggaactgcttagggcaagcctgcctccaattccattcaaagtcattcccccgctcgctgagatagatgcatatctgattgccttctttggaaaggctcatcagaaactcaaaagaatgtaactctatcttacatgtgttgattgatgtctcatatctccctaaaatgtataaaaccaagctgtcctctgaccaccttgggcacatgtcaggacctcctgaggctgtgtcacaggtgtgcatccttaattttggcaaaataaacttcccaaattggctgagacctgtctcagatttttggaattcacaagtgaggaggcagaggctccagctactggggatgggctggtggctcaatgacacagattttggggcagcgggaccactgggccccttccctcctgccctggatacccagggcctgacttcaggaggcagctgacaaggaaggtggggaccccagaggcccggctgtcgtcccagcagccggaaagaggctcacccagaaatgctggtgagcctcttctgacctgtgcatcttctctaagtggggcacctcattcctgcccagagcgtagctgggcagacctgagggagaggccctgctcccaatgggcagaggaaatgcccgttgggcacgtctggggtgcaccaaagcacaggacctgccaccagtagcctggcctgagagtgtggggcagtcacaggcaggcgtctccagggcctgagggcagcccccaaggcagggtggacacggcaacctgggtgagggcagccccacagcagtgtggacaaaggctagtgccctcaaggcccaccctggccccagggctgctgcaggaagcacttccctgacccccgtcccacctgcctccttggacccctgagctggggctgctccttggatctccacatcccacagcaacccagagagtaggaggggcagggaacacccattttcccccaatctccctaggagatgggattaatgtccacctccggggtgctgggctctggctatgcgggtgtctggggggacaatccatgcaggtatttgcgggggatggtctgtgcgggtgtctggggggatggtctgtgtgggtgtctggggggacagtttattctgtgtaggttgtctggggggacagtctgtgtgggtgtttgggggcatggtctatgtgggtgttgggatggtctgtgcgggtgtctggggggacagtctgtgtgggtgtttgggggcatggtctatgtgggtgttggggggatggtctgtgtgggtgtttggggggccagtctgtgtgagtgtttgggggcatggtctatgtgggtgttgggatggtctgtgtgggtgtttggggggacagtctgtgtgggtgtttgggggcatggtctgtgtgggtgttggggggatggtctgtgtaggtatctggggggacagtttattctgtgtaggttgtctggggggatggtctgtgcgggtgtctggggggatggtctgtgtgggtgtctggggggatggtctgtgtgggtgtctggggggatggtctgtgtgggtgtctggggggacggtctgtgcgggtgtctggggagagagtcatctgtgcaggtgtttggggcggctgggttgcactgccctgggcacctgcaaatctgtgagtgtccagtgaccggggtaggtctcggggtctgcagcctccttggcctttagcctcctttcccagtttctcttgtctggcaggtgccaggctaggacccaagcctcctgctgtcacctagaagtagggagaacctgggaataaggggtcccaagtttggcagcccaggtcaccaggtggccttgggccaggctgggggctgctgggctggacaggcctggggttcgggaaggaggagcatgcacagggccagccttggggagtcggttcagagtccagggagcccctgctgagagtaggccaggcccctgcatctgtttctccctctgtggatttgtaccttagagacaagaacactgtgacatccagaaagggcctgctggcaccagggctgtcgggcaggtgggctcggaaaggctctggcctctccccatagcaggagcctccagccaggctggaccctggcccactcccagctccccagaaagggcggtcccagcttcctgcttggctggccttgacattgtttccatttgggccagcaacccaggcagcctgaggccagactgcagctcctgggctggttgctgggcgtgatggcagggggctgctaggacagccagcgggccccagggagagacttcccgggctcagggtggtgtctgggatctgatcccagcctggctgcagctcgaagcctttctcctcccagggcctggccaacctaaagggccatagacaaagcttccaacagcactcagcgtgggagacctggccggggcggccgtgaggagcagtttgccgtgggacccctagctctgtggcccagccctgcccagatgccctgacacatgcccaaggcctgggcaggaggactcgttctggggattctgaaacagaagctagaaacctcatcaggcctggagaatcagacagagactgctctgcccagaacccccgtccgcaagcagggctgggtgcagggctcacactctgatcactgcgaacccttcagaagccacagagcccttctgccagctccccggccagggctgcccaccctctgtagcttgaggtctgaacctcatgagttttctgtgggcagagggaagcagccaaacccaggctagtatctctgggtgggaccctcctggcagccagcgcccacccccttcaggaccaccccttccccttgcaccttggcaagatccccagaacccaccatcctccttggagattgaagagaaagaacacccagggtggggcctttgtaaccccccaccgggtggttaggggcagagcagagggtgtggagtaggacaagggcctgaccttcctcccagcagcccctggggcccctttggactgaaaggtcaggagacagaagcaaggaaggagggcggcttgggaggcggggccagaggccctgagaagggcacccatgaggcagggcagcccgggtgccaagaagctgccctcagcccctccccccatgccacacccccagtggaacctcctgactgtgagcaggagtcaccgcctccagggagcccatgcctgcatcacaaaggaggcccagaagccttcaggcagcctcaactcagccccaagccactgctctcccatcccagtccctggaaatccacccacttggcccagctcaccccaactccaacccactgggacccagtctccaggggcctgactgtgggcggcagccactcctgagtgagcaaaggtgagttgtgctgaaggaaggtacccggcctgctttcctgggccttgaaaccctctccaggccctctcctgggccttgaaaccctctccaggcgctcagcccctttctcaggaggctgggcagggcgtcctgtgtgcagtctcgcctgtgccagggcaggcagccccctctggcatacggtttatcttacccaaaggacccgctgtcccccatctgtagtaacctggagaggccacgagtgtccccagggagccgcagtgccttcgcctcagcagacactccacacctgccccgggtacttggctcaatttgaaggtgtttattttgtgtgtgccgtggggcacatggagccgtctgtggatacctgcaggacagaatgaattcaggacgcaggagcagattcattaattctgaccaaagaaagaagttcgtggaagctgagctcagacttgtccaaatgattgatccattcattcatcattcattcattcattcacccaacagataatgaccgaggtctctggggtgggggtgccagtctaggtgaagcggcccccacagagggtgcccctgcccgtggagctgacgttcccagggggctgcagaagtatcgaggagatgtggaggtggagctgggagtccctggagagacacagagcaggggaggggctggggctccccgagttgaacccgaggccgagccaaggaaggccccactgggaaggggagcttggcaggaatctgggaggcctgcctgggtgggtggggagggtggggggagaaacctggtgggcctgcctgagggtaaggggagggcatagtgagaggggaggagggccaaagagggtcctgacatcagggcaaggcccggctcttcctccaagggtttg

SEQ ID NO: 4566 - DNA, 6000 bp, Homo sapiens
caggccgggccagccctcacgtcagtcctaggaggagagacatcaacgggacatagcaaaggaggcttctcccattgagggtccattatccgcaactcatctaaatatctttaatttgtattgatatttaggcgtaaatatcaagggcaggatagcagaatcagccagacccgggttcaaatcctgactctgccaccttgtagctcggtgatcctggccaagttattcctctctgagcctcagttccttcttctgagaaatagggctaatgatcatatatactgcatagggttgaaggatagaaggtatatatggaaggcacatggagccagcaataaggacagtgctccctaagcagtattcatggtgatttctagaatttccaggaaaattaaaagccaataatttagttgttccaaacctgactgatcatcagaatcaccagaggagcatgttaaaaatacaaattcctaggctcccacatccctgagaaattctgaacggggtagggccaagggaggactcagtaacctctgtttccattatgcgctcttgtgcctagccatagtaggagctcaacaaatacagacctctttccggcctggactattgcaatagcttcctaatcagcttcctctgtccactcttgtctctctgccctccacacagcagccaatgggatctttttaaaaggtgaggtcatgtcaattcactgcccccaaccctctacaactgtccatccacacccctaactgagtagacaaggccctacatcagtggctcctggaactgctcacacatttgaaatacctgtgagccactagcaaagacatggaatcaacctaaatgcccatcaatgacagattggataaagaaaatgtgttacatatataccatgaaatactatgcagtcataaaaaagaatgagatcacttcttctgcaggaatatggatgtagctggaggctattatccttagcaaactaatgcaggaaaagaaaaccaaatacctcgtgttctcacttataagtgggagctaaatgatgagaactcatgaacgcagaaaagggaacaatagatgctgggacctatttgagggtggaggttgggaggaaggagaggaacagaaaaaacaactattgggtactaggcttaatacctgggtgatgaaataatctgtacaacagaccccctgtgacacaagtttacctatataacaaacctgcacatgtaccctaaacctaaaacctttttttaaagttttttaaaaattaaaaaaaagttttttttgagtcagagtcttgctttgtcgcccaggctagagtgcagcagtaccatcacagctcactgcaacctccgcctctcaggttcaggagagtctcctgcctcagtcttcccaatagctggggctacaggcacccgccaccacacctggctattttttttttttttttttttgtatttttggtagagacggggttttgccatgttggccaggctgttcttgaactcttgacctcaggtgatccgcctaccttagcctcccaaagtgttgggattactggcgtgagccaccactcctgggcaggttttttgttgttgttgttttttgtttaaaagaaaagaaaagaaaagaaaagaaatacctgtgggcttctgaacaacacctatgcctggccagatcccagaccaatggaatcagaatctctgagagtggggcccaaatagggttaccagataaaatacaggacacccagctatacttaaatttcagatacacaataagtaattgtttaatataagtatatcctgtgcagtattgggacatactcatattaaacaattatccattgtctatctgaaattgaaataaaacagagtcctctattttcatttgctaaatctggcaaccctagcctaagcatcagcaaatatatatatatatatatatatatatgtatttttttaaatttcgagacagtttccctctgttgcccaggctaaagtccagtggtgcaaacacggctcactgcaacctccgccctccacgaagctgggactacaggcttgccctactatgcccagctaatttttggatttttagtagagacggggtttcaccatgttgcccaggctggtctcaaactcctgggctaaagtgacttacccgtcttggcctcccaaagtcctgggattacaggcgggagccgctgcacccagccctcatcagcatttcttaaaagctcacagtgatacgacccccactacctgtctgatctcatctcatccaggactctcccccagcactctccactctcctctcacaccgttttcttataagggccaaccacactcccacctcaagacctttgcaattgctgggtctaccttggatgctgtgccctgtaacctgatagcctcctcaaagatcgcctgcagcggttccctgactgcttcatcttctatagcgtgacctccctgctttactttttctgtaaaacagattaaaatcagtttgtttgccaggtgcggtggcccacgcctgtgatcccagcactttgagaggttcaagagttcaagaccagcctggccaacatggtgaaaccccatctctactaaaaatacaaaaaaattagccaggcatggtggtgcgcacctgtagacccagctactcaggaggctgaggcgtgagaatcgcttgaacccaggtggtggaggttgcagtgagctgagattgtgccattgcactccagcctaggcgacacagcaaggctccgtctcaataaaaaataaaatataataataaagtaaaataaaatcagttggtttcttgtccatctccctccacccatcccccaaaccagaatgtaagctccatgattttgctggaaacactttgattctcctgctataccctcaacatctagaaccccaccagccactccacacatcctggttgaattagtcaatggttcattagaaggcttccccttccacaactccctaaacattcctttgggggagagttacttagaggaaacaaaattcttcaatgtccaataccaaacctaacaaaatctcaaaagcatacaccaaaaggggtaaacatattttctccatctttcccacccatagcctcaatgatgggatcaggaactgtgtgcagtgggggcgactagggtgagggttgggtgccgggcaatggctgaacagggtccaatacccaaagacaagtgtgttcaacacaaggtctctaatcaaattagagacagggcaaagcaggggagtgcagagtggtgcctggtcccacaaagctgatctgctggaaggggctgccagacattaagaggagggctggctgcagttctcaatcttgacaaagctcacatgctcagatataaccccttattcccctaaagcctgcacacgattgacccatttgaccctcacaataacttcatgggtgggtagagctgcccttcttggtcctgattggccagtggggagatgagcagatgaaggaaggaacatttcacaggtgcgtgagtcccaggctctgagctgggatgctggtctctgacccccgtcggtaccttttcctcccataaccctagattgtcttcactgggagtaagggcaacagcttctgaggccacgatgattcatgccctagctctggcactcattagctctgtggcttctgcattgtctggacctgagcctcggtttcctctccttcagagtgggtgtgatgaaatttcacagggttgctaggggaaagagatccattcattaagtgcttcttttgagcacctgcaagtgctaggcacagtccctggggctgggcacacagcggagagcaaggcagcctaaacccgcccacctccagggcttttaaagtctagttggggctgcgcggtggctcacgcctgtaatcccagcactttgggaggccgaggcgggtgggtcaccagaggtcaggagttcgagaccagcctggccaacatagcaaaaccccgtctctactaaaaatacaaaaattagccgggtgtggtagcacacgcctgtagtaccagctaccagggagcctgaggcaggagaatcgcttaaatccgggaggcggaggttgcagtgagctgagatcgggccagtgcactccagcctgggtgacagagcgagactcttatctcaaaaaaaaaaaaaaaaaaaaaaaaagaactgtacctggcgcgtagtaggtgctcggtaaatttgttcaatgactgaatgtgctgggtgctcagggaagactctcagatcccatcccaagagaccagaatggaaagcaggaaatggattgggggaaagggaggtctgaaggcagagagtcccaggcacgggagcctccaggcagaggccctgagacaggaccaaacttagcgttagggaaaatgaaagtagaatcaggaagaacttagatatctgaacactttgcaaactacaaagtgctgcatacacgtgcgggaaggcggtttctgcggctggttctttgtttacattatacatttttgaagactttgtcttcaaaatgtggctttggggcatgccactctcggggccgagtccttcgcgggcagtttctgcaaagtccaaccctgcagggcccttctcccgcgccgcgctgtctcgctgcttcctggagggtaaatggacccacacacagatgtggcgccgcgggcttgccggtcacctgcagaggccggcacccctgtcgcgatgggtggtggaggtggggcagaggtgggacgagccaggtcgggacccgcagctggcgagtcagagcctggaaggccccgcgcccccgcgccgcgctccctaagtgctccgcccggccggtggcgaccaggcgcgctcggggcaggcggcgggacgggccgggaccggggccgggacgcggcggggaggggaggggccgggccgggccgggcgggaggagccgctcgccggttttgccgcctccgcctttgccttcgcagccgcctccaggtaagggggccccggaggagccgccaggccacggtggcgcgcacctcgctgggccactccccgccggccccacgcggggcactcggagcccggcccagccccggggccctttgccctgcgccccgccctccaccccggggacactggacccaccaggaagcggccgcgcgctccctggcgctgcctgccctaagcccaggccgcctgctggtggttggtttgttttcagagccggaagtgcttttagaaatcttggggaggcagagggggaaactgaggctgggcggagcactcgggcgactccggcctcggcctccgagttcttagaggtcacccagccgctcccttgacaaatgaggacgctggtcaaggtcagagaggaagggggcttgcccaaggtcacaagaggtccctgtgcttccccttgccccacgtggcccctccacgcccccgtcaggaaggcctctaggactcccccgcctcctgtctccctgtccccccgcagactctcaaacagagaattccaggagggcttggggagcctctggagaaaaaccaggctcctcatgttacaaggaggccatgtcttctggtgcccatgcctgaagttacaggagggaagaattactgctgctgacttttgagtggattttacagctgggtaaactgaggctcagagaggtgaggtaacttccccaagaccacacagctaggaagcaagagataaaaacctgggctacctgcctggagagcctgacccagtgcttcgcacagagttggcctccacaatgcctttgccctgaccaggctgcctggcccttccctggggttgcactgggaattaggagcagggccaggctagaatcccagactactacctaactcgaagtaggagtcagcacatgagccccctttttcctaactcagtgttcattgcagaaaatatgacactcttttaagctttgggaacatccat

SEQ ID NO: 4567 - DNA, 6000 bp, Homo sapiens
cggaaaaaaaaaaaaaaaattagcctggtgtggtggcatgtgcctgtggtcccagctacttgggagactgaggtgggaggactgcttgagtctgggaggtagaggttgcagtgagtcgacattgagccattgaactccagcctgggcgacagagtgagactctgtctcaaaaaaaaagaggcggggggtggggggtcattgtggctcacacctgtaatcccagcactttaggaggccaaggcaggcagatcacctgaggtcaggagctcaagaccagcctggccaaagaggtgaaaccccgtctctactagaaaatacaaaaattagccgggcatggtggcttctgcctgtagtcccagctatttgggaggctgaggcaggagaatcacttgcatccaggaggcagaggttgcagtgagccgagatggcacctgcactccaacctggatgatagagcaagactccatctggaaagaaagaaagaaagaaaagaaagcaaggaaggaagggaggaagggaggaacggaggaagggagggggaaaagaaagaaagaaaggcacaaaaaacttcaaaaatgtgaacggaggtatacagtctcgctctgacgcctaggctggagtgcagtagcacgatctcggctcactgcaacctctgcctcctaggttcaagcgattctcctgcctcggcctcccaagtagctgggactacaggcacttgccaccacattggctaattttagtatttttagtagagatggagtttcaccttgttggacaggctggtctcaaactcctgacctcaggtgatccacctgctttggcctcccaaagtgctgggattacaagcatgagccactgtgccctgcctgatttctgctttatacttttctgtttttctctcagtttttctacaatgggttttttttccagacatgtaaaagaatacaaaaattaatgtaacactcctattcacaccatctagaatccataactgtaaacatgtcatatttgctttaaaaaaaaaaaactttagagctatagtgaaagtctcctttaactgcctcttcttctctcagacaagcatggtcagttggtttttagttttatatacaggtatatacatacataaactagaatctggtacagttgtgtgtgatggctttacttacatggaggaacagttcttaaaatcagggagggatggcaaccttctttaaattgaggaggggatgcacaaggactggcagcctgaacccaccttcccagctaagcagccccctgggagcccctgccctggggagatccagctcccagctaagtgcacgggccacacctggttgttaaatgtaccaggaagataattgctatttgtatttctctggatagcttccaatgaactttcatatctcgcaagtcattgatggctcaaaaaatctgggaaacctggaaagaaaatcattatccccatttgacagatagggaaactgaggcccaggaaatggcagtgagctgccaggatatcacagtgagttgatggaggataaggaactagagctcagacctggagttctttccagaacctcaggccagcatgcagaggggtggaacagaggccaaggcttgccaggtagctggcactgatggactttggccacatggcaatgaggaaaagaagtggcaatagcttcagaccactgaggttggctgacggctgggaaattatggtctggagagaagcaggtggaaagttttccttcctcagaggtcccagagggcaggcacactcctggggactgtggctctccccacccccaacacacacacactcagaagtcaggagcagcctcacagtcagacaggtccaggttcaagtctcagctttaccaccaatatatgttgtagggtctttaaaaagtcctttacctctctgggcctcaattttctcatctgtaaaatggagtgattatctttaattctgtgttgttccaaggataaaagagaatcatcatctatgcatctggaaacaaaagcatttaaaaggtccccaacctaattccagaaggctccagcaggggttagagtaaagaggactgcctgacactgactgatagagaagccacatccatgcacacacatgaggtttgacatcggctttgcagtgaccacctgtgctctccggggcagcccctgggagatgggcattggcatcacaagctgttggtggaatgagggcagggcagtggtgatgaaggggcccttcctttctttttattttttcttttattttcttttttttttttttttttttttttttgagacagagtcttgctctattgcccaggctggagtgcagtggcacaatctcggttcactgcaacccccgctttccgggttcaagggattctcctccctcagcctcctgagtagctgggattacaggcgcctgccaccatgcccagctaatttttgtatttttagtagagatggtggttttgctgtgttggccaggcagatctcgaactcctggcctcaagtgatccacctgccttggcctcccaaagtgctgggattacaggcatgagccactgcgccaggccggcccttcctttcttttcaacaaaaccaaggcatgaattcattctaatactccaacttcaaccatacagccatgtgtaaaacaaaaagcaaaatccttcccgtcactctcctgcatcgctcttggttatcactttggtgccattgcttgctattaggaacagtttgtccacaaacaccattagatgcatgcatatctttgcactctggtgcgtaggataaagatctacaaatggaatttctgggccacagttacaagtgtctgaacatttttttttttttttgagacggagtctcactctgtcacccaggctggagtgtaatggcccgatctcggctcactgcaagctccacctcccaggttcacgccattctcctgcctcagcctcctgagtagctgagactacaggcgcccgtcaacacgccggctaatttttttttttttttttttttttttgtatttttagtagagacggggtttcatcgtgttagccaggatggtctcgatctcctgacctcgtgatccgcccaccttggcctcccaaagtgttgggattacaggcatgagccaccgcacccggccacaagtgtctgaacatttataatatgagtaagtactacccaaattgccctactaaaagattgtctgaggacatcaacattccgatgccagcccgatgtcttcataaactgcccccatcttcccttccacctgacaaatatgtctccccacccggaattccctgcacattatcccccttcagacagcaggtgacagggaagcagctctgctggggggttaccagatgggatgccccggggggcttcctaggagaaatggctccacttcctcccatggtgttaatgcgttctccaaactccagaggctctacatctgacccaactgcccaacacacacagcgccgcaggtgtcagcacaggtgtgcagaaagacacacagacagtggacagcccccaggacaggctccaaccaagcacccagagacagccagccagcccctgacctctgggacactgcccagtggggtaagtggggcaagctgtgaacagatgttgcccagttcccatagtaagtgcctccaaggaccgaaagagcccagggaggtggccacggtgtggccactctacagaacttgggcacagagacccaaggggattccaggctcctgcctactccaccacttccagctggtggtcttgggtgagtggtctgtggtctctgagcccaaaggtgcaggaatggtacctatgccaaagggatgctgagactaacaagggacctcactggggtccatcctgacacattaaagggctcagcaacccagagcagtactaataaagctcctactatgtgctcttgctaggtctacactttgtccatacagacagtctggagagtttccaaagcgtgttgttgttgttttgttgttttgagatggagtggcgagatctcagctcactgtaacctctgcctcccgggttcaagcgattctcctgcctcagcctccagagtagctgggattacaggcttgccccaccacatccggctaatttttgtatttttagtagagacggggcgggggggggggtgcgggggtgtttcaccatgatggccaggcaggtctcgaactcctgacctcaggtgatctgcttgcctaggccttccaaagtgctgagattacaggcatgagccgccgcgcccggccgaaagcgctttcttacctaatttttgtatcctattttgtctcaccacgaccttcggggacaggaattatccctgattttccaaggacggaactgaaggccctcccgactaagaaggagacttaaagcgcctttttcagcgtggaagacaagactcgcgggcgctaaaggcaagcgcagagaggggaggcgatttgcctgaggtcacacagcaggcaggggcagaccccaatccccagcagctctttcactgcccctgctgcccctctccgtcccagccttgggcccgggggctttccgcccaagagccacacccaagtcacggtaaccacagctacgccggcaacccccaacttgccgcgggcccgcgcggggcggctcctcagagcctcagtttccctttctagagcgggcccgccgccgccggtgggctgagggagggcggctcggcgccgggcgggccgggcggggcggcgcctgactcagcgggcgggccatgggctgctcagccggtccgaccggccgggaggggcacgagccgcgggggcgctgcggggccgggcggcccggggggtgacgggaagggaggccggtccggcgccgcccagccccgggctccgggcgggaagtgggcgagcgcgacggtgcggggcgcgcgggcgacgggccagcgggatgggagcagggtcccccggcggcccgcagcctcgggagccgcgctgaagccgggggcgggaccagcgcggagccgacatgtgtctgcgcctcggtgagcgactgggggcgcgcgggaggccccgaaccaccccaaccctcccacaggagcggagcactgagcccggaacccgagcccccagggggccaggccacctgctctgcctctaacttactacgaggccggggtcgggtcactttcctctctgggcctcagtttccccagcagtgaaatggaggggaggagcgctgcgggtgtcttctcgatgtggctgtagcgtctcttaccctcgccctctcttgcctttcctgcggaggcgcacgactgccctcggggacccccgggtgggcggcagaggagacgctggagagagcagccccatcttacccagaagggaccccggggccaggcctcagcttccccacccttacaaggggctcccacttacatactctccactctcccgaggccaggaaggaaagccgtgggcaaaaaggatcagcagcgggggagcgggactaatgtgccccctccttccactgcctgggcacggtgatgctgcttgtgggcagcagagtcctggggcatccccgctgtctagccgagagaccttgtgagcctcagtttctttgtctgtaagagggggacagtagttcccacctcctaggactactatgaggatgagggcagcttctaagagtaaagcgcttagcaccttgccggctgcgctgctatgcgctcccacagtggtaagacaaatgaagccagctgggcttcatctgggaggcagcactctgggaggccgaggcaggcggatcgcttgagtccaggagagactagcctggccaacatagtgaaatccgtctctacaaaaaatttaaataaagaaaaaaaaatttagcccggctactcaggaggctgaggtggaaggatcacctgagcccaggaggcagaggtttcagtga

SEQ ID NO: 4568 - DNA, 6000 bp, Homo sapiens
ggtctgttctaagaactttacacatattaactcatttaatcctcataactctaaatattcccattatacagacaaggaaacagaaactcagagaagcaacttcagggcctttgtgtaagctcttacccatccttggcttgttgatctggctgactgctattcaagcttcagatgggatgccttggggagcattcaaagatctccctgtctaggccagtccctcccatagcatctaacccagtttttattatacaattatttagggggtgatttggttcatgtctgtcacccccataggctttaaattccatgttttgctcataattatatcttgaatattcaacatataataaatacttgatatttgttgaatgaatcaatgaaaagcattttcagtaagagaggggatgtggtcagatttgttttagaaggatttctcttgtgtaaaagtttgaaggtggtgagaccaagtcaccaacagcagctgaattcaggagtgacaggaaggcaggctggactagaggagaggcaagagggatggagagaagtgggtgaacctaggaagtatttaggaagcaaactggatggctctgataattaagtggatagaagtgaggaagaggaaggaatcaggagggactcccaagtttctgagagcaccttgaactggggtgagaaagcatctgcaaaggaggcaggttgggttggcagagcaggctgtccctagacccaagcaactgaaacatggaaaagctttcaaaaaaatctttgcacccaaactccttagcttggtcctggtgtactttattcagccccatctgtggtctacccccaaactcagagcatatagatcactgctcctcccccaagccccacttgtcatccagcccaccttagtaagtgccaccccactactctctctccacaagatgcagcttggaggacgtctcctctgggatccctccccactgcccccaccgcttcctggggtgaatgagtcctctgtagccatcaggattcgctgtatcaggagtgttcctctgctgtcacctctgatgactattttcctcaattcagaatccccagcacctgcaaaaggcctggataaaggtaaacctcaaaaaagtttgttttattgaattttcccaaaggtttggctttattacattaagagctgaggccaggaatgtggcagtaaattctggtgccaccacttagaaagacaagtcacttttttcaagcctcagtttccgtccatcaaatggagataagaatacagtgcacctacctcgaagagctgttttgaggggaaaatgaaatatgctaggttaagtgtttaacacaatgcctggaacatggttagttccctcaaaaaattagctgttatttatttatttttaaattctcgccttgatgctcagaaggggctgagcaggaacagaggattgcagttcttaggatggccacgcgagggaagtggtgagcagcctccaggaggacttcggctcggctgtgccaaggcacctgctgaggacccagatggcccgcctggggtttccgggacttcccggcccctaaacatgtgggcgctggccagagcgccgcaggagaagcctctgccaggtgctcggtctcgactctcacagccccagccatccctcctgctcgtccccgtctcggcttggaggggctggcgggcaggaggggacagggtagggggcaaccaggatatatcccctccgttttgtcatttgtctttcaaactgacttatggccatttcttctgtatagaagccttgtagtcaaacatttccatgttttctcttatggcttctaggtttcatcatgcttagaaagtcttttccatctccaagattattaaaatattcactcatgtcttttttctgatacattatggtgttaaatatgtggtccacctggaatttatttcagtgtcgaataagggcacagctttttgtaatttccccaaaagacttgctggttattccacccatttgatctccgccaccaacccccccccccccgcccacaaccccctaccaactccgccccccatttgtctgaagtgctgtcttttattcattcattcatttagagacaaggtcttgctctgttgcccaggctggagtgcagtggcgtgatcacagctcactgcagccttgacctcccaggctcaggtaatcctcccacttcagcctccctggtagctgggactacaggtgtgtgcaatcatgcccagataaattttttttttttttttttttttgagacagagtcttgctctgttaccaggctggagtgcagtggtgcgatctcagttcactgcaacctccgcctcctgggttcaagcgattctcctgcctcagtctcccaagtagttgggactacaggtgcatgccaccacacccagctaatttttgtatttttagttgagacagggtttcaccatgttggctaggatggtctcaatctcttgatcttgtgatccgcctgcctcggcctcccaaagtgctgggattacaggtgtgagccaccgcccccggccacaagttttgtatttttttatagagacaaagttttgccatgttgcccaggctagtctcaagtgatctgcccgcctcaacctcccaaagttttgggattactggcatgagccactgtgccgggcctgaagtgctatctttatcatacattgaattcccttgtggggctggatccatttccatactccattttgttccacagatcggtctagtcctgcttcaataccatactgctttaaatacattgactttatagtatgttttagtatcgggtaagacaaatcccttttcattacttttcttcctggactttttattcctgtatgtttattcttctatatacacttaagaatcaaccccctctccacccacctcccatccagtccttctggtaaccaatatagaactttgaagatactgaaattatatgcaaaatatacattgcacatctccagagagatagtgctaagttttcatcagatgtgcaaagggaacccctggtttacctgtctctgtgaaaggggccagggaggagcacacaggaagcctgattcctctctgtgctcccacccctcacctccaccctcgttccaggtcctgccctggcctccatcccacctcccctaatctagtcccccttgctgctccagagtaacccattctaccacccaggccctagtccaggcctaggcctgaggtagaatagctgataacaaagctttaattaatatgtaaatataatcaggagccccagctccacctctgaccagctatggaacgcactttgaggcttttcacattgtagggcctcagtttatgcttctcacagaccaggtgagaagggaaggcgtaggatgactatgcctcctagcaatccccaggaggatcctttaatcccaataattttcctttttctccccaccttcccactccccatttacttttttttgagacagagttccccctgtcactcaggctggagtgcagtggtgcgacctcggctcactgcaacctccgcctcctgggttcaagtgattctcgtacctcagcctcccgagtagctgggactatagttgtgtgccaccacacctggctaatttttgtatttttagtagagatggggtttcaccatgttggccaggttgatctcgaactcccagcctcaagcaatccacccaccttggcctcccaaaacactggtacaggcatgagccaccgcacccagctcccatttacattttaattcatgccctcagcagggagactactggttttacatgcctccagcaaatattaattattctgtcctctctgtcagtgggtggaattcaaaacactggagcccaagagtggaactgaccagtcctaagcaaggttaaatatacaagttggggcaggcacgaccctaggaaagacttcatacagtatcctcccgggctgcagaagaacccaggactccaggagtctatttggaagtttatataggcagatgccaggccctagaacagagtttctcaacctcagaaacctgctgacatttcgggcctgacaattctctggcgcaggggctgtcctgtgcattgaaggcgtgtagcagcatccctggtctcttctcatgagacgccagtagcaacctcctcgttgggaaaaccaaaaatgtctccagacatggtcgaatgttccctggggggcaaaatcgccccaagtttaaaaccattgctctagaagtagagagcgcaggggaagcaggttaacttgggcttcagggccggccactctacttccttctgtctgaaagggacattataaagtctttctcttcataccaggcacttgggcaagtcttttctcctatctgagcttcagattttccatctgtaaaatggacttgacgtttgtaagtcgtttcttctcttaccatctgacgttcctggaactgcttcagggcagggcagggcagggggcgccgtggtgcctgtgaggtcctgggaggtgccccaaagaaaaggaaggatgagaaagaacagatagggtaggtggtggagaggggaggccgggcaggaggcaagagagtcctagggacacggagaggaatgaggcttccccagaccccgcttcttggaagcctcattaatgtaggtcccccaaccacaacccggcaagccaaactccccggattcccctaggccccgcccaccaccaaggtccggcccactggccccgcccatccacgcggccccgcccccggcaggccccgcctccccttcgcctcccgccggcccaagcttgggctttgcacccggcggcgactgaaaacggtggctgctgcggagccggcagcgcaggcgggcggagcggagctgcccccgtggtggcgggcgatgcccccgtgagcctccctcgccgcccctccccgccccgcgtgcctatccactcggagtccgcgccagcctggggccgggccgcgcctactgccgggttcgcggggcggggtcccggggcagcacctgccccgccttgcggagccgcctcggcctgtggaggccccctccctgtctggaccccggccccacctccgggtaagtcagcaggccttgctcgcctgggagtggacgtggggagggggctgcagaggtctggaggaccacggggggaggggggctctggccatgaagcgcaacgtaggtatgtgagtgtgcaggggcgggggtggggggatgaacacagggtgtgagagggctctggggaggggactaagggatgagagagggacgtggggtgtttggggaagcctggaaaatggggaagggggcccagagtcttgagttctttgctgatgctcagagctcctggggccctggtcttcaacagcattgcctggcatggcatttttggaaagtgcttaaaatccctcctggaaagggagctggaaggcagcctgcttttctcccttctgcctgtgccctggttgagaagcagccactttttcctcaacgtgacaccgttgtggtgtccagaggaccccctccaccccataaaagaaaaggagtgctgcttactccagccctggggtgggaagagggggctttgggaagctgggaatgcagttggtcagcagcatggtgcagagcccagggttcagggaggcttggcaggacccttgatgggcaacttgggcatgctctcattcatagggaggagctcttccctgactggccgcctgggtacctggactccatgtccccatcacctctggacaactcagccctgaggagtgggtttcttcagtgtcctggtcctgaaggctcaggaaggatcctggaatggggtgggcaatggcatatcaaggctggagaacagggggcattggctggcactgccacttggggcctgtttcaatgtggtccttcagggcttggacacctgggtgaatatg

SEQ ID NO: 4569 - DNA, 6000 bp, Homo sapiens
atggcttttggaaaagaagatttaatttatagtcaactgatcatggcatgcagcatgcagtaaaagtcagcttcaccagcttgatcataagaactggagcacacatggaatgccagagaaaaatatatgtatgccatcatgcttattgggatctctctgtaagtggcagccaattaaaatagtcattattttacctcagagagaaaacggtgcaaaaaatcaagcacgcgaaattaaaaatccagattaagaacctcggtccaaattggtttgtttgtggccttctaaccttggcaaagtcttctgcaaggataacagacctactttgtcttcagcccagagtggactctttgtttttaatttcctctccatcttcagaggtgattaataaatctggactcatccataaatcatttctatagtggccaaatggttcttcttcatgcagggaaactaaaatcacacaatctcaaaagcctcagctctcatgctaagccaaaggtccttggcaacaagcgaaggggaggtattaaaaatcaagaggtcaataggtcttgtttctaaataaaatttcccagagggcttccccacccccccggcaaatcaaaagacaccttctgaaagcaaagaggcctccaaggcatgggttgccagcctggctcactgtccccacatggcctcggagacaacaagcaagtcactgcctcctattcctgtaggtttcacatgtagaatgagacaggccttctccttgggctcccgtccctgactcctaactctcagttctccattcagagatagggagagagaaacattatctcctcaaacttccaaacaaggtgtccttatttctctcccaggggcatatgcactccaatttgtcacttccttctcatggaccctcttctgctccccagtcataccctggcagatacccctacccctgctactcatcacttcctggtagactccatctgcccccaccttttcctcacatctgtccattttctccatcctctccccacaagaactcctttcccccatctccttcctatgaaatcctctgccttcatcttctccccacttgccctcattcctacccacagcccccactcttcttctccccagactcacttctgcctccaacactgctccacagacctgccctcatcctctctccacaacatgtaactggcgaggtcaaccacactctccttgccccttcactgctctatgcttcatcttcctcgacccatttcccagccttccttcccttcccaacctttttactctgctcttgaaaacccttcttcccaatcagctaagtctcctccatcctcagcctctccagtcacctgcccacctccagcctgcatccaaagctggctctaccccagggctccccttctgcatggccctcctggtagaatctgtttagattcttacacccccaggatttcaggtttaggagggggcctcatgtctccttgccaaagcccaactcagttccttattccacctccttcttgtaaaagcccttactacttcaagggtcataccatttagctgtctcagcctttgcccctcctcatgctgtcacctagagactccagaaaaacctgctctgcccatcagagactggtacctagctcacgggcatcctcttcccttccctcccctcaagtctttctatcatccagggggagttcagtggccacatcagcatcctgactgtctcctgtactccactttggtcactgactcccacggccacacagtggaccttgtcatcaccggaaactactcaaacttcattcttccactttctgatcacaactccctcattcaatgatctcagatgtggattctctgacttcactgggacctctagtccatacattttttttcactctcctatccagtttagatactaaggcccttcatttcaatcactgttttgccacaatcttcaacttccttgtcctttgtccttccattgtatccgcctggtaaaacccaaacctagatcaattaaactaacctctgtgtacccaccactaggtggctgaatgttgttgagggaaaaatgcatattacacaaccttgcagactgctgcttccgaaaattaatggtcactaacctcgacagggccatgataactgcccagaaatctgtttgctaccttagtcatctcactgccactctccagtgctgctattttaatctttctctgctcttttcaatctcgcacaccatctccaatcccactctcactggctgatataatgttcttatttgacagagaaaatggaaaccatcgaagaattccctcagcttcctgtcaccaaacccaccaattaacctcaacgtaatgcttcccttctgccacaaaacaaatgttcctccacccttctaagtgaatttcttcaccaacactttggtgaagtctttttttcaagggcaccattctcagttatcttctttcccttatagttttatctttttcccctttgctggatccacatcaacatttcttccatccgaataaaaacctgtgtttcctgctggatattgccttcttttttcttctcctaaatagccaagctttctgaaaatgtatcttacatgaatcttcacttcctcaatcccatctgcttctcaaaccactgtaatttgacctctgctcccatcactccactgaaactgcacttgtaaaggtcaccaacaacttccttgtttctaaatccagtggattctttcaggccttattttacttgattagtcataagccttcaacactttccttccttggcttctgaaacaccacatactactactgatcttcttaccattttggacacttcatcttgattacctttgcaggttcgtcctcctttgccagaccctcaaacttgggtgtttctcagggctctgtcctaggtctcttctgactctacacttactccctgggcaagctcaacaaatctattggtgtggctggcatctataaggccccatagactcccacactgcaacttccagttagacttatctggcgaactccagttaggcatatccaatggccttctggatacctccacttggatgttccattggcaccccaagctcaccgtgcccagaactgaccctctcctaaaaacccctgcttcctctccttcctgtttgcccaaaccaggaatctagaagtcatccttcatttcccttacttcccccacacccaattagtaaccaagtccatttttttctagctataagtgtctaaggaattcatcctgccctttccatttcagctgccactccatgctttgtgccaccataatccttccccactactgaaacaacctcctaactggtctccctccttctcccaatcctcaatccagttcctgcactaatgtttctttttttttgagacagagtcgcgctctgtcacccaggctggagtgcagtggagcaatctcggctcactgccacctctacctcccaggttcaagccattctcctgcctcagcctcccaagtagctgggattacaggtgtgcaccaccatgcccggctaatttttgtatttttagtagagatggggtttcgccatgttggccaggctggtctcgaactcctgacctgaagtgatacgcccgcctcagcctcccaaagtgctgggattacaggggtgagacaccacactgggctctttgttttgttttttgagacagggtctcactctgtcacccaggctggagtgcagtggcacaatcatggcttactgcagctttgacctcctgactcaagtgatcctcccacctcagctttccaagtagctgggacttcaggcatgcgctaccatgcctggctaatttttaaaattttaattttgtagagatgaaggtctcactatgttgcccaggctggtcttgaactccttcaagccattctcccgtcttggccttccaaagtgctgggattacgagtttgagccaccgcgcctggcatgcaaagagtctttccccctccctatctctaaaagtctttcaaggcccagctcaagagccaaccccactgccataaatgccccttctctgattctgagctcctcaaatccttactcttctgtagtatttatctcacacgcagaatcagagttgcttcatgcatggtttctctccctctcccgttaagacatgggagagggagggccaaaagcttgattctcactagggcctaaggaaccttatttagcccacccagtctctggcacatagtatgtaaatatgctggcacatagtatgtaaatatagataaatgcaagaaagttgcactcccagctcctcggtgggccctatcaacagggcattctctaaagtcatcaactgaagactgcttcccatccacccatccatccatccatccatccatccatccagaatatgcctcaaccccactgggtggaggttgggtcggcacgcgccccctaggccgttttgtacggttttatacctccagccctcgcagttgcggctggtagaggatggcagaggtaggtagacgatgcaagtcaaagggcacactcttccgccgcgtaggataggactctgttcggacgagtgaccctgcccattcccagaatacagcaactcttcagccgcctctcacctacatgagagggtggggactcttcctgaccggcgccccggctgaccaatacctgatccagatcaagcgaattagccaatggctgcgggtcagtaataggggcggggcatggttgctagggccgagctagtggggtgaggcgagaggctctggaagagactcggtggttgctaaggcgggaggtcacagagcgcggcgcagggattgggccgtgttgggggaggtgtgtggtgattgggcggcgcccaggaggcgcccgggtgaggcacgggtgcgcaagcgggagttccggctggagacccgtgctctgggccggcgccttcaccatggcctcggcagagctggactacaccatcgagatcccggatcagccctgctggagccagagtatggaatgagggttgggtccaggcgcggggaggtgacctcatgaacctgtgggttgcgagcgcagctgtagccccgcccctcatgcggccccgccctccctcgggccgccccctcatagggtctggcaggtcctagacttagagaggctcagagagccccgcccctcgtaagtcccgccccagagtgttcctccctggcgagccccgcctctgcccgagtcagctgctcgcttgggacctctttttctgtctttcctgtccggggtgctcaggtccatgccctttaatcacttctcatagctgaaggctgccgaaagctggatccctcctgattcctttgtttgggattgggcttcccacatctagcctatcacttattattttcccgaaggcgtggagggggaggctcgcggggtcaccgatcctcgcagaagcccgggactcagaacccttagccgtccctctccactcttctcggcagtggttaacagtgcagtctctgccgtcgggtagaactcgactgaaatcctgactccttcctttaggagctggattacctttggtaagctaccttctctgaacttcagtttcctcctctgcaaaaccgggataaggatagtaaccttcctcatagggctgttggggccatctggagattgtgtaaagggcctggcatggagtgagttcagtaattggcatttacgatcagcattgtttctctccttacattaaagaaagacatgtaggattctccacaaaattaggattgacagcaggcccgcatccatgacagtgtgagtagatcggggtccagagagtggaaagtttggtctctctgggaattctggcagaagggccttgaagtatgatcagcctgaggccagcgtgtccctcacttgcattagtccagcatcgccttcacgcctcctgtctcact

SEQ ID NO: 4570 - DNA, 6000 bp, Homo sapiens
catctatatgtcttaaatttattttttgtttgactcaccacaaaaatactgttgtacaagagactttgtatgtccaaggagctgtctttcaaagtgaatgtcttttattttgtctttgcaaatagctaatcacattttattttattttattttattttaagatagagtttcactcttgttgtccaggctggagtgcaatcttggctcactgaaacctctgcctcccgggttcaagcaattcttctgcctcagcctcccgagtagccaggattacaggcatgcgccaccatgcctggctaattttgtatttttagtagagatggggtttctccatattggtcaggatggtcttgaactctcgacctcaggttatccgcccacctcagcctcccaaagtgctgggattacaggcatgagccactgtgcctggccagctcatcacattttatcatgagttagcagcctttctcttggaaggactgaatttgaaacaggttacagattgggagaaagaagggttgtttgctaccaccaccctttatattttttaggctataaagtattaaaggctatgcaacaagtgaaaattttgtagtaaaaacttcgggaaaatgacaactcatttaaaaatattagggcaatttaaaaacagaaaggaattctcacatccttgtgtgttgttgggcgagacagtgatggtttaaaatgagattccagagtcttcagggactcccattattcatatgttagatcttctttgcctattttctctatttgtcacttaaaattgtttttgtttctttattccttttttgattataaaagttcttcgtttgttatgacattactgttgtgtttctttgctcttctaattcaacttccattttataataattgtttaaattttgatttctttcctgagttctatcacataatttctgagtttttctaatactaactggtattgttcttcatgtcttgtatcatttttttttttttaatttttaaaaaccagaactttttttttttttgagacagagtctcactctgtcacccaggctggagtgcagtggcgcaatcttggctcactgcaacctctgcctcccagattcaagtaattctgctaccttagcctcccaagtaactgggattacaggctcccaccaccatgcccagctaatttttgtatttttagtagagatggggtttcaccatgttggcgaggttgttcttgaactcctgacctcaaatgatccacctgcctcagcctcccaaagtgctaggattacaggcatgagccaccacgcccggccaaccagaacatttattgggtgactaaccatcaaaattcttttttttccttttatttatttatttattttttgagacagagttttactcttgttgcccaggctggagtgaaattcttaagatgaactggatgctgcaacagctgccgtcttaggtctaggtgttgttccttcacggaatccctgcctgaatctgtggtatacactttttaggtgcctcatttgactagtcctggtggtatttcatctttcagcattggtactccagtgttacttcctcttgtgcttggcaaggtggcacatgtgccacaggttgactactgaagggcataggccttaggggcacagcagcagcacaacatgtgtgtcttactgcaatgctttccaaacgatggtgttccctttgtggctgagaccaaagaggtcttgtatcatttaaaaaatttattctatttcaaataattagtttatagctttctttttcttttcttttcttttttttgagatgcagtctcactctgtctccaggctagagtgcagtggcacgatctcagctcactgcaacctccacctccctcgttcaagctattctcctgcctcagcttcctgagtagctgggactacaggcatgtgccaccatgcccagctaatttttgtatttttagtagagacggggtttcaccatgttggccaggatgttctcaatctcctgaccttgtgatccgcccaccttggcctcccaaagtaattcaaacggattacaggtgtgagccaccacactcggccaggttatggctttcaaaggctcagagagcaactttggatagttgcaggcacttctgggtggtgctttcagcagctacagggtgctcaaatcaacagagtggttctaacagcagcaggggcaccaccctcagcagctcagcattcagtgttgtctcatggctctaaatggaagcagtagcttcctggtatttgggcagtaactccattctgctcttagctactacagccccgttctttctttcctatgcttttttagcctctccaacaactttgttatcaattccctgcattaaatccccctttgatataggtatcaaaagtttttgtcctgaagaaacactgtccaatatagttaatttcttccactcattcattattcattaaataaaaattcatttattacttactaatgtaatgggtactttggaagcgatgataaacaagacaaagtccctgctcttgtgaagtctgtatattagtgagaagtcagacaataagaagtaaacaaacaagatgatttaagactgtgataggtgctataaaaacagaagcagaggctggatgcgatggctgatgcctgtaatcccagcactttgggaggctgaggcaggcagatcacctgaggtcaggagtttgagaccagcctggccaacatggcaaaaccccgtctctactaaaaaatacaaaaattagccagcatggtagtatgcgcctgtaatcccagctactcaagaggctgaggcaggagaatcacttgaacccgagaggcggaggttgcagtgagctgagatcatgccactgcactccagcctgggcaaaggagtgagactctgtctcaaaaaaaaaaaaaaatagatgtggcttaaacaataaataattgtctctcttgtgtaaatgaaattaggaggtaaaggcaggtagcctagaactgatatggttgccataaataatcaagtctcctttaggctcagtacttcattttccctacagtgtgaccccctttctgtggtccagtatggtgctagagctgcagccaacacatcccaaatccaggcagctgaatggaggatgggattaagaagaggcaaagaccatcatgcagtagctcccttttaagggggtttctaggaagctaccatgcaatactttgattatattttattggcctgaactcagtcagctggccatacctagctgcaaaagaggctgggaaatataactatatgcccagttaaaaaactgggagttcaattattatgaaagaaggggagaatagatattgaggcagacaacgagtagtctctaccacaagaaccttagaacctgaggtgtctttatgaacacgcatttggactgattttttttttttttggacagggtctcactctatggcccagtctggagtgtgatggcgccatcactgctcacttcagcctgaacctcccaggttcaagcaattctcctgcctcagtctatggagtagcttggactacaggtgtgcaccactacacccggctaatttaaaaaaaagtttgttgttgttgttgttgttgtttttgtggagatgaggtctcactatgttgcccaggctggtctcaaactcctggcttgtgatcctcctgccttggcctcccaaagtgctgggattacaggtgtgagccactgtgcctggcctggactaattctttacaagttttctccaccaccggatagatctcttcacggcagagacttgatctatcagttgtattcccagtttgtcctacagtgctttagacatgattgatagtaacatgattttggaagtgaataggatataatcttaaagcattcaggaagccattgttagcaaacgttgcagagcagtaggtgtgatctcaattcctctcaccagcctatgcatttccttagtcagtaaatcactgaatctatttctgtcttgagtattgcatgttgactgtggcatgtgattgagcataaaaaggcgttagcgatatgcatccagagatctcactgaggtctaaagcactgagaagacttcattaggtgaaacttgggttggtgaaacaccttttttcttactggcagtatattaatgataacatttgtatagcatattatttacatcctcacaacatcaccaggatatttttattttcatccttatcttactgttgaagaaatggaggctcagagaagataaaaatattcaatttagcaagtggcagatctggaagtagaaaccagattttatgaaaccaaaggcatctctagagaattttttttttatttcagtaaaattactgcgtacctattgtggagaagaccaccacatcctttggtttcacttttaggtgacttataaagtaatagggagaaatgagggcagatcattttgctagctctaactgaagaattccagtcaatcaatactgtggctgttatcggctttataaaagactactattcccagcatgcctcaaggcacctccaggaagaccttgactcccagcattctgtactttggaactccgagtcccagaatgcaacattcctcctacttcctctcagggggccgtcgagactacagttcccagcatgcagcgccgccacctgcttctggcgccccgctggaccctgcttcgaagggaccgtttggtcgccagagggcggttcctggagttacagccgcgtttgcgggacgtgtctgcgcggcagtcctggcctgttgagcttgtccagacgaagcctcgcagggatgggttggagcctgggccgggcttcgctcaggcagcgtttgaggcagacccagcagggtcctcctggggccttcctgcctttgaactgcggtggcgggcgggcgcacggtctcctgtacgccctagactaggggccgccatctccatggccacggccgtgagccggccctgcgccggcaggtcgcgggacatactgtggcgcgtgagtgcggcgtgcactgtggcacgcactgccagggtcgggccgggcgggcaagctctgatcgcgcgtgcgcgctgggcgggggagggccggtcccggggcagcgtggagagaacgcgtggggaaggcaccacttgggggactgattgcagggttgtgggaagtcctgagtggaagttggttacggggtaggagaggggtcctgagtggaaggaagctggtcagagtgggacggatggactgaatggaaattggaatagggagtgaggcggagttttacgcaagggtaccgtatccagtaggtgcaaaataaataacttaatttgtttcgttaagaagtgggaaggaatgcacggaattggaaagaaatgtggcattagtagaggctggggttagggtccagtaagcagggcaggtgttctttgtaaggtagaatgggactgagctgagtggaatagtacttcctccttaaagttacggaattaacagtactacatcgcttctctggagtgcaaagagaaagaggagaaagatcccttttggaaaagtgcttctatcccagtgcactgccatctcccctgtattccaaactaaaaacttttgggtccgtaagtcttatctttttttttttttgagccggaggctcgctccctgttgcccaggctgcagtgcaatggcgcgttgtcggctcactgcaacccccgcctccagggttcaaggagttctgcctcagcttcccgaggagcggggattatagatacgcaccactacgcccagctaatttttgtatttttagtagagatggggtttcaccatgttggtcaggccggtcttgaactcctgacctcaagtgagtcatccgcctcggtctcccaaagtgctgagattacaggcgtgagccaccgtgcctggcctctaaaatttttttaaaaattatttttat

SEQ ID NO: 4571 - DNA, 6000 bp, Homo sapiens
attgcaacaatgaatacagtctgtcctaaaaaaaacagtgctcagccaggagcaatggctcacacctacagtcccactggtttgagaggtcaagacaagactgcttgaggccaggagttcaagactagcctgagcaacatagcaagacccctagctctacacctgtgcacacacatacacaaattagctgggcgtggtgacacgcattagttaatcagctactcccagctactcagaaggctgaggtggaaggattgcttgaggactgctttagcctgggagttcgaggtcatagtgagttatgatcgagtcactgcattccagcctgggtgacacagcgagattccatctctaaaagaaaacacaacagtacaggattatccaactagccgatgaaacatgtatttagggcacacatgcacagactcgagggaaaacatttggaaaaaataagttcaaaaataataattaaaatatatttcaccttagtattttatttttaattatatttgggaagagaccttatgatcttctcagtgcccagggtttctgaaggtcttcatctagtcctgctagcccagtaggaaaaaaaaaaaatcttctcctaaaaaccggattcctctcctgttttctctgatatgaattcattcaggtatctaagaaaaaaatctgcgagctgccccccaattccttcttcttcccaatcttccacacccagtcatctttgtatttgacaaagatcactactgcctaaatgagaagaatggcctgaaggggacaaaattgggtatacaattggagaccagttagaaagctgtaatacgagtggagataatgatgaactgaattgaagtgtagtagaggggactgaaagatgtgtaaaaagatatgaaaagggggaaatccatggaacttgcaaagtaaacgcgagataaagagggagttactgaagatagttcccttatttttggcttgaaaaccagttagatggtggtgctactcattaagagaacaagggaatattggagtttggggaaaagaacacaatagattgattctggtatatccacagacagaccatgtaccttctaaacactttccttacatatttttttaaaaataaaatcctttaaatttacatactattatgacattttacattccagaaaaaccaaggcatggtatggtgaagtaatttgcctaaaactgcacatctagttaaatggagaagccaggatttgaatacaagtagtctgactccagaactttgttcccaaccctatacaaacctcacggtaattcctgaaggtagatatttttacttatactttacagatttaaaacaatgaggctcagataaattaagtaacttgctaaaataaggtagcttacatgcagtggggctaaaattgaaacgtaaagttcatattgtttcaaatgtcagagtgtaagcaggtatttataattctcttataatcttttacaatgcctagcttagtattaaatgtgtatttaaagaacagtattgggctgggcgcggtggctcatgcctgtaatcccagcactttgggagaccgaggtgggtggatcacttgaggtcaggagatcaagaccagcctggccaaaaaggtgaaacgctgtctctactaaaaatacaaaaattagctgggcatggtggtgcatgcctgtaaacccaggtactccggaggctaaggcaggagaatcgcttgaacccgggaggcagaggttgcagtgaactaaaattgtgccactgcactccagcgtgggcgacagagtgagattccatctcaaaaataaattaaataaataaataaaaatgaagcacagtattggctgggcatggtggctcatgcctgtaatcccaacactttgggaggctgaagcaggaggactgctttgagccctggagttcgagaccgagcctgggcaacaaagtgagaccctgtctctagaaaacaaaacacaaccccaaagcaacaacagtattattattactaattctactaataatgtaagaacaggcttagctcccattcacctttcacagaaagttacttgaagatgtaccacaacatcaagtataaactagaaacaaaaatgtggtttcaagagaatagtaaaattaagtcccaggacaaaagtcttcctattgtactagagattggaggaggtcagtgagctttgggagagcagtcctcatggggaaagctttgaaatctaaaaattagatagtacaactaagagcttagagaatttgggaatataacaaagaaaactagtagaatctagaaaagatgttatctgaacttgtctctagcactgttccttttttttttttttttttttttttgagaccgagtcttgctctgtcgcccaggctggagtgcagtggcgccatctcggctcactgcaaactccgcctcccaggttcgcgccattctcctgcctcagcctcccgagtagctgggactacaggcgcccaccaccacgaccagctaatttttttgtatttttagtagagacggggtttcaccgtgttaaccaggatggtctcaatctcctgacctcgtgatccgcccgcctcagcctcccaaagtgctgggattgcaggcgtgagccaccgcgcctgacttctagcactgttcttaaacaaggggcatagtgtcatgacatcattaccctagaaaaggaagtgtatcctagcagtccatggttgtaaacatttacacaggaataacttaactgcttattaatatatttcatattttctcattttttcatattttaacatctctgaatgggattcttcttacaatcaatggtgtgtcatggtttaattagttattttttcctctttagtagtagataaaataatgatgcgtcttacaatgaatagcatgttgaatttgatgaattgtgtgtgccaagcactgcttgaaatgctttataatatacttttcctcatccagtcttcatagctgatgttaccaccattttgaaggctcaaagatgctaaacaataggttctaggactgctgtcaagtaagtggcagagcaagaatttaaaatcaggtctgatttccaagatcatgctcttattgttatctcagcacttaccttgggtgatacaaaggtgaataaaaacctatccttgtctgaactgctcaaataaaggtctagctcaaatatgatctttctgaaacctttccaactccccaggaagaatacatcttgttttcatctgtaccccctcaacattttaagaatacctctataatacctataatcttattatattatataatctccctgggcccttagaagtcaggaatattctcttaaccatccttttgaccctacagtgcctaccacagttcttgacatatagtagaagctcaataatgtttcttaaaaaggagacagggtctctgttgctaagtctgggagacaagaaatgcacataaagctaaaaaaaagtcaaaagtagtgtttaggagaattatatatttaagtgcagtacagtttaaaagaaccaatgagggccggccacggtggctcacgcctgtattcccagcactttgggaggccgaagtgggtggatctgaggtcaggagttcaagaccagcctggccaacatggcaaaaccccgtctctactaaaaatacaaaaaattagctgggcgtggggacgggcacctgtagtcccagctacttgggaggctgaggcaggagaatggcttgaacccggaggcagaggttgcagtgagccgagattgtgccattgcactccacctgggcaacaagagtgaaactccatctcaaacaaacaaaaaaacaccaatgataggaggaagtacaagaggatacagctcagccagcttccaggttttcacccatacacacacacaccccagtgtgaaaaagctgaaaccgtctacaatggctgaaaccacgctgctgagacatttttgaattttaattagttagcaacacttataaattaagtttcacataaaacccaggatttctggattttcctgagaaacgaagacatctcagaaactgggtgctcattctcctagagaaatgggttggatttgggtatcaaattctcctttcagatgaacttaatgctcacttatccatcgtagtaacttccaccatttgtttaggctcagcttgcataagataatttattttctctcgccagtctaggcatctgggtttaagaccccttctctagatacattactcactgcactatcacactatgaattttcaggcatccgtgctttgacttccactttgcctagaaagtcctttgctatctccaaaagtactcctactcccctaaggcactgcttcaattcctttcattagcttcttctgaccactctctcaaccgtgtcacgcagcactgtggtaatacctctattaaaacccttatcagagcgtatgcacaagcttctcctcttcgcgctgacgttcgctccttgaggccagcggcccacaactaactcatttcgcggttccagcttcacgtccatgccctggcacctacacccagtcgttcagtacctttgcggaagtcagtcttcttacttcacggcaaacccaagctaaactaatattacgaccacagaagttgggctgaggtagaagtcaagactatcccaataactggattctggccgagaaaaaggcgcgcgccagcaccccagtcagtaaaatctaccgggcaaagttcgccgccgccactatcctcctctggctctgaaatagttccaattctcgcgagattcggcctgactaccagcccttcagctccagtgagttgcgggttggtttcctctagactctcgtggccacaccgttctccgatacgagcctttccggtgctatgccccggaagcggaagtgcgatcttcgggctgtcagagttggtctgttactcggtggtggcggagtctacggaagccgttttcgcttcacttttcctggctgtagagcgctttccccctggcgggtgagagtgcagagacgaaggtgcgagatgagcactatgttcgcggacactctcctcatcgtttttatctctgtgtgcacggctctgctcgcagagggtgagagcgggtatttctcagacgtttgatcagtccccgggaggaagggccccggggtcccctgtgccaccaggggaaagatcgcgagccttacttgcttgagaggctcatctactccacttcagggaatctctgggcaactcgtgaacaggagcaggaggggagtatggagtcgattgccgagttttctttggtctcaggtagatttcacttgggtatttgtggagacaccttcacatcatgttactgttgttttggctgaagagtcagttgtattagcctttgaaaaaagttaactatgggtaaatacaaagcgaaaagttggaattcctccttctccaacagtaaccactttgtttgttgtgatcattccagtcatttctctattaacatgttgcttttaatgttttaggcataacctgggtcctggtttacaggacagacaagtacaagagactgaaggcagaagtggaaaaacagagtaaaaaatgtgagtatggcaacacattagaaataatttcaacacgtcaagctcattaagtccatgttcacaataaatattttaagagcaccagctgatacaaagatgaacctgacttgaagcctatttagaaatagaagacttttatgcaaaatgtgtaataccaactagagggaagtgaggggcgtagcagatacatgttatgtgctgtggtggttctaaagaagaggttcaatctggcgcagtggcttactcctgttaatcccagcactttggaaggctgaggcaggactgaacttaggggtttgacaccagcctgggcaacatagggagacctcgtccctacagaaaaaattagctgggtatggtggtacac

SEQ ID NO: 4572 - DNA, 6000 bp, Homo sapiens
tcctccttgtctctgttttctctaaatactaggataaagacagttgatacttacaactagattataaatttgaaagcaaaagccttcatgtctttgttctctccctacgttttagaatatctagtacaattttgcctgtgtagtacatgcttaataaatatctgttaaataaagtctctaatgcataaggacaaaagagtagctacttaccttcaccaagagctttttgaagtggagcaggctgggatatagaaaaggagagagcactgtgctgttctagtttacttactctgggtaaaaattgcttcagaaccataatcacaactcctttccctccatctacctttattgccacctttttttcacttcctccctttctcctaattagaagggttgggctctgagttaatgaaagtaaagaagagaaccatttttattatttatcttttatcatttcaagtccaagccaaagggtttatagatggaataacttgtgctggactagattattctaggcccgtgtgggcccattccatatccctcatctactgtagaactcagctagtcattagtgaccgtagtttatttctataattcagattctaggcttagtaccatacatttgctaatgcattcattttccccaggtgcaggagtagccctgctgaatgaccatatttatgtggtggggggatttgatggtacagcccacctttcttccgttgaagcatacaacattcgcactgattcctggacaactgtcaccagtatgaccactccacgatgctatgtaggggccacagtgcttcgggggagactctatgcaattgcagggtgaggatttagaaacgaatccagactcaatatgtagccagagcaagagtctatgtgatctgatcctcatttttggacagagacaagacttgggtaggggtagacatctccagtggcaacttgattttttttattagattttttttattttttagagacagagtattgctctgtcacccaggctggagtctgagtagagtagctgggaccacaggtgcacgccactgtgccagactagttttttatgttgcctaggctggtctccaactcctgggctcaagcaatccttccacctcagtctcccaaagtgctaggattacaggtgagagtcaccatgcctggcctccagtggcagccttaatgaaggacttgtgtggaaaggaatagaaggctaatttctttctttctttctttaaattttattgagacagggtctcaccatgttgcccaggctggtctcaaattccctcctgggcttaagcaatcctcttacctcagcctcctgcatagttgggattacaggcacgtgccactgcacgcagctgactcatttctttcttttgcttctttcccactcagatatgatggtaattccctgctaagtagcattgaatgttatgaccctatcatcgacagctgggaagtcgtgacatccatgggaacccagcgctgtgatgctggtgtttgtgttctccgcgagaagtgaccattgttggagcaccatccagagctagtgaccagtccagtggacagttagtgggagaatcaaaaatcctttccagaatgtctgtttctcactatgtgcaccgggtgattacaggcaccagtgcagtgatgattgtacttatttgacacatactccccgtcgtcctggttcttgttcctgagaagggtgggtaacagatattccaggaaaaagaatgcacattgaatggatgtgagagaccacattgcctctcccactgctttggggagcactttcctgtcatttctaacttaccacatgcttggtgtactatatgtatgttgtgcctcatatgttgcaaagaactaaggtgagtatagcctactagatatgggcaatatccagcctagatgattggaaagataccagtttaagtaaacttggtaaaatccaagtctttttttttttttccaggaacaactacattttctcatatacaggtagctaggggcaacacagttccattctagagggaaacaaaagggagagccccacaaaactttggggacaagggagagagagactcatctgacacttcttttggaggtcaggatttgtatatcagaattgaagttagaattaagtgaattaaactgaatttgattgtgagtgaacctagaacagcactgaagtattacataacctggaagactgagaagggtatattatttgaaggatctttttatttccccgaggtctttcgcactggagacagcataaaagagtgaacaaatgttgggatgagagaagatgacatcaatgtgggagttcagtataactggggataaactagaagaacctgtgattttacagtcatcttattacctgccagggctcatctagccatggcaatgtttgccttgaatgggggtgaaagcctttctttgttggatcaaatactactacactattacacttccacactatttatttggggatgggctgggagtgacagtagcctagtagttcagctacctgattactgccccattcttttagaagcacatgtctgccaaggagtggtttgtactgctgtgtttggtacatctagtcttttttctgctataagttttccttacctgtcctttagtgtagattttattcatcacaggacagaataatcaaggacaaccaaaatccttttgttagtttcagtacctcagctatcaacatttctgagctaccattcaatgttcctctgtgtcatggagtgaaattcttgttttgtgggtattaggagtgtgggaatgtgataacctaaacaacctttgctctgaaattccatttttccctctttccctgagttgtattgacctacagagttaatttcctttgtatttttttaagaaaatattaaaaatcaacggtctcaaatgccgagagtttgtggctaaccaacattgcctttagtagatatttgggagggaaagatgtagggatcagccgtagctcctgtctcttcaagctgttcatcttgtgtgtttgccaactagttccgctatttctatgttagacacaggtaagaggtagccactttacactttggagattctcatcagtaaaatatttacctgatttgccatattcattagcccctctgacgcttggagttacttgaaaaaggaatacagaaaagatcttgaattcacttagcacgcgcttgaatttcagggtttcagtcacaccagtccttttttccatttgctttgaattgtggcatgtgatataaacagctatgcggaaggcctgcaaaactgaaacagtcctgatgcttccagagcaaaaggaaggaggagccacatgaggaagttattttccttaaaagatgcctaccaactttggcagatggattgtgcatgctaattaaaccaaagcctataaaacgtgacttttcctatctcaggaagagatccaggggagggtgaaggactgatggctcctatgctgtcttcagtgctgactaatgagtttcagaccaacttcacaaatagttcatacactgaagccacaatggtatgttctacagaaaaatcaacacgtaaaacagctcctttttcactcttcacaatcgtacacactttcatgtgctcacatacatacacagagatacccctaatttggtggttcatcttatttttttaagctcccataactggcaaccagctacttagttatctaacctgggaaaaccagcagttgctttgtgtcacccccatcacaatacagacatccagctagtttctaagttctgtacaattttaattgtttcaagtccattcccatatctttgttccctctgctagcttcagggcctttctgagctagactgatgaggtaatagctacctgataccttacctctactctttttcctctcttcaatctagcccctctatttattcataggttatctttctgaagcacagataggatcattacagtgcttaacatacagcagacagtaaatatcgaacagttatttctggcctaaaattccacagattcccattgttcatgttattaatgttaaattccttagcatgacattaaagccatggagctctgggcccactctgccttacctacctctactaccacttctccccacgtgtaatgtgggtcagccacagtggtctactaaccattcctaaatttgttctcacccttgttcatatataatactgttctgtctgaaataatcttgctttcctgacaatcctagttaattaagagcagtggctttagagttgtgctgcaacctttctgatctttacctttctcattttgtgcacaagcgtgccgaccccgtaaggaaactgatgatttagtaagtttctaaaggcgctttgacacattttgccgcatagtaaatggtcacaatgagtagaagagaccagcaattaaagtttccacgcatctttttccaataccgaaaagatacatgcccctctaagtagtttcctatagaagaagctaatgtggctaaaacttgatgggaagtccgacccagattcccttcatattgcccccaataatgtccccatttattcaggagactaaattcagatcccagaaaactaaacagtaaggtcaacctaatgatttgtctaggttttaagtgaagcccagtggccaggtgggtatggagatgtgtcactggtgccaagaagtgtccctgtcacaaagcctgccgacacctagccacttaggttaggcaatgaatgaaggcgcttgcgcagtagagtccagagcggggaagcgggcgcctgcgcagagacatagtgaccgtccgctcgccgccccgcctctgccaagccgcgccagcgcagtgaataacgagccagcagagacagcgtctgcgcagccgtggctgaggagcctgtggcggcagcggcgatggaaccagcggagcagccgagcgagttagtgtcagccgagggccgaaaccggaaggcggtgctgtgccagcgttgcggctcccgggtgctgcagccagggaccgctctcttctctcgccgacaggtagggaggcaggttggaggccgtttacacccacagtctcccccgacgagccgccgcagtcagaatctgaaccccggctcttcaatttccggcaaccgcgccctcctcgcgcggccttaagccccgcccctcgggcctcagctcggcgaggctccgcccctggggccgctgaaggctagggagggaaccgggtcccgccccggcatcttttgccgcgggaacccttccctgggccacccggcccagccagcccggccctctgcccccgggggggcttcgagcgcgggccgtgcgccccgccgccgtccaaggccggtgctccgcgggcgcgtggaagggaggcgccccattccggctctcggagctcccgccagcttgcaggacccggcaggtgcctctcggccgccgctcaccgcgggtgttgctgggttcctttcccactttagacctcacccgccagtcctgaattcaccgtctcatttatgacgggcacctatctgctccacagaggatccccaggaacaactggtgttggggacgcggcaaaataaccctggtaacctacccactttaccgaggcactggaagcctgtggttttccagatgaatcatatttcaagtgcagtagatccctgacgtcctggaagtaaatttcgaagaaaaactttttttttcccttcagtttagggattttaatacccttcctaccaccatcatcgcaagtgagaaagttgaaaaaaaaatttatttcggtaaactgtgttgaagtgcaaatataatgtcatttcaaccatagacacatcctatcattcaaaattatttctaaaaatatgcagatcattttattatttcacgtgcttgaacagatggtgaagtgtaatgtctagtagaagagcaaga

SEQ ID NO: 4573 - DNA, 6000 bp, Homo sapiens
ggaagtgttcatttcattgtactattcaggatattatttatcgatcattgttggtgtatagcaatgtagacagtagctctcacgaacatttcaccatatttgggattctaaggtgataagtatgtcacttaaggaactgtggtgctgggaaaagggtttcttgctcacttgttaatcatttagtgactaatcaatctttaaaatatatgaagggttgaaaggtgtggtaccctaaaatttcttctcctctcctcattgcactttttggaatgttaaacattatttgttagcaccttagagcatggttagcagcttagaaaaaatagaactctgatcattttgcttttcccccaaccctttgggacagtactgaggaaagtattggggtggggggtttggatttggattgttttttgttcaataaagagtaattgggagttggagttggttatgtattttcttaaaaaggggaatttcttggtccacgtgtgcttgtaatgcatcatccagcattcagtatttctgttcttacaagtaactggtctaaattgaagctaaaagaaatctttttgtgtctaatctctttagcaggaggagcaatctcagaactgttatgaagaccttcgaagttcttcattctttctcactttgccatcatgtggcctctggacactgtggtcagtcatttgaaaattgactttaatttaaaacaaaggcctgtgcctcccacccaggaggtgggagggtgaattttatgtttaaatgaagaagtgaattatggaagaagagtatacgaccttcccttccctttcaagcataagtccaaatagactctcaggaatgaagatttgtgaagacatcagataggaattttgactcatttaaactttgatgcttagttatgttgctggagaaaagatacttatgttttgctcatctaacttcattgtacccagcgtcattttgacatgtcatttcctatctcccatttgccttcggtcctcaatgcatgtctttgagtgacttcttatctgaaattttgctactggtatcctaggaaagcttttgttggatactctcattttaaacttctcctctccccagatacctcctatatttccatattgtgtgcaaaggatgggcagaaaagaaagtgcttgaaagatttcaaattttcagaaagggaacaacgaaggccctctcttcctctcataccacgttttgctcaagaagctgggctgtaacaattcagggttttcccttgttttcctctcattgcatgtttccctccaatattggttcattgtcatcaatcatggtttttgaagatagctagttttatccatctccagcaaagaatcatcaatagtttatattgctttacctgtgctggcttccagagatggaaacaaacccaggtgtctctcaacaagctacttttttactggggtgggggaatctatgcaaggagtaaagtaaaaccatccagaatcaaagcagcaaccacatagttcaaatcaaagatcaaggtgaattttttgtatcactgcctgtggaaatctatcctcatcagtcattgcatttttccctgcctatacctgtgctcctttttcttactgtgttttcagtcacttcctttctgtgaaaggttgcttagctttttttttgacatttgttgttctttataaaaataacagattggatagatgtgtacatttggtgtttgaaattctctgaaaatcccattaggaaaccaggtgtgaaaagggctcagtagcttctctgagtggcgtttttagctgactggaagtgcttaatctggatcgtcttttttttttttttttttttttcaatattttaaaaggagaatttaaatactgtgcttactgtgaaatatatcagttggtgagccgggcgtggtgggtcacgcctgtaatcccagcactttgggaggccaaggcgggttgatcacccgaggtcaggagttcaagaccagcctggccaacgtggtgaaagcctgtatctattaaaagacaaaaattagctgggcgtggtagtacatgcctgtaatcccagctacactggaggctgagtcaggagaatcacttgaacgtgggaggcagaggttgcagtgagtggagatcgcaccactgccctccagcctaggtgacagaatgagactctatctcaaaaaaaaaaaaaaaatgatatcagttggtggatgctcctataggtagccaaacacattgattacctgttagattttaggatagaaatcaaagtagagcacgtcagcaagagcctctttgtctcactccatcatttaaaaccagtatattcagtagttgaagaaagagctctccctgagtcagttgcaaaacgtctatatttttagatgccactacttttttcttaaatattcattttgagactgtcatgagttagaccagtggttgagattagtagatggctcactagacatgtttttgttttgcagacattatatccattccagtcctctgcactgtacactgcagcagtgtgcaaactatgggacttagagggtttctgccatctttccacgtgtgaagtagcttggtttcctctgcctgtgcatttggatgtttgtgctatgtccacctcctaaactggctactgagaaaatcatcttcagccctgtcagattgtctctggcagtagctcctaataattatttatgtttttggaatttttttttcaacttttaaaaaaccttctatccatttcaatttgaattatttgatttgtacaatatatgtatattctcttcttcctttttgtcatccctgccctgccacccccaaaattttgtttttaaaaatattctgggctgggcatggtggctcacacctgtaatcccagcacttggggaggccgaggctggtggatcatctgaggtcaggtgtttgagaccagcctggtcaacatggtgaaaccccgtctctactaaaaatacaaaaattagctgggcgtggtggcgggcacctgtaatcctagctactcgggaggctgaggcaggagaattgcttgaatccaggaggcagaggttgcagtgagctgagattgcgccactgcactccagcctgggtgacagagcaagactccatctcaaaaaaaaaaaaaaaaaaaaatctgtagttttgtacaagatgagacttagccttgggtacttcttgctgaagctttaatgctttgtaaataaaatcggatgtttattaaagaacaggtgtagatgtttatttgtaaacactgctcacttctggaactctctggccactttgctttagtacaaaggaaagtgtgatttcctgtgttgatactagatctttcagtgtggaaagatagatctggaaggggtagggagtggacaggtagtctagatttctgcctctagatgagattgtaaataaatgatgcaagtggaaaagttgttgatcaaaaagatcatctaggaatgatctgtcttccaattatttaactcaatatagttttgcaattactctgaagaggccgtagggctaggcattctggaggttacaaaaatgcatgctaggaagttcctgtcttccaaggacctttcttcaagtctaagtaagtacggttgaattcttattagcctttttttttttttgaatgaagcagctttaaaatttattaaatgctcgttgtctcctaaagataagatgtttcacaaagtctatgtaagtctttgattttaatgtcaaatttgagggtctacttattaatcttatgtgattgagaactccatctttgacatcatagctgtttcatagcaaccttgacctacgtgaataatgagctctattctgtaggataaagggagtaggccaagagtcagggagcatcatgcatcctctcactcaaaatatatcttcagtatccttgggaaggaagagtgcctaaaagggggagaggagctgcctttaacacaaccttaaacattctgatttgaaaaggtcatcttggcccttgtctttatgaatttccatttctatttaaaattccttacacattgaacagtgtttcacactttacaaagtgttctcacatacagtatatcattcagtgctctaagtgaccttcctcagataggcaaggaggtcttaagttacaaaggaggaaacagaaattcaggaagggtaagttacttgcctcctagtccagagttcttaatcctttttataggaagtttaggaacattaaaataattcaagttaatcttcctttttttagactttagtatttgttttatttggtgacatttaactggggcttttgaaacccttaatttagatcctagtttatagaggggaaggggaagggtgaggaagagtgtaacttcactatgcatttgaggtaatctggaaatttacttcagtttctgaagtcttttcttctttgtcttcccaagaggtggatttaaagtcattaagagaacacgaaaacggccagcgcggtggctcatgcctgtaatcccagcactttggggggctgaggtgggtgaattgcttgaacccaggagttggagacaagcctcgacaacatggtgaaaccccgtatctacaaaaaatagaaaaattagccaggtgtgatagcctgcacctgtagtcccagctacctaggaggctgaggtggcaggatcacttgagcctaggaggttgaggctgcagtgagctgtgatcatgttactgcactccagcctgggttgacagtgaggccctgcctcaaaaaaaaaaaaaaaaaaaaaaagcgtgaagactagtaggtaaggtggttattttattaacaacgatagttagtaaagcaacaccattgtgatttttttcctgccttgtggcctcacctgtttataaggactggacttttatttattaagttgtgttgttttattgacaatacatgcatcatatcttttgactttgaaggatatctcatgtcaaaggaatcaagttatgatttatagaggattcagctggaataccttgtgggtgctggctgagggtggcaaaacgcctaccgagacatgaaggttttagccactagttttgtccttgggagcctggggttggccttctacctgcctttggtggtgactacacctaaaacactggccatccctgagaagctgcaagaagctgtggggaaagttatcatcaatgccacaacctgtactgtcacctgtggccttggctataaggaggagaccgtctgtgaggtgggccctgatggagtgagaaggaaatgtcagactcggcgcttagaatgtctgaccaactggatctgtgggatgctccatttcaccattctcattggcaaggaatttgagcttagctgtctgagttcagacatcttggagtttggacaggaagctttccggttcacctggagacttgctcgaggtgtcatctccactgacgatgaggtcttcaaaccctttcaagccaactcccactttgtgaagtttaaatatgctcaggagtatgactctgggacatatcgctgtgatgtgcagctggtaaaaaacttgagactcgtcaagaggctctattttgggttgagggtccttcctcctaacttggtgaatctgaatttccatcagtcacttactgaggatcagaagttaatagatgagggattggaagttaatctggacagctactccaagcctcaccacccaaagtggaaaaagaaggtggcgtcagccttgggaataggaattgccattggagtggttggtggcgtgttggtgaggattgtcctctgtgcgctaagggggggcctgcagcagtgacagcttcaagaacttaacagccttgctcctgaagaactggctgcccaggaagccaagctagctttttaggggagtgttccagctgctggtagtggatcagcttagagggaacactcccacagccaaaagaatgagtgggagaaatggag

SEQ ID NO: 4574 - DNA, 6000 bp, Homo sapiens
agccgagatcgtgccattgcactccagcctgggcaacaagagtgaaactccatctcaaaaaaaaaaaaaaaaaaaaaaaaatagccgggtgtggccacgtgcacctgtagttccagaaactctgggggctgaggtagaaagatcacttgagcccaaaaggtagaggctgcagtgagccatgaacacacaattgcactctagcctgggtgacaaagcaagaccctgtcttgaaaagaaaaagaaagaggccaggcacagtgactcacgcctgtaatcccagcactttgggaggccgaggcgggcagatcacgaggtcaggagatcaagaccatcctggctaacacggtgaaaccccgcctctactaaaaaacacaaaaaattagccgggcatagtggtgggtgcctgtagtcccagctactcgggaggctgaggcagaagaatggcgtgaacccaggaggcagagctggcagtaagcaagatcgcaccactgtactccagcctgggtgacggagcgagactccgtctcaaaaaaagaaaaaaagaaagaaatgtctactgatctcttgaccttttttttttttccttttgagacaaggtctctgttgtcgaggccagagtgcagcctcaaagtcctgggctcaaggaatcttccagcctcagcctcctgaatagctgaaactacaggcatgcaccaccatgcccagctaattttttaaattttttgtagagatggatcttgaattcctgggctcaagtgatcctcctgcctccacctcccaaagcactgggattatgggcatgacccactgcagccaggcatttcttgactcttctgtgtttccttcattgtcagctaaataattctcaaaagatggcaagatggccaccaagacctccaagtttataacttacttgctcagccagcccagaggggaataaaaatttccttcccaatagttctaacaaagatcctaggattgcacctcatttgggctgacaggtcactaatcccctcctactccccaaccaccccaaccagtcactagccttaggaggcagggatattggaatgctttgatttgccaagcctgtgtcttctgcccacaaaggaactgcaaagtaaggcaactccaccaaaccacacagactgagagagtcagaggaagagtagttccccaagggaaaaatcagtgttcttatgaggaggaagaatagatgctgagcaggcaaatttagtagtccaccactacaaggtgggctggagccacaggtaataggtgggtcacattcatggcagtccatacaagtggacttacctcccccgctttttttgagacaaggtctcactctgtcgcccaggatgaatgcagtggtgtgatcatttcactgtcatctcaaactcctgggctcaagtgatttctctcccttcagcctcccgagtagctaggactacaggcatgcacccatcatgcccggctaatttttaaattttttgtagagacagggttcccctgtgttgcccatgctggtctcaaattcctggacgcaagtgatcctcccacctcagtcttccaaagtgttgagaaagtgttgagattacaggcatgagccactgcacccagcctctaacagaatttctttttttttctttttttctctataagaatttctgtggctggaaaaaagcactcccagtcctgctttcttctttgcttgttgagccagggatagtcattttccatccctgggccacttttccccttgaagggaaggactgacttggtgtaaaatctgtcataattggccaggcgaggtggctcaagcctgtaatcccagcactttgggaggccgaggcgggtggattacgaggtcagaagatcgagaccatcctggctaacacggtgaaaccccatctgtactaaaagtacaaaaaaattagccggacgtggtggcgggcacctgtagtcccagctactcaggaggctgaggcaggagaatggcgtgaatccgggagatggagcttgcagtgagccgagatcgcaccactgcactccaggctgggcgacagagtgagactcagtctcaaaaaaaaaaaaaaaaactgtcataatttaaaaatatacatctgttgaattggactccatattttcattagtgcaggctacataccttggagtcatccttatctcttctcttcctcacacactcctatccattttgtcaacaagtcctgttttgtttttgttttaatttttttttagatggggtctttctacatttcccaggctggagtgcagtggcactatcacgtctcactgcagcctcaatttcccagggctcaagtgatcctcgtacctcagcctcccaagtagctgggactacaggcacatgccaccacaccttgctcattttaaatttttttttttgtagagacagggtctcactttgttgcccaggctggtctcaaactcctgggctcaagcaatctttccacctcagcctcccaaagtgctgggattacaggcatcagccaccatagtcagcccaacagatcctgtagactttaccttcaaatccagaattcaaccatgtctcaccatctcacccaacctggtgcaaacgatcaacatctcttgctaagatcattgccacagcctcctgcctggtctccctgcttccaccttggtgcccctgcagtctattctcaccatacagctggaatagttcttttaaatagaagttcaaaccctataatagctctgcatctcattcaaagtaaaagccacacagccctacatgatctatcccttctcatgtcctactcttatatctatacctgtgtcacacttgcctccttatttctcaaacacaccctcttggctgggcgtggtgtctcacgcctgtaatcccagcactttgggagaccgagactggcaggtcacttgaggtcaggagttcaagatcagcttggccaacaaggtaaaaccccgtctctactaaaaagtacaaaaattagccggtggtggtggcacgtgcctgtaatcccagcactttgggaggccaaggcaggcggatcatgaggtcaggagattgagaccattctggctaacatggtgaaaccccatctctactaaaaatacaaaaaattagcaaagtgtggtggcacacacctgtagtcccagctacttgggaggctgacgcaggagaatcacttgaaaccgggaggtggaggttgcagtgacccgagatcacaccactgcactccagcctggggacagagtgagactccgtctcaaaaaaacaaacaaacaaaaaaacaaaaattagaccaggcgtggtggtgcacacctgtaatcccagcattttgggaggtcgaggtgggtggatgatttgaggtcaggagtttgagaccagcctggccaacatggtgaaaccccgcctctcctaaaaatggaaaaattagccgggcatgctggcgggtgcctgtaatcccagctacttgggaggctgagacaggagaatcgcttgaacccgggaagcggaggttgcagtgagccgagatcgtaccactgcactccagcctgggcaacagaaagggagactccagtctcaaaaaaacaaaacaaaacaaaaacaaaaattagccgggcatggtggtgcacgcctgtaatttcagcttgttgggaggctgaggcaggagaatcgcttgcacccagcaggtggaggttgcagtgagccgagatcgagccactgctctccagcctgggcaacagagactccatcccctcaaaaaacaaaataataaaataaatacaccctcctgcctgagggaccttgcactaactattccctctgcctgaaatgccccctttctccagaaatctgcaccactgactcactcatttccttcatgtgtttactcaagtcaactctgaagcctgctctgcctgccctatttaaaactgcaaccccatccccctttcctgtttttccttcacaccattcccatctaacatactacagaatttaccaattttgttcatgtctatctcctcccacttgactgtaagctctatgactattaatgaaatatctactaattcattcaattaattgaatactgctattaagtgccaagcactgtgctaagcaatggagctacaagatgactaaaactgcttgtaggtcttgtgagggaagaatcctaatgacaataaatgtagctcatttagtcaatgcttctccaaacatcgtgatggctaatactaaaacagactcagttctgcatgctctatttcatttaaccctcaccgaaacctacacggtgaccatcagcagcctcatcgtaaagcataaaaaaacaagattgcaaggctgggaaatggcagtcaggatctgaaccacggtgttgacaatgagaacggtgagtaacgtcaaatgtgagaaatatttaggacttaggctcacaaagactaaggcaaagatcggatgtgggggccgagggagggaggaaatgactcctggattttgactggggtggactaaagcgcagtgaggcctaagagaaggatgaagcgcaacgtggggctgggctggaggtgcctgcggaccggtcagggatatggtccacccctaggggagcggagaggcggctccgcaccctcctccggtcgccgccgccccggtccaggagatgctgagagaagacacgcacgggaagagcaggaggtgggttccgttcccctccctcttgagtctcttcaccagcagctgcaggaagggcgtgggggaccgagagacaaagagcgcgcaggcaccgcctccgtccgggcggcccctttaagaagcgcgcgccagcttccagcccgccttgtatgcaaatgtagcggcgcggcgggagcgcgcggctgatacccgggactgggctgcggcggttagtcctctcccggccgccgtcgcctccgacatattgcccgcaggagctgcggcggcgaagcggagagcaccggggggaggagatgggtgagcagagcggctcaggctcggcctggcaacgagcgggcgcacgggttaggatggccaggctgctaattgctgctccacgcggacaggagcccggtgacgggagggggaggggatgcgagcgcagacgggatcccgccccctcctgtcgttttgcggggtggggcctctgttgtgggggcgggacattggacggtgggcggggcttctaagacgaagccctgtgggggcttgggctttcgtgaggaccagctcgtcggggctagaaaggggggcgggacttaccagtgggcgtggcttcagcgctaagggtggagattctgggcagggggcgctagtgcagtcggcgtttctgggttggaggggttacactgggggcggtggagcggggagacttccgactgagggagcccattctggagtggggcttctgggctgagagggcttttattggcttgtgggcggggtttctgggctgacagttgtgtgtaggcggagcttctgggctgaggggctttatgtgggtgcagagcttctaaagagaggagagtgggtgtgggcagagcttctggactggactaagggtgtttgtgtgggattttctaagccaagtataacagcgtatgaacagagcttctggtctgggggtttatggagggcagagctcttcgccaggtactttttagagacttgtggaggtttataattttgggcatacatccaagcccaaaattggctccgaagtgtgggaaacgcttccgagctgagatgctacggcgtggggtgtatgtgaatggaggctgctgtgttactgtgaagaggtatgaacaggttataactttttaaaaatatgtatatgtatgtatatatattttttaatagagaccgggtttcgccatgttgcccaggctggtctccaactcctggtctcaagcgatcctcccgcctcggcctcacaaattgctgagattacagtc

SEQ ID NO: 4575 - DNA, 6000 bp, Homo sapiens
ggcaggagaatcgcttgaacccgtgaggcggatgttgcagtgagccgagatcgcggcattgcactccagcccaggtgacagagcgagacttgtctcaaaaaaagtaaaataattcaagtataagcctaagtagttgatcccaagatcactgtctatcccagttagagcagcttgcatcatttgatctttattaaagacttttggctgggcgcgatggctcgcacctgtaatcctggcactttgggaggctgaggcgggtaggtaacctgaggtcaggagtttgagaccaggctgaccaacatggagaaaccccgtctctactaaaaatacaaaaattagctgggtgtggtggcagatgcctgtaatcccagctactcaggaggctgaggcaggagaatcgctgttggaccctgaaggtggaagttggagtgagctgagattgcaccattgcactccagcctggtcaacaaagcaagactccatttcaaaaaaaaaaaaaaaaaaagactttcctgtttaaaccagcatgagtgactatacgataatacagggcaaagggttatttttttagcttgtagtaatcattttaacttgatatctctggaatttgtcccaaccctggcacagacctgaaagcactgactttgttttcaaagctttttcaattcaagagtgcctccaaaatggtgagtaggaatgaagacttccagacacttctattcttgcctttacccagaattctcttgcttcagtgttttccccattttcatgagcccatgtgtgaaatagggtaaggaactgtggaggagaaagttttttattagccttcctcagggtattccattctcaatctatcctttctcagtcccaaaaggcctactgagctgaactgcctaagacataatcattcaccaaatatttaaatacacacatttaaagagatacaattccagatgcaatgggagacaaaaaaaaaaaaaagttgtcagggccatcaagaagctttcacaaggtgaagggagggctggagtatctcagaacattgttacttaaagtgtggtagtgggccagcagtataggtgtcacctaggagattgttattaataaaaatgcataaattcaggccctactccagacctactggaccaaaatgtgcgtgttagtaagatctccaggtgattcttaggcacagaaaagttctagaagcactggcctggaagtggaaagtactgtgagaattcagggtaattgtgctttttagcattttacataaaattatgttgttgaattttcataatcctatgaagtaggtgctgttactatatttgacaaagaacgagatgaagtgtcttgcctggctggcacaaatagaggtggagcccagtttccaatctcttctgactagaagaatgtcagagagggacatttagtgtaaaggaataacagatggaaagttgcaggtggtatttgaagtaccaaaaataccacagttctgtaatgtgagtgttgtttgtgaaggtgaatagtgggaaatacaatttgaagtgtaggtgaaagccaggttattcaactcaaactccacagtcatatggtgctgacatttcttcatttgagtatagagatgggaaacgtgcatatttttttctgtgaataacatgtaacctacgaaaaaggcaagttttcttttctgaaagaaacttactcatttttgttattttttgaggcgaggtctcattaggttgcccaggctgatcttgaactcctgagcccaagcaatcttcccaccccagcctcccaaagtgctggaattgcgggcatgaaccgctgcacccggccagaaacttctaaaactcagaaaagttgctcctcctcacctcctaccccaaggtaaactgtgatacctcctggctttatactactgattttataccctattatatagaactgtgtctagagagagtggcctatccctctgtgaccttcttggtctactcctgcaggagtggcttctgtgacagactgcatttggaggtttgattcactctggggaaggtaaccaggataggcaagagatttaaaaatctgtcagcatgtatttgacaggtataacctgaaaaaaaagaccagaggcgtaggaaagctatctaaatggttaagaagccaaatatttacaaagcatataccatctgctagcccctgggtggtaggtgttgaacaagactcatttcctgcatcatagagatttaagaatccagtaagggactgggtgcggtgactcatgcctgtaatcccagcactttgggaggcacaggcaggaggatatttgaggtcaggagtttgagaccagcctggctaacatggtgaaaccctgtctctactaaaaatacaaaaattagccgcgctgtagtggtgcatgcgcctgtaatcccagatactagggaggctgaggcaggagaaccgcttgaacccaggaggcacaggttgcggtgagccaagatcaggccactgcactccagcctgggcaacagagtgagaccctgtgcccccaacctccccacccccaacaaaaaaaataatccagtagggaagacagacattaaaacagtacaaataataaagtaaaagtgcttttaaacagggggggtggaggggcttatgagaaggggaccaaaaaaggacagcaaaagcttcattgaggataatgtttaaactgaaacctaaagaatcaatagaagttagccaggcaataatctgtagtcccagctactcgggaggctgaggtaggaggatcacttgagcccaggagttagaggctgtactgtgcaataatcgcacctgtgaataggcattgacctccaagctgggggaggagggggaagctaggcaaagaacaagagtaatccaattatgtgccaaagctttgtggttcaacagcttggtgtgttggtgacattgataagactactatagctggagttgaaagaacaaatggcagaggaagagaagacttggtaggtaagcagggaccaggcattttagtgccctgttagccatgttacagattttggattttgtttgaaagacaatgaagaacctataagaatttttcaaaggcggactgggtgctatttctcatgcctgtaatcccagcactttaggagggcaaggtaggaggatcacctgagatcaggagttcgagaccaatctggccaatatggtgaaaccccatttctactaaaaatgcagagatcagccaggcgtggcacgtgcctgtagtcccagccactcaggaggctgaggcaggagaatcgcttgaacccaggaggcagaggttgcaatgagctgagatcgcaccactgcactccagcctgggcaacagagcgagaccctgtctcaaaaaaaaaaaaaaaaagaatttaccaaaggcttgaaagtaggcattgcctaagtcagtaagtcctaatagggcatgatatggaagactactgagtggaagtgactgacagatgagtgggtggatgccactattaaaggtaaactgaaggccgagtgtggtggttcacgcctgtaatcccagcactttgggaggcctaggcgggtggatcacgaggtcaggagttcgagaccagcctaaccaacatggtaaagccccgtctctactaaaaataaaaaaattagccaggcgtggtggcacatgcctgtaatcccagctactcaggaggctgagccaggagaatcgcttgaaccccagaggcagaggttgcagtgagccaagattgcgccactgcactccagcctgggagacagggcgagaccaaaaccccgcctcaaaaaaaaaaaaaaaaaaaaaaaaaaaaaaaaaaaaaagccctgtttatatcctacctccttgctgggtgcagtggctcatgcctgtaatctctgcactttgggaggccagggcaggtggatcacttgaggtcaggcattctagaccagcctggccaaaatggtgaaaccccatctctactaaaaatacaaaaaattagccaggcgtggtggcgggcgcctgtaatcccagctactcaggaggctgaggcaggagaatcgcttgaacctaggaggcataggttgcagtgagctgagatcgcaccactgcactccagcctgggcgacagagtgacacgccagctcaaaaaaataaaaataaaaaatcccatctcctcacatttccattcaacctcaatacaactcagttttttttattatgtgaaaacagctgcaacagctgctgtccatttgaattgttggaaatgtagatctacactaaccaagagagaagccactagccacaggtggctatttaacttttttttttttttttttagatggagtctcgttctgtcaccaaggctggagcacaacatcagctcactgcaacctctgcctcccaggttcaagtgattctcctgcttcagcctcccaagtagctgggactacaggtgtgcaccaccacgtcaggctaatttttgtatttttagtagagacaagatttcaccatgttggccaggctggtctcgaactcctgggctcaagtgatccacctgcctcagcctcccaaagtgctgggattacaggcgtgagccaccatgcccagccaaatttagttaaaatgtaaaatgcaatctctgctgcactattcacatttcaggtaactagtggttaccatattggacatggcagataaagaacattttcattattgcaaaaagttgtactggacagcactatgctagagccagaactagccaaagatcagacaaagcaatatgaatgaactgaaaacccaggccggtgcctggttggttttgagtaagattcattggttgggtgagtgggaagcaagctgacctttggaacagtgacatcacaaagcacagctcacaatggctctggaatacctaggcctccagactactccccctaactcatatttagattcctgaagcttctgcacatgtagttcctagagctgctgcttattaaaatgtcaacatcttcatcttctagctgggacaacctcttagagtctctctctctcagcacagtatggaattggatacaagcaagttttttgggagagactagtgcacctcagcaaacaagtttgggactattagataatcttgctccagctgtgcaaatcatcttgaggatttctttcttgattttattgggaataggaatatatgccttatggaaacgaagtattcagtcaattcaggttatactcttttgttacaaacatttatatagttataaattgaaatttgattagttctctcccatattgctgccaccagttttaagatcatgcagatgtgcaaaggcgaacctttgtctcttaagttggcaaaaactaggttatccttgaaaatctccaccaattaggctttgggcataaaaatgcttttctcacaatggtctttggcttgtcttctgtaataaaatagaccaaacatgttggtaacctgaaaagacagccttaccctcaaaaatttttgatcacttattcatctttgagtgctactatgtttatacaataggcaccaaagtagctaggatcatgagtatggcctttcttactatgccattgttctgtaactgataaggaggcatatgtattaagtcatcacaatgtgttcattattgtgttttgacaagataaggctccataagtatataggagctctttggggagtaggaatttaactggctgggattgtgagagacaggattttacatacttctgtgtagtcaccaataataatagttgacatacaatatagttgaatgctttgagaatctcaaaaattccatgaaatggatggagattattttcacatgacaagtgaagaaactgaggtgcactgaggttcagtggaaacttaaggtgacaggcttttaaaacggctttcttagagtgacaagtttacttgataaatgcagagagaagttgtt

SEQ ID NO: 4576 - DNA, 6000 bp, Homo sapiens
acaagacagggatgccctctctcaccactcctattcaacatagtgttggaagttctggccagggcaattaggcaggagaaggaaataaagggtattcaattaggaaaagaggaagtcaaattgtccctgtttgcagatgacatgattgtatatctagaaaaccccattgtctcagcccaaaatctccttaagctgataagcaacttcagcaaagtctcaggatacaaaatcaatgtacaaaaatcacaagcattcttatacaccaacaacagacaaacagagagccaaatcatgagtgaactcccattcacaattgcttcaaagagaataaaatacctaggaatccaacttacaagggatgtgaaggacctcttcaaggagaactacaaaccactgctcaaggaaataaaagaggatacaaacaaatggaagaacattccatgctcatgggtaggaagaatcaatattgtgaaaatggccatactgcccaaggtaatttacagattcaatgccatccccatcaagctaccaatgactttcttcacagaattggaaaaaactactttaaagttcatatggaaccaaaaaagagcccacatcgccaagtcaatcctaagccaaaagaacaaagctggaggcatcacactacctgacttcaaactttactacaaggctacaataaccaaaacagcatggtactggtaccaaaacagagatatagatcaatggaacagaacagagccctcagaaataacgccgcatacctacaactgtctgatctttgacaaacctgagaaaaacaagaaatggggaaaggattccctatttaataaatggtgctgggaaaactggctagccatatgtagaaagctgaaactggatcccttccttacaccttatacaaaaatcaattcaagatggattaaagatttaaacgttagacctaaaaccataaaaaccctagaagaaaacctaggcattaccattcagaacataggcatgggcaaggacttcatgtccaaaacaccaaaagcaatggcaacaaaagacaaaattgacaaatgggatctaattaaactaaagagcttctgcacagcaaaagaaactaccatcagagtgaacaggcaacctacaaaatgggagaaaattttcgcaacctactcatctgacaaagggctaatatccagaatctacaatgaactcaaccaaatttacaagaaaaaaacaaacaaccccatcaaaaagtgggcaaaggacatgaacagacacttctcaaaagaagacatttatgcagccaaaaaacacatgaaaaaatgctcatcatcactggccatcagagaaatgcaaatcaaaaccacaatgagataccatctcacaccagttagaatggcaatcattaaaaagtcaggaaacaacaggtgctggagaggatgtggagaaataggaacacttttacattgttggtgggactgtaaactagttcaaccattgtggaagtcagtgtggcgattcctcagggatctagaactagaaataccatttgacccagccatcccattactgggtatatacccaaatgactataaatcatgctgctataaagacacatgcacacgtatgtttattgcggcattattcacaatagcaaagacttggaaccaacccaaatgtccaacaatgatagactggattaagaaaatgtggcacatatacaccatggaatactatgcagccataaaaaatgatgagttcatgtcctttgtagggacatggatgaaattggaaatcatcattcttagtaaactatcacaagaacaaaaaaccaaacaccgcatattctcactcataggtgggaattgaacaatgagatcacatggacacaggaaggggaatatcacactctggggactgtggtggggtagggggaggggggagggatagcattgggagatatacctaatgctagatgacgagttagtgggtgcagcgcaccagcatggcacatgtatacatatgtaactaacctgcacaatgtgcacatgtaccctaaaacttaaagtataataaaaaaaaaaaaaaaagaaaagaaaattctataactggccaggcgcggtggctcatgccagtaatcctagtactttgggaggctgaggtgggcgggtcacgaggtcaggagattgagaccatcctggctaacagggtgaaaccctgcctctattaaaatacaaaaaattagccaggagtggtggcacgtgcctgtagtcctagctacttgggaggctgaggcaggagaattgcttgaacctgggaggcggaggttgcagtgagccgagatcgcaccactgcactccagcctggcgacagagcgagactcggtctcaaaaaaaaaaattttataactaatgtggaaacagttttatgataagataacatgtgcatgatggaacagagtgaacatttttgcaagactagtcaaagcaaaattcaagacttcaaaaaaaaaaatgtgtacttgggaggagcagtttgctttgtttatatcctcagaccctgggctatgcactcactttactctgctattagtaatgataataaaaagagctaatacttgatgtatctgctaggataggctagcttatacagtggtaaacaaacaaaactcaatggcaacacaatgcttatttcttgcttatgctaagttatcctctatgggctggcagagagctcttgtttatcagctacacagaaatccaggctaatagagcaaccaacatcttcagcatcaatagttgccatgccagagggaaagagaagcacaagaggctcaaagcaacaaataaatgcttcagagacaaagtaatccatcctttctgctcaaactcattggtctttcccaatcacttgaaggccaggaaataaaatcctaccatgtgctcagaaggcaaaacgccagaaatatttagtgaagagcgctaattgtctatcattcactatctaccaagggctgttctaattatattacaggcattatctcagctaagcctcataataatcttgtgaaataggtactattaatgttatcatcattcccattctatagatgaaataactgaggcaccaagaggctaagtaacctgctcaaagtcacacagataataggtggtaaaagctgaagatttaaacttaagcattcttgccccagagtctgtgtgcttaaccacaaagccatgagatctctcactaggtgggaacaatttgagaaacactgccataggcaatggagagccactaaaggattttttaagcaggaagtgtgagtccatcagaattggcatttaaaagctccctctagagagcacggtgaaggattaatttaaccagatttagactaaggcaggaaggctatttgcagagtgaggagatgaagatggggagggcttgaactaaggtacaatcaccactcaccgcaattaactgggttttgttgttgttgttgttgtttgagacagggtaacggggtacattgggggttggaggggtggttcttactgtgttgcccaggctggattccaactcctgggctcaagtgatgctctggctctggcatcctgagtagctaggactacaggtatgtgccaccacacccagtaactagttaatcttgactgtctatttcaactgaaaaatggttatggtaatacctacttggatgggttttctgaggaaaaacaccccaatgaacttgtgtgtttttaaaagtcaagtcccctaggcatggctagaagggaagaggcttagccagaaaatttaattgttgtgattaataaagtaatagaaatgtttagttttcctctgatgagatgaaagctttgaggggatcctggtcttgggagaaagtaaagaaatggaggagagggtttcaccagagtttagataactcttagcatctgcttactatcttccctgattaattatttccatggcagccagagtgaccttttaaaaccacaaatcggatcatgctgtttccctctcccctagtacagtgcctgatacttagaaatttctcagtaacatcgtgctcagtgaatgaatgaatgaatgagtgaatgaaaacacaagccagatggcaggtggatccctaaggaaaaggacagccaatgagaaattatctgtagcaacggtggctttggatgatgatgtttaataatcatttttaaggagttgcctgttgtgtgctatgctttaatcactgtcccccacccttcccaaataacgttcagtaaaagtctgccacaaaaaactcgctgttttgtgagaatttaagaaatggaagaagaaacaaactgtctgggcaccaggccaaacaatatccaaaaaggcaggagtcacagaggagagctaatgagtattagtgggagcaggtattccaagtgagaggtgaccagagtcctctgaaaatgtggggagggggtgacgttcctatatcctgggttaggggcttggactcttatatttggctgttggaaaaaacaagctggaggactttggggtatcaacaaccctcaggttacataaggatgatcatagggtcgttgtgaggattatgttgggatagttcatgcaaagcgcttaacacagtgcctagcgcatagtaagagctcagtaaatgttagttgttgtcttccttcactttcttccattccctccactccctttctaccaggctccattcattctcttccaaggacacgcagggggcgtgcccaccccttccctccgcccccacccaaggcccgccccccgcttctccacggattggttcccgagaggcggagctgaaggaagagcccagtgcggcgcggtgggggcggggcgcatgcgcgagctgggcagggtggaggtggggaggaagagctgccggaagtaggcggtggaggtggtagcggagctgacggcagctgccagggaaaccgaggcgcgggacgcaaggccagcagacaggccggccagagggtcatctgcgtccggcacccaggaggctcgtggtccgcctttgcctgggctgagggtctctggccccgcagcctctcttggaggcgggcctgtccctaagcccgccaaggggcgccgcgccgaggggctgcggagtgggggacggacgcccccgacccgggaaggggcgtccggcggggccggaggagagggctctccccgctcaggaggtgcccctgggcgggggaccgggagtcctcaaccccggactgaggcaggggtctctgggggcgaggagggcgcgtcgccctctgcccccgccggcaccctggccatgacaggcaagtcggtgaaggacgtggatcggtaccaggctgtcctggccaacctgctgctggaggaggataacaagttttgtgcagattgccagtctaaaggtagcgcatcccacctggcgggccaggggtccagccgcgccggggtggtgggggtgggctgcgtgaagaggcggtttctgaagcttaggccgcccaactcggcttataagtggtaacgcgtgctgcgcttgcagtgagcctactgggctttctgcagctgggggattggtatgggtagagcttgcgagggcgagtctgtgtgtgtcggggagggtggaggtgatggtgcgggtggaagttgcctggcgtgttcaggtgagaatgtctgtatttgagggctctgaatgagttctgggccggctgtccagagagagctcccagcatgtcacttgcaaagctggggatgaactgcattgcgtgcgtgcgtgcgtgcgtgtgtgtgtgtgtgtgtgtgtgtgtgtgagagagagagagagagaatgacgaggaggaggaggagggaagtgagatggcggaaaggaaaactgcttaaatgatttttaaaggtggtgatttttgcttcctgctatttggttagcaactcctgtcattttgcagccttgctaagatctgacaagagtgcttaggt

SEQ ID NO: 4577 - DNA, 6000 bp, Homo sapiens
tggtataaatttatcttttttaacactccacataaaaacatgtgtcctctcttacatttaatcattagtagtctctaaaatggtaaaataaattgaatttacattagcaaatgaaagtgcaaatttgtacagctaggctcagcagcaaaagtgaagaataagaatgaaaggtgaaaagctggtggatgccatgcagagcgaggacttccataaaggtctgtgccctgcggccaaacacagtcaacacaccaccattttcttgttgctcttaaatgagcaaaaccaaatttcttttttatttaatgaaatattaaatctttatttccccctaacataatttgtgatcaagtaggacagaggtaagtcccaccatcactggggacagtagcaacacacagacttcagaaacagccttgaatcatcagtaacatcctcccctggtaacgttagaaggaatgcatctaatgacaaatttgcaatgttgtcacattgttctaatttatttgattagtttatctggaaaaactttacacattattgaagacaacagtaaattattttcttgctctgaaaaaataatgttttttcacattttaaaaccttttagtatgcttttgcaaaagtagttgcaagaatatgacagctgggtttgcagaatgtccatgtacaagtttgtatttataagaaactggtaatctgcctataatttgcctctacaaatagagctctttaaaataatatttttaaaaaaacaggcttaaacttttccctattcattctacttgtagcaaagaggtacttacttttcaagtattacatggtaaaaggcacaagttttttttgccaattttaagctgttaagctttaagaccaaactatgtgaaaaaaaatcatgcctagtcaatcctagtcaatcattttatagccaaatcctcttgtcttttaaataacgcagaaaaatactaatttgctaagaaggagcacactggaaaaagccatttgaaagtactgaagaatgaggagtattttttttctactgatgaaaattattaggaaagctatcctgtctgttgtctttagctagtttaaataaatcttttcaaaatgatggtcaagaaatctttagaaaactggaagaggggatgctcttttatagcatgaaaggaattccattaattatagaaattctcgttaaattttgacgttggttcttcagaaaaaatacgcatttaacttctgcagtctgttgtgtttgaacaccatctacctgagccaggggcccaagcgttccttcatcatcaaaggccaaaactggattcaaaggaacttctgggctcttactgttagtgacatctaatctggatggtttcgatccaatgggtaaatttataatttcttcaaaattttcattctgaacagagatactccattttcatttggttttccaaattgggggtgctctccacagtcacttttgattggtgtgaggtaaccacatatgggctggcaactggttctccatttcccagagcatttgttgtacacggaagtatagatagctctgttcctccagtgagagctcccttggctatatcaccatttctctgatcaatggttttcttatctgtagcttctgttctcctgcttcagggctgtttcttatagcaaccctcatattgttcaccaaagcacaatgcagtcatatcatctgaggacccggatccaggtgggaatgggaaggtaaaggaccacagctctcagggggtctgccttaacccaaaggtagatttcagtttacagattaacttcaaatgcactagtaagtttacttattatgtttactgcctccccttgctggaatgcaagatccatgaaggcagggattcttttctgctttgtcatcatgtgactcaaattcctcgaacagtgcctggcacatactagcagttctttttcttttttttttgtttttgagacagagtctagctctgtcgcccaggctagagtgcagtggcacaatctcggcaacctccgtctcctgggttcaagcaattctcctgcctcagcctcccgagtagctgggactacagggagcaccaccacgcccagctaattttttttttagtagagacagggtttcaccatgttggccaggatggtctcaatctcttgatctcatgatccgcctgcctcggactcccaaagtgctgggattacaggtgtgagccactgtgcctggccaatatttaatgaatgaatcaggttaacaaaaattaaaagttgacaatatcggccgggtgcagtggctcacacctataatcccagcactttgggaggccaaggcagtggtgcacgcctgtaatcccagctactctggaggccgaggcaggagaattgcttgcacccgggaggcagaggttgcagtgagcagagatcacgccactgcactccagcctgggtgacagagcaagactccgtctcaaaaaaaaaagagactcaccatcagagaaatgcaaatcaaaaccacaatgagataccatctcacaccagttagaatggcgatcattaaaaagtcaggaaacaacaggtgctggagaggatgtggagaaataggaacacttttacactgttggtgggactgtaaactagttcaaccattatggaagacaatgtggtgattcctcaaggatctagaactagaaataccatttgacccagccatcccattactgggtatatacccaaaggattataaaccatgctgctataaagacacatgcacacgtatgtttattatggcactattcacaatagcaaagacttggaaccaacccaagtgtccatcaatgatagactggattaagaaaatgtggcacatatacaccatggaatactatgcagccataaaaagggatgagttcatgtcctttgtagggacatggatgaagctggaaaccatcattctcagcaaactatcgtaagaacaaaaaaccaaacaccgcatgttctcactcataggtgggaactgaacaatgagaacacttggacacaggaaggggaacatcacacaccagggcctgttgtggggtggggggaggggggagggaaagcattaggagatatacctaatgtaaatgacgagttaatgggtgcagcacaccaacatggcacatgtatacatatgtaacaaacctgcatgttgtgcacaggtaccctagaacttaaagtataataataaaaaataaaaaataaaaagagactccatctcaaaaaaaaaaagcaatgtggcaatgtctagtaaaattgagaatgtacccagtaatttttctagttaaataacctacagaaattctaaggcaggtgccaaaggagacacctaaaagcttttcactacagcaatgtttgtaatagcaaaaaatactataaataatttaaatgtgcatctctgtaagaatgaataaatatactaagtaaaatggatgcataaaatagactattataaaaattaatgagaataaactaaattcttatattggcatgaatagttctaaaaaacaatgtaagcaaaatgcaaaataaaatgcaggaattttattaatgtaaaaatttaaaatactactgtatattgttcaaggatatctattaatatatttgaatgtaaaagtataaaaaaaagtagttgtccatggagaagtaaaaggatgtaagacaggaaatgaacaaagcagacagataaacaaaacaaagagggaaaaagagaccagcaagattttccctgacattaaatactaaaataaaatacttatgtctgtatgtggctcaatattggcagggtaaagtttaaagctttttattctcaagttgattgtaatcgttgagagaacaaaggaacacactggtgagtttaaagcttgggcctctacctggcatgagtagctgctttccgcaccaaatccagaacatctgtactgggggtgtctgacacttgcgtgctctctctcattctgaccccttctttccccttacatatcattttttttcctttcttccttcccttgggtctcttaccacaaaagctccgcaccagactggggttctgacactaacttggcatgtgattctgggctgccacctcaccattctgaacctcagtgttgtcccctctaaacctgggagaacacccatcctgcctggaggcaagtatggctcgctgtcagttctcctttctgctgtttctctattccagcatcatctccagcagactacaggcatacagagcctccgccttaatctcacctctgctctttgtctctgcttcagctcctgctgggctgatttctgtttggccttctcaactctgctgacagattctttaactttggttttttctttacgtgcaggtggatccatggcttgacttctggatatttcttaggaggctctgatctgggtggtacagaaagaggcagatcttcaaaacaaaacaaaacaaaaaataccctgccagttactcctctaatcctttagctccgccccatcctttgccaggtgaggcagagtggtctggtggcaagggcgctggatgtgggggagtaggaaccgagtcccaaggccacaacctcgctgggtgtccctgggcaagtctcctccccactttgagccttagttttctgtctgcaaaatgggttaagtgttttcctggcctccctccaggagctgctgtgtgcgggtgaaatgcaaagacccctgtgaaagcgttgcccactgtgcggcgtgcggcacccagcgcggaaccgtcctaatgggacgctgagacccagagggcgcccagggttttcccactgcggccggcctaactccgccgcagcagccgctcctggggccagggggccgggccccatagccagccgggcccgccccccaccgcccggccccccgaccccgccccggcccgcccggccccaggggacggcccccgcctcctgccctcttccctctcctggaggaaaatggcggtcgctggagccgccgaccaagaggcttgggagtctgtacctttcccgaccgggccactggaagttggagcctccgccgagtcgcagacaacgcctccgggagggtaatcctcgccttcccccgaccactggacccagcgctgcctgcccaccgcccctcgtcctgggcggggccgcgcgccggggggaggggcgcagggccgagcgccaggaggcttccgcccgcaggagcggccgcgcgtgcgcagagaggatggctggaaacccgcgtagagggcggggcggggcaagccggtgccggggcggggcaggggcggagccacaccggggtgggtggtggttacggctaaccaaagctttttcccgttatattttctgcaacagctactaggttttagagggtgagatccgaatcctggaattggaattgctcagaattcgaattccgaggctcaatttcttaattcgaaaagtggggattgatgattgccaccttcttcattcatgagtttattgggaggatcaagtgagatcccgtttgccacagtgctttgaaaaaggaaatcttgacagaagtaccaatagccagtataaatacagagaacattcacgttcaactgattaccgaggagatgtaaattaaaatagctggctgtaattttccaggtattacattagcaaggattgacaaaaatgataatagctaccttacatttgggcttactatattccaggcactgttcttacagcttcacatttattaactaattcctcataataagtgtgtataatgtatacgtgtatattattatccccatttacacataagggaacagaagcattgaaaagttaagtgagttgtcccgggtcacacagcttctaagtgctggagcaaatatttcagccaggattcataggacaatggccttatccaaagtaaaaccctgtttgggtccactatttgttcctctatcaaactggcaag

SEQ ID NO: 4578 - DNA, 6000 bp, Homo sapiens
ttttttttttttttttttgagagggagtctcgctctgtccccaggttggagcgcagatctcggctcactggaagctctgccttccggattcatgccattctccagcctcagcctcccgagtagctggcactacaggcgcctaccaccacgcccagctaattttttgtatttttagtagagacggggtttcacagtgttagccaagatggtctccatctcctgacctcgtgatccgcccgcctcggcctcccaaagtgctgggattacaggcgtgagccaccgcgcccggcctgaatatagactgttacctaccagctggatgaatctctggactccttttcctcaactacaaaatagggtataaaacagtatctacttagacctggcgctgtggctcacgcctgtaatcccaacactttgggaggccaaagtgagcagattgcttgagtccctgagttcgagaccattgcttgagtccctgagttcgagaccagcttggcaataggatgaaccctccccctcctctctaataaaatacaaaaaaaaaaaaaaaaaaaaattagctgggtgcggtggcacgcacctgtcgtcccagctactagggaggttgaggtgggaggactgcttaagcctgagaggtggaggctgcagtgagctgaaatcatgccaccgcactccaatctgggtgacagagtgagaccccgtatcaaaaacaaaacaaaacaaataaaccagtatacttataaaagtaaacaacaagccgggcgggggcggtggctcatgactataatcccagcactttgggaggccaaggcaggcggatcacctgaggtcaggagttcaagaccagcctggccaacatggtgaaacccatctctactaaaaatacaaaaaattagccaggcgtagtggtgagcccctgtaataccagctactcgggaggctgagacaggtgaatcgcttgaacccaggaggcggaggttgcagtgaacagaaatcaagccaccgcactccagcctgggcaacaagagcgaaactccgtctcaaaaaaaaaaaaaaaaaaagaaaaagaaaagaaaagaaggaaaaaaaagtaagtaacaaatacaaagcactttaaacagcagtcagtccctggcacatcagagttatagccataaaataaagatatgcaatcttctgaagtatgattcacgattgtgtcttatctttaactcaaaattaaaaatgaattacaagcagaaatgtgcaccagatttcttatcattctaaatttaaatggttgaatgtgtcctcctcagctaagcattttaacagccactgatgagcaatctagtaaattgaattcgctcaaaataaaggtttccccaagagttccccccacaccacaaatcaagagctctgataaagacaccatccagaatcaactgaatgtttatattaacatgtacaaaccactgagtacccccccaaaaaatcaatatctcactccagtttagtagttaacagtgacaaaacacaaagcaactagcttgtaatttctattaaaaactttaaatatttttcctgtaaaaccaccaaaataatttaacaacaacaacaaaaaatcctaggggtattaacaaaaaccaacttttgtatttgaaaaaacgtcaaaaggtacattgaaaactgactccctaggaaagatgagtttattttactattaatttcaaagttctcattcacaattagcatttcactcttttatcttttaaatagatacaggcttcagcacctttccaaatattgaaatttattggttttggtttccaatctatgactttttgtttaaacttctggatctatcgattaaaaaaaaaaagcaaacaaaagacagtctcttgttcaaaagggcacgacaatcaggtactccatacctaaagtatgttttcacttgttaaaatgtcttacactattctagtaaatatctcaaacttaatagcaccctaatttcctttcaaatattggataaaaaagaccttagaaaagatcagcagtctactaaattacaaatataagtctaatgaggagtgactaccaatcactttacttttggataagatttacacaagaacacgacttactactaaactaaaacatgaaccactattattaactgtatttttctggtaagcaataaatgtcaatgttaaaaatatttcaacaaatatgacaagccaacttcagagcacgaagttggcagataaaattgacaccacagcacaatttcaaaactataagcaactattaaacacacacaccaccgcaccgcacccattcttatgtaaacttttggaatagtcaactttgtgagcctcacctttgttttcacccagcataaggagagttaaaggtgagacaccaactgcaaaaaaccaaaatatcaaaagattcagttaatgtccccacaggggaaaggactaaaatctttaaacgttaatgtatttaagtaatcgaagggcagggcacttccccaagctacagccattttggattcagactgtctttcgaatttcacgggttggggagaactagatttaaaacaacagaaaaaaaataacacttaaaacatttcaggatcgaccagctttccctgcccctccaaggaaaggaggttggtagatatcggatagactcaatctaagcgaaaacacctcgctaccacagagaaccggaaagctgggggttaaaacttttttcccctcagatatccaacatttgacttacactttttcctccttaggttttcctttgaaggaaaacaaaagcccttagctctcatttcaagaaggaaagaaaaaaacccgtaagccaagtcactcaacgagcaccaagccggatcgcctggagaggagccaaagagccgcaggtgagcgttccgacccgacgaccgaagttaaagtaggagcgctttcgcggagccccggcgacgctcgcgtgcaaagctccatgcacgggggaggcgggggtgccgcatccgaaccacttgacccgtgggctccgctcgcccctctcgggtcggacctatacccaaccacctgtgtgagagcttctttcaactagttttaacagcccgttggttaggcaccgggcggagccccgcgccagaacgactccaggatctcctactgccccgtttcccaaactcccactcaccgggcagcggcggagctatggccagggactagacgctgcgtctgaggacgcgtccccagcttgtcgacccggcagaggcggctagtccacaaccataacaaagctcttcccaaaatggctgcccggcccacaaggtccaggaggggcagagcgggtggaggaggaggagcgaccagcagcacggccctcccatcccccgtccgaccccgccttacacacgcccacctgaagaagcgcatgcgcaagggactgctccggcgaccctcccggacgccagttccctacgctgccaacgttcggcctccagaacggcggttatgccctgccccgcccccggctcccttcttcgccgcttgaggcggcgcatggtcacctctgccccctacagaattgaatcctctgcctttcctcgtgccgcctgaggcacggacaagcctagtttagtacgccccttctaacccccttgcccacttccagggcctgggcgcgtatgaatgagtgggtgggtatgcatgtgtgtatcccttttttcttcaccctcccacagcccgccccttggccagtgcgcgtcccgaaactacctctacaaggacttgcaaaccggtttcggaggaacgtgtgttttccggccctttcccaccttccgctccttacttctcgtgtgcgcgtcgttgagactccagtccccagcgggccacacggcctggccccggaggctgcgcggctgcgtcggccgcgctacccgctgggagtagtagttcccctggagcgcaggcgtcactcccccgcccaagcgaagggcgggattccggcgagagcctgcgcttgcgacagtgccgtttctcctacctgaagtctcattgggtatcgcactactggaaggggcggcgctgccatgacagagaaggcaataaaactgaaggcctagctcgactaaaagcgcttactattaaggaagacttcgctgtggctccatccggcacggaaagctaaaccgtgtaatggctggcaaccaggaagctagactacctagaatccggaggattggagggactggccggcgtgggcccctgagatctcctactacatgtcttcagttttatccatagacacggaagggcactaaaattgcctggtgccatttcctgtgaaacaagtctagataagagaagggacttgcccaaggtcacatagccgagaaataaagccgagggcagtaggagaaatgatctgactttccgaaccacccccaagcctagggcccttatcaccacacctttcatggaagtgaaaatcctgctcttgtgctctttaacccttaatgaagtttataggtcccagcaaagaaaatggatgtaagaactgggcttttttccccctctaaatgatagtaaagggccctaatgcagtgagatgtgtccccataggccttataaaccctgttttgcaaagtaaaacataagtcccacagatggcaagcaattcaggtcacactgggcctaaaatcccgtctcttaccttccttcaccaccatcattctgagattgtttcagtacttgcactctacttacccgaactctgtgggcagattctgctgcctgggagccctggaatagaacttcaaggaccgttcaacatctggattcaactagaaattaagaatggcccccaaacagaaagccgggcctaggaaccaattagcgcaggtcaagtccctacccggactcattttttttcagccctcaggaagtaggggcctctctgaatccacttgccggaagtgcctttccagtggacctgggctgttgttgcggttgttttccttctctccgtgcaacgctggcaagtctcaaagtcgccacaggtgcaggttgggatgggaggcaccaagggttggtagtaaatttgcgacgttgggatgggagggcaccaagggttggtagtaaattggagacgcgggcactctcgggcagggtttcccgaagacactggcgtctaaaccccgccttcctttctcagaggtcagtttgaagctggcagtttgcagtcttcccaccagggcaatgggaatattgagctttttcatttatattaggaggattaagctttgagtctcagtccttaatcccgcatcacctgccgtccctggactttttaggttatcactttttaatacccactagttggaaagcacgtgccacagaggaaagggagtttccaaagatggggggatggttgagattttaaatggagtggtctggaaagtccttaagaagaaagtgattttgaacaaaagtgatgggtacgctctgcgggcattttggtctggggctcaggtgggtgggtgtgggtgtgatctaaattctactcggaggcccaggattacttacctccctacttgcttccttaagtatagtatgaagacattaactggtatacaggatttcttgacccagccctaagatctgtgatcaataaattagttcaatcgattttttttttttttttttgagacggagcttcgcactgtctcgtgggctggagtgcaatggcgcgatctcggctcactgcaacctccgcctcccaggttcaagcaattctcctgcctcagcctcccgagtagctgggattacaggcgcctgccaccacgcccagctaattttttgtatttttagtagagacgggggggaggttcactacgttggccaggctggtctcgaactcctgacctcgtgatccacccacctcggcctcccaaactgctgggcttacaggagcgagtcactgcgccctgcccaatcg

SEQ ID NO: 4579 - DNA, 6000 bp, Homo sapiens
tctaacctaatcatgggagccctttaaaagcagagagttttctttggctagtggtagaaaaggcagtcagacaggtttaaggcacgaggcagacttggcttgagggaggttttcccttgctgggttggagggggctagggggcagccactaggagcagagattggccccctggctgacagcaggaaagaaaatgaggacctcagtcctatggcaaggacctggattctgccaacaacctggattaccttggaagcagattcttcccctaagcctccagacaagaggccagcccagccaacaccttgcctttgactttgacagaccctacgcagagaacccagttgactccagctagatttctaacttacagaaatatgagataataaatatatgttattttaaactgctaagtttataataatttgttgtgtagcaatagaaaactaatgaggcacccatctctggagagaagttttacccctattttttaagtgatgaggtccagggaggtatggttgcttggccaagattgcacagcacatgagtgacaggctgagctacagcctagggcaggggccagcaaacattttttgtaaaggtttagatagcaaatatttaggctttgtgagctatacagtttctgtcataactatttccttctaacatcgtagcacaaaagtagtatgtaaagaatgagcacaactgtgttccaataaaactttttagaggctacattttgaatttcataaaattctgtatgtaatgaaatattcttatttatttatttatttttgcgacaaagtctcgctctgttgcccaggctggagggcagtggcatgatcttggccactgcaacctctgcctcccaggttcaagtgattctcctgcctcagcccccgagtagctgggattacagttgcccaccaccacacttggctaatttttgtatttttagtagagatggggtttcaccatgttggccaggatggtcatgaactcctgaccttaagtgatccatcctcctcagtctcccagagtgctgggattatagtcatgagccatcacgcccggccatgaaatactctttattttcttcaaccattaaaaagatgtggaaactattattcttagttggcaggctgtataaaaacgggcagtgagccaggtctggtctatgagccacagtttgccagcactccccaggtgcccgactcctagcccagggtgtcagtgattatcaatagggctaaggggtggtacaaagcgtgctggacaccaaggctctgtgtctaggtccctgttgtacttcagatttgctacgtgacttcaggcaactcactttccttttctgggcctataaatcaaagcagggtaatggcattcaaatcttttccctacgcacccccctacccccagggacttttccaaagcaaagctaatacagaactctagcttcaaaagctgacctaaagggcacctgctctgactggccggggaatgtggttggggtccctgtccacttcctctcgttccactcccaggagctccagagtctctgtagaacacagtgtgcaaacctttgaaccagccagtctctaaaacctaactaaggcagtctaaaccagggattctcaacccggtgcttgacatctgggactggataattctttgttgggggtgctgtcctgtcctgtgcattgtaggttgctactagaagctgtttgagatggggtctttgtcactcaggctggagtgcagtggtgtgatctcggctcactgcaacctctgcctcccaggttcagggaattctcctgcctcagcctcccaagtagctggtattacaggtgcccgccacgaagcctggctaatttttgtatttttagtgaaggcagggtttcaccatgttggccaggctggtctcaaattcctgacctcaggtgatctgccctcaggtgatctcggcttcccggagtgctgggattacaggcttgagccactgtgcctggcctgatttcttttaacttactgacattttctgatttttctgcaatgtccagcaatttcttttcactgaaaaaaaaaaaaaaaaaaagaagaagaaggcaggcatgcagttttgtttttgtcagtgtgctcaggcctaggatggatggacctgtaaatccctttggaagcctggaagagggaccagattatactactttgggacactgagaagtcacctagaaaaggtgacctgtaacctgagttttaagggaagtgcatgagctcaccaggtgaggaaagggcctttgtgaccaaggtgtggcattgtccctgggacacagtgaacagtgagttcaggcatgatatggtagggagcacaggaagtgaagctgggaggtggccagggatttggttacaagactgtggatgcttggagctggggttgttattctgagggcagtgggggagccattgaaaggtttggcaggtgagagactgatggggatgctggtctggaagctcaagctggtgtctcatgaagggcagtcagcttgggggcagagaggccagtgagaggcaggagcaggaacacaggctgtaacaaagaggggacaatgtggcaaaaactggagaagtgcatacgggtctggaagattcagactgacatggatttcagcacctcctctccccaatccccacttattagctgtgagccctgggcaatgcacttctctctgagcctccatgacttagctgaggtgacaacgaaatgggaagagtatgtggctggtgacatgtgataagtgggtacaaatggtagctcccttccctacccgcttgaggcagaagctgatggccagttttcttctgagtcgcccagccgagccagggaaattctgagtgtgcttgtttagagagggtcaccaccatgcctgggcagcatcgcagatctgacgctgggaccagtttctgaaaggtggggaagaagacagagccagaaaacctgggttagattcctggatttcaattagcacccaggcccagccccttctggtcccagctgtactgcatccggctgggtcctgagccaagtgacacctggtccctgcactcaggaggtccccataaactaggggagattcacaaatagagccattgtgtcatgtgaggacataccctggccagctcctcaggctaaggtcttactaaaccccaatagctattctaggaaggaggtgccattgtctctattttacagataaagatgtggccagtcttctggtctgaaagtggctaaggcaggaaggaaccgtgacttgtccagttccagggcctgagcttccagcctggcccagggattcaggttgaagcagggcccgaggggtgtgctagcaacatcagcctgtccaggcctggaccccaacatcagcaacctgtgactcacttctgggactacacaggcagggctgggagggtccattttgaccagtgaggggcccacaacacacacagatgcctgccctgtggaaatgagtggagccaaaagctctgtggcctccagcttcccattcatatctcccctgtgcctacaagggtgcaaagagggctgccagcggccttggtcccacctacagactgaaagtcaaaggaagtctgcctggtccttgtctcggctctgtagccttgcacacacaggcctgtgcccttctctgagccttagtttcctggtgggatatttcttcagagacagagtttgggggcccagggccctgccgctgacctgctctgtgacttggagccagtggcttcctctctctgggcttcagatccctgccggccaggctgctccaccttctatccttgggctgggaagagagttagtcacccccagctcactggggaatctaggccatgccagtggcaagctggccccagtcccccggcttgctggagtagcaggaaagggcaagaacaaaacccagaccccagctggttctggaaatggcttcccttggcccacatgaacttgtcaggatctcaccagcctgtgacttcacctacatgctgctccttctgcctggatgctgttgtccactcctactctcctaaggcacctcagatgtcctctcacggaaagattcttacacacacgcacacacacacgcacacacgcgcgcgcacgtaacccttcctccaggctcccaaatcacctgtccacaaaaactgccttcagtagccacttaacctgcatgcttaaggcattcaatcctcacagaactgtgagttagggattatcagttctccttgagggaggaaggttcagagaagttaggtgacacatcttcagtccctctccggggcctccactggctggggcagtgacgccggtaacggggagcactttaatgctggtcattatcgctgagaacgccttcctccccaggaactagggtcctggagggacgggagggcttgctgtctgactgctgtgaaaaagcaggttcggtcaacgcagtctgcagcaaacacctcggcaagtgactttcccctgtctgggcctcagtttccctttctataaaatgggggtgaacaggactgggctcgggactcctaagccctgtccggctgagccttaacggctcggaggagtttgtctccatttccaagcccgccctggagcgctcgcgggggcgtgacggcccccaggacccaaggttccgatccgcgccaaggcgttccggtcagcagcagccccgcggctcctcgggccccgccgcgctggcaagccccagtccccgccagcccaatcgtgctggcgctttaaggacgggcggggcgggctgggcgacagcgctggacacctggagctgcccgaggacgcggaggagaggtggggcgggcgtcaccaccggagtggagggcgaggcccgggtcccgcgctcccctgggcgccccacggcagcctcagagccccgcggggagcgcgcagccctcggggcgggcgccggggtgaggcctggctcggtccctgcgcaccgggtgcgggcggcggagagggcgcggctggtgagccctgggagggcccaggagccagacctcggttttgcgggctggggagcagggctcgggggcagcggccaggcccctccgcccctaacacccgcgcctcctgcagacccgagggtcgccgctggtagggtcgctcagccctggcgtcctccaccaccacaccttcacctgcgcccggctccctgcgcgcctggacagcgcctgctgcccgcctcccgatggccctgccccaggtgggtggaaacggccttctccctcctttacgggcactcagccccttctgtcgtcgaccttgccccgaccccttcccctaacctcggtcaccgtggcttggtgggcagtgtggacacccggggctctgcctgggttttatcttgctgggtggcttgaggccatggcactcagggcctcaattggggaacaagaacaaattcttgttcggacagtttcgtctttacagaaagcggcatctaaagtgcccttattggggcctggtgcggtggctcacgcctgtaatcccagcactttgggaggccgaggcgggctgataacttgaggtcaggagttcgagaccagcctgggcaacatgatgaaaccctgtctctactaaaaatacaaaaattagccgggcatggtggcgggcgcttgtaatcctagctgcttaggaagctgaggcaggagaatcacttgaactcaggaggcagagggtgcaatgagccgagatcgcaggactgccctccagcctgggcaacagagcaagatggaatctcaaacaaaacaaaacaaaacaaaaatgcccttattggtatggagtagggcacggagaatggcatggcgttccatcctggctttgtgcaggagtgggtgcaggagggaggctctgtcctccggactctcctgacaggagcagggcctttctactagacttttactgaagatgctgc

SEQ ID NO: 4580 - DNA, 6000 bp, Homo sapiens
catagtccactgggtgcaggaacataagcttgacgcagagctcacgcagcctggagggtgtagaggagcatgagagagacagcccatcccttggagcagggacataagaactgagggcaaggagtcatgtgccaacacccccaccaacaaatctcggtgcttcccaagagacatgcagggtcaatatgacccagcacaacagcagcctaggaaggcagtgggagccccaaaagacagaagcacgaagcactaaacattctaagtttttcctcattttttccctttgtacacttcgctctctttttctctgcttttttatcccatttttcccttcattatgcagtatggccgactcccttgactcaaatatatttttgggtttttttttttttttgagacagggtctcactcactctgtggcagtggcgggatcatagcaccataaacttgaacctctgggctcaaatgatcctcccacctcagcctaactacaggtgtgcgggattacaggtgtgcagcaccatactcaactgattttttaatttttttgtggagactgggtcttgttatgttgccaggtctggtctcaaactcctgggctcaagtgttcctcctgccttggtctcccaaggtgctgggattacaaacgtgagccactgtgccctgcctcgaatgccattctttttattttattttactctactttttagatgtagagactgtgctactttatggcaccagtctattagatgtaaaatctgcagatggagtgagggatcctatctcctctcttaggaaggccagagatttcagagaccattaaggtaccatgaggtcaggaggtaaaacagagtgcgtgtttatatatctgagaaggtttctggtagagataggcagggaaacagtaaggatctgtggtttagagtctctagcttacttgttcctcaggctaatgttttctggtttgaatacttcttgataagcagttttgttgcaaaggatgaggtcaagtcgatgcacagcctccaccacagccctgtagggaaatacaggcaaatatcccctcagccatatgcatggtccacagaggatgacgctgggacacgattctagaggaaaagctacagaattagcggtgagggaaaaaggagaaggctgcaggctgagctctgtacaaaacaagatgaacacagtctccatcttgttacagtaacccctgcccctccccaccccccgcccaccaggggacatttggcaatggtagaaacatttattgtcatcacaactgggtggaaagagggttgccactggcatttagtgggtgctgttaaatctcctgtaatacacaggacagtccaccacaataaagcattaccctacccaaaatgtcaacagtgtcaaagtagagaaactgtgatatggtaaggccgactctcccaatggaaagagcacacgctgtgatgccaggcagaaaatctagggtttgaaccctggctgtgtcttactctgtgcctttgggcaaattacccacccttttaaagccttagttaccacatcaataaaaacgaagataataatagctacttcagagaactgttgtgaggattaaatgaaataataatttatatatagctctggtatatggtaaacattcaataatggtggaatgaataaattattacataaggccttattatccctgacataaaggaaagacacttctagtataaaattctactatggaattgtggggtatgatggggaagtagagggagctcctgggctgcttagccgtaagcaagattctgataagcctagattctgctgaaggaattatttgttgaacatagtggttaagagtgtaggcatgaaaccagaccgcctggattcaaatcttagctctacttcttaccagctatgtggtcctgggcaaaatacctaacttccttacgtctcacttcacccaaccataaaatgggaatattattacctactttgtgaggattaaattagctaatacataaagcacccataacagtgactggtatatagtaatcactccaagtgttagtctccatccttcttgttctaaggctgagggggagactccaggcactaagaggtaagtctgtcatcacagcaaagaaaaagccacagaaactctacaatggacggccaagaagtcccagaggtaggtctcatatctggaagggtaaaacccagaggacatcaggcaggagctataagaacatgtgaatcaggcacaactgtggacacaaaagcaacaaaaacagagtgaagattcccaaacaaaccaagacgtgctcccgggccaggaaaagtgggccacaacagttggcaccctgtggtggtggtggctcaggaggcacactactaagctgccctacacagggtgaagtgactgccagcacccagcagagtaggtgggatggtaatcgataccttctcacaagcaatcatgtttcttcaaactggacagcctagagatggatgccaagcccttttggccaacctggccctcgatgccaggggcagcaccagtgatttactttataccagctcagtccctagggcagggcttttatctttggtgccatggaaagagctaatgggagtgtatatttttatagacaagctccacagctctccttatatccttaatccaaaagaaggtaaataaccaccactctaggaagttctaattgaaaacgcttaaatatgagagggctcaccacttttttctcattttccatcagatcataagctcctccactaaactataatctctcttagaacaaaaactacaaaatctagccgtgtgtttcattcactattgtactctcgggcctagcaaaaacaaaaatgtttttaaaaacaaataactaatgaattggcctaattaattaattggtgcttccaggctcctttctcctgctgccctttcttctgacttaaaatatttcagaatttcatatccgtaaacagctaggtgtgagagttccccaaatttctgaagctcagagtgacaagtccatagtctaacaacacatttatcttgagcagagaaatcagactttcctcctagttccttccactgatcaccactgctataataaattataaaaacagtgattggctgcctcaaatttctaccctgctcaaagccaacaacacaattacaggcagatacccatgtgcacacaggtaagccacacaggcaaacacatcagcttaggttagtcctgtgaatgtagtggtttaagaaagaactacatttgatgacaactggaaggatgaccagagccatccccaaaagctggagacaaggaatattgcagacactgcccacgctctgtctgacaggcagcactgacactcggcagcatgataaggcacacgtgccacccccagccaactcctcacccgcctggggactgcttggggcagcccatagtgggagccctggggccgctagattgaatcacttttctatttttggagcagcctatactcccctctgcctctggcttacaaagccagagaaggcaggatgcctactcaaagagaaaaagacaacatgctcttgactctttcaccgccaaaatgtggccaaggctctgagggtcgtcttctcatgcaaatatccgtgttctataaagcctgagctaaatgaaaaccccaaactctactctgtagtagaaggcacaaaactcagtttccacgcttcatcctattttgacccagttgcggagcccatgttccagttgacctacccaacaaattctccacctttgatgggaagagctcattcgggcctgttgccaacagagggctgaagggctgaagatgtgacttgtggagcgtgggtggcattatggaaatcagaaaccaggaacggaagttgcctggcaagagactacagtcatgaggctgggaggaaggcaggactcaggagtccccaggtgcccggaattgcctcccaaatcccaagaacgctctggacacaaaagtcgttcgtgacccttccaggccaagactttctcattcggactcctcaaaattagagccgtatgggactttagagcacatccaattcaaatcgttctttttaaggataaggaaactgaggcccaaggtcacaccgtgagagagtggcaaaggatggacctgaacctagctccacggacttcagtccaagactcttccttgtaaatcccccaggattccaagcaccgttcccttccgggtttttctacacctgtgaccccaccttcacctacccaacccttccagccttcaattcccaccctattaccccaactccaccaagcttagtgcccgccccaagaaagctcactgcagaggggattcctccacgtgcttccctccaaacctcccacctacccaattcctcctttcagttccatcccgagttactacgggaccccgccccgcctccaaaattgcaccctccttcctcacccgcacctcaccccgacacccgggccccgcccgcccgggaggccccgcccctcgccgtctccccacttccctcggtggctgctctcacgccctggcccctctcaccggtaaagccgcttagtgtggaggacttttgcttcgggctcgctgctctcccctgtgggggggccttggctcatggtgcccgggtccgggggcagctcccggtcacaggcccctgccacccaccactaccgccaacactgccgtctccggccgtagccgcagccgccgccgccaccggccctgctcggccgccatcgctgtgaggcggctgcccgcgacagctcctcctccgcctgccaaatctcgcgatggcagccgcacagttgcggaccagtggcctgctgctaccaaatctcgcgaaactcgttttccctcccgggaagttgccagaactaactctgggcagcatggcgtctttccggcttctccaaacccttgcgaaaaactttattggcaaagctatcagagaacggacagtgtacccactgaggcggccaaagcttaactggatcagggcaggtgagcttacagctaggagcgtgactgctttgtcctacaatggtcatttggtccatccttctgcccctttcccgcctccccgtttgagccaagcctctttcagattactggttagagtgactccagctttcccttttcccccataatttaaacaaacaaaaagtgcatgtgaaagtttccttggaaagggccgagcatcacataggagtaaagccccggaagaaatgacttgtacaagcgtctcggcccttcagctcccctcccaaagatttccagcttgcatatctatctcttacgagccagtaacatttattgaactgccatcttccagccacagtgcaagattctagacacacagaggtgagcaagctagacactatccctgccctcccaaagctcaaatgattttagggataaggactcatagaaatgagaagctagtccctaacgtttctatctcctaatcctcacattggaaatcagggcaggtgggcttacagctaggagcgtgactgctttgtcttgttttagcttaaaacctaagttaaaaagcaagggtggtttgttttgttgttgttgtttttgcctgtgtatgaattgtaatgagaacataaattgcccttctaccactatgctcctggctgcagccacccaccttctttctgttcctgaaacagcctaagtctttcccatccattggtctttcacttgctgttcctctgtctgtaacactcatactcctgatttcccatcaggtttcagctcaaatattaccttaccaaagaggtctttcctattaaaattgtctaattgatttagttgctaggcttcttcattatgttaccccaatagaacataagcttctcaagggcagagacctcaactgtcatcttgttctcttctgtgtctgcctagctaataattggtgtccag

SEQ ID NO: 4581 - DNA, 6000 bp, Homo sapiens
gtggtcagcagcggacaggaaggagaagatggcagggagggaggcgaggtgaccacgggccacagcagccggtttggattgtactccctgtctgaaagccgcaggggtgctaagagcagagacgcggtcagatatgctgctcctgtagtcactgtggctgctccagggctggggtgagggtggagacaaggaaccgcagggaggccctagggggattctggctgttctggggagagtgagttgagtagggggcggggtcagcatggaggccgatgtggtcacccaggtgaggtgacaggcttggccatggtgctggcagacacacagacgcaggggaggtgttgaccgcagcagctgagggattgggtataggggctaagggcagaggggagtcgggactctcaagacctttgttagagtaatgggagggacagaggtccccactgcaatggggagactgaggcagaggcaagctgggggcaagtcaagcctcctgttgccatgggggggtaggtcagagacatctgtgagtcaagcgtcaggggggcactgagtctaggagctttggggaggaagaaagggctgcctccctttcctaaagggcaggaagtcctgcagcccagaaggtgtggcaggacgctgggcagagtgctccctgggctttgcctgagtctggggcccagagtctcgtgctcctgtgtccctggggacagatgagcaggtgttctcacagctgcttcaacaatggagagaccagggccctgggagctggtggctgagagggacgtggtcccaggccttgctctggggtcagcgccagccctgtgccttgagactggggctggagtcctggagagcagagtccagccagacaaccaggacaggggccggggaggaacccccccaactcctcagggtaaaggcccagctctcagtctgcggaagttccccaatcacaataccatgcccatccttccccccgccgcagcagcacccagaggtgaggctgagatcatcccgtgcccccgctagccccggggcaccctgaggctgaggataggtgggtctgctcaccccgtaagcccagggccccacgccaggcctgggaaggctgacgtgggggcccgtgggatgatcgggtggccccaccaggcgctgtttggcacaatggtggaggaggtgcgctggcgtgaatgtgtgggctacgtcaacagcaacatggagaacgccgtgggctccctctacgtcagggaggcgttccctggagacagcaagagcatggtgggcgcccctcatccatggcccacgcggggccagccttccacagggacaccgagcctccctgccctgagactcccaccccgcccaggctcaggggcacctgccccagctcaccagacagagggaggctaagggaagccgtgcccaccccatgcccctgaccccagccggccactgggccccagcctgagccctgcaggtccagctgggaaaggcacaggtggtacaagttgcccctggcccacgaggacccacagcccagcagggaggaccctgaagttgggttgtcatctcatccccccaccggccccacacctcacctgagaggcccacagctgggcagccctgggccttgccccggcggggctcagaccagacctccccaaagcccttgaggctggtcattcgccctccagatgagtctgggacacgagggccatgcccgattcccaggtcagagaactcattgacaaggtgcggacagtgtttgtggagacgctggacgagctgggctggatggacgaggagtccaagaagaaggcgcaggagaaggtatgtggctcgcagaggtcagggcagccccgactggatctgggcacgggcagcaccgccccgacaaagcctcctgacggtccccacggggagaaggcagccccgggaggcgcagacaggaccccacggggagaaggcagccccgggaggcgcagacaggaccccacggggagaaggcagccccgggaggcgcagacaggaccactcgcccactgtggagctgaggaaaagcaggcaggggcaggaaccaggcctgggacatccccagcaccccccatgagccagcgggggtagcggtggcctcgggagcaagggtcagacccaccagaagctcctctggacccaagtgacagacggcagccgagtgacccctccagggcccctgcccccacccggacccctggcgggctgttgggctctaggtcaggtgggcggagccttccatattctgtccccattaaacctccccagagcctgcaaggtgggggccagatcccggagccccccagcccctcaccacaggacagggagagcacagccaggatgccccgggctgacccctcccacagtgtggcactcactgaccggcccccgggctgactccatccgcagtggggcacccactgaccagtccctcctccccactcaggccatgagcatccgggagcagatcgggcaccctgactacatcctggaggagatgaacaggcgcctggacgaggagtactccaatgtgcgcccccaaccccagccctaaactgccccccacaccgtggacatgggccctgattgcctgggggctcctctgtgccaagctctgtgccctcctcccaggcgctaacacagctgtcctcaccgtgccctagggtggtggctccagcactaccctcagtgtacagatggggaaactgaggcctggagggacgagggacttgctcagagtcatgtaaatgcccacagccagggctgccccgttcacctgcacccacagccgactgtccacgtgcggacgcctggcaaggcttgaggtccttccccaaccacccaggacctctccccttgctcctctgagggcccggccccagcatctggcagtgactgcccctctcccgtagctgaacttctcagaggacctgtactttgagaacagtctgcagaacctcaaggtgggcgcccagcggagcctcaggaagcttcgggaaaaggtggacccaaatctgtgagtggcatcgctggtgcggcatgggcggggggggccagggagtggccagtaaggcgtgcagggctgcctgccaggcgggggactggatgcgtggctggggtccagtgccagctgaggggtgcagtcactgggcctatcttggacagagtcccccatcaccctctgctttctggggcccaagtcgcctcctcctcagggaccccaggaaggaaccagatcttgggataggcctgggcccttgctctggtgtggccagggtaggccctggtccatcaaggcagagagagcccagagggagggtccccggagaggcggctcccagagaccggcttgtctatcacagctggatcatcggggcggcggtggtcaatgcgttctactccccaaaccgaaaccagattggtaagttcctccccctccctgcctgcccaggccctttggtgccagagttgaaggggtggcttgcagccccctgcccatcccttcctcctgggggcaccccagcctgttcttggaacattctcctatgtcaccccttgctgcccccgtggggaacactcactcccgtgcccatgagcggcttcgggagggacttggcaggcggcccagagcctttcctgcaggcagaacaggatggtgggaggaggccggactgaggtcctgggtctgccaggcacgagcccgcccagcctctgaacctccgtgtcttcatctgtaaattgagggaatcctgacctctgcctcccggtctgtgggatcaagtgtcagaacccctggcagcgccatccctgagcctggcacacaggagatgtgtccactcacagcttattctttgtcccgcccttggggacagtattccctgccgggatcctccagccccccttcttcagcaaggagcagccacaggccttgaactttggaggcattgggatggtgatcgggcacgagatcacgcacggctttgacgacaatggtgagcggccgcccctccaatcacacacgccctcccctctccgcggagaagcagccaggaaggggcctgggggcgctccattcaaccccttcacggtttcagtggggacaccgaggccaggtcctcagggagctgtgggggcagagcaggctttgaatgccaggctggggccctgtctgggggcactgactcccagcatggaggaggggacccagggactccagcccatgaccctgactccacctggcactgggcacttccctcccacggcctgtgacatggggacgacaacactgcccaatacagcagcgaagcccagatcccagcctgggagactctccagacggccagcatcctccaccggggggtgtgctacccccgccatggccatgctgacctccgcccctcggtggggactgccctgcctgggacaggggccccagctggttttcccctgtggctcggccatccggaccttccgtgggcagtccttgtccccagggaccacgtactcctctcgcctggaacttagagtttgggcatcccaggaggagcccttaaaccatgatgcctccaagaccacaggacccaggtgctaggccctagcctcagggggtggcatgggagaccactgaagccctccttctctgggggctgtgtagccccagacagctgctgccccttggagcccgcgatgctcttccaggctcagcctactcagactgtgggctctccgtactggggctggctgcaggaggggcaggagcggccaggcacagtggctgccgtggggccaggcacagtgcagccaggggcatgtgggcagccctcctctgcccctgcccaggccggaacttcgacaagaatggcaacatgatggattggtggagtaacttctccacccagcacttccgggagcagtcagagtgcatgatctaccagtacggcaactactcctgggacctggcagacgaacagaacgtgagcgctgccaccagcacccaggctgcgggggtaccggagccccagccctggccctgagggagagggaagtcagggccggggctgccccaatcctgtctcctgtgcgcaggtgaacggattcaacacccttggggaaaacattgctgacaacggaggggtgcggcaagcctataaggtggggcctggcaggggagggggcgtcagcgcggcaggggagggggcgtcagcgcggcaggggagggggtgccagtgcatcaggggagggggcgccagcacggcaggggagggggcatcagcgcggcaggggagggggcgtcagcgcggcaggggagggggcgtcagcgcggcaggggagggggcgccagcacggcaggggagggggcgtcagcatggcaggggagggggcgccagtgcatcaggggagggggcatcagcgcggcaggggagggggtgccagcacagcaggggagggggcgtcagcatggcaggggagggggggcatcagcgctgcaggggaggggggcaccagtgcctcaggggagggggcgtcaggggctcattcgggacaggtggtgtgcagtgggctgtctggccagggatccccccccgagggcccagctcaggggtccctgagtgactgaggtggtgagcgctcatccgtggggtgtgtgaagggcccttgcagcagcaggacccccacaggggtaggtcctggagccagacctctgctctgccctgagatctgagggttctggagtccaggctggcaggcctgagctcagctcctgtctggtgcctgcaggcctacctcaagtggatggcagagggtggcaaggaccagcagctgcccggcctggatctcacccatgagcagctcttcttcatcaactatgcccaggtggcagccgcagtcctggtcccaccatccccatgcttccccactcatctctggagggcccactctggggcacctccagggaccagagcc

SEQ ID NO: 4582 - DNA, 6000 bp, Homo sapiens
ctgattgctttttccatgtgataggaatgaccggactttctttggaccacccctttattaatcttgattatgtacaataaagataaaaactttgtagccaaccaccaagcccttcctatgcactggctcatttagctcctcacttcagtccagggaagtggctgtcattcgcactccccttttccagatgaggaaactgaggcttataaggggtgcccagggtcacccagctagtcaggggcaggggcaggattcacccccattctatctggctccagcccatattcttggccataggacagcacaatgcagtagagcactttacagtttatacaacgcctttttattttttttatttttattttcttttggagacggagtcttgctgtatcaccaggctggagtgcagtggcgcgatcttggctcactgcaacctccgcctcccgggttctagcgattctcctgcctcagcctcgagagtagctgggattacaggcatgtgccaccacgcccggctagtttttgtaattttagtagagacggggtttcaccatgttggccaggatggtcttgatcccttcacctcatgatccacccgcctcggcctcccaaagtatacaacaccttttatgcagcatctcctgtgatccccaccacacctgagtcagatgttattattccatccttacaaatgtggaaaccaagggtcagaagggcatggtgccttgctgtgggtcacacccgtggaagccatcgagctgggtttggaacccaggctgacatcaagcctgtgcttctcgctgtcctgtgcccatctcctctcttggggctgactatcaccttatccataattagaggcagttgatccccaagttgttgcagagctgagacagggtccccccagagggaggggggcagctgtagtattgtccttgtgcggacgtggtaccctgcaggtaaggatgagctttggagcaggcaggtagaggcctgaggttgatgctcagaacctgcaggctgccccgggaagctgtctccacccctccattcccacatggtgtttaatgagcacttactgtacatcacatcaccaggctttgggaatacagtgcttggcaaagcagactgtaggagaggcacacgtcaaacaggatgcataaatagcgaataattgcagactgtgataagaacttatggggaaaagtggagggtgcatttgttttgtcagaggagccgggaaggcttccccgtggaagaggcgattggactggaatctcaagggcaagtggtagtgatctaggggaactgatgtacgatctgggagctcatgaagggttttaggcaggaatgggagaagatttgtgttttgaaaaagtcactttcgccgggcgcagtggttcacgcctataattccagcacttgggaggccgaggcgggtggatcacttgaggtcaggagttcgagaccagcctggccaatatgatgaaaccccgtctctactgaaaatacacaaaaattagccaggtttggtggtgggtgcctgtaattccagctactcaggaggctgaggcaggagaatcacttgaacctgggaggcggaggttgcagtgaaccgagatcgtgccactacactccagcctgggaaacaaagcaaaactctgtctcaaaaaaaaaaaagaaagaaagaaagaaaagaaaagccacttgggccacaagcagaaatacgtgggggccagattaggtgcccctctgtgctcctatactgaaggcagccaggtgggcaaggaaggaggggatgagggaggcaggtgtcatggttatactttccgacttggcatcggccgctacagtggtgctgtctcatcctccttccgtgggtcatttgatatatttcctcagtgagaaaattgaggctcagaaaaattgaatgaccccgcaagatcataacagagccgggctcaaacatctcttccccaaatttctagctatctcccaggccatgtttgttaaatcaagatgcagcagactcacagcgctgtgctgcttgtcccattgtatgctctcgttgtatgtcattagcagcttaatgccagaattatttcagcattagagaaaataaccctttacatatatcatagttcaaacacatttcattcttatacctaccctatgaagggagataaaccatctccccacttcacatagaagcaaagtgaggcacaaggtgggatagtgatgtgcccagggtcacctggcttctagtgaatgcaggagctgggattccagcccagcctgctgactcactgggctgcacagagctccgctagctctgctgacagctgccactcattggcagggggtgggcctcttgtcttccacacaagggtgagtggtcctggtgctccttgtctggggtactggggtggggcatcctctgccatagacaagagagacttcacctacctgtgatctccccaggcaccttcagtgccccgtgggctgccctggcccacagccgtgagcagtactgcctggcctgggaagccaagtacctgatggagctcggcaatgccctggagaccatcctcagtggtctcgccaacatggtggcccaggaggccctaaagtacacagtgttgtctggtaagtgcccccacctgccccccaacaacagcatgcccactgccttcatcccaacacagtggtaccatagttttgcatgcccaaagcccccagggcaggcaccgtgctggaccctaggaacacagagaggttaaggccgcattcctgtctgggggaagtttatgatccctatggagagaagacaggtaaacagccaatcacatgatcagtccgttagctattgctgtgggacaagccaccccaaaactccatgggatgtttactgtaatagctcaggaggctggagttggtggatcttagctaggcctgtgggtcagccaaccatccaccgatcaatgctagccttgtctggggcaactcagctctgctccatttgtctctcatcctcctgggatgagcaggcaagcccatgtcaatgatagaagcgcaagaggctagccctggtgcacaaatccatttcaagcctcacatctattaatgtctttggcaaaagcaagtcacatggctgagtctagaggggatgggcagggcaggggtccccactgcagagttatgaagcaaagtgggagggtacagggtgtggagacgaattggggccatctcacacgtgacaagggcttgagcagaagggattgagtccatatatcagaaattcatgagtttcggatttctttgttctttagcagtttgattggcaaacttgcaggtccaagttggagactgcatgcatttatttgagcatctgttagccagtcacttccctagtaggaccctaggacaggggccattcccttcatcactatctcacctccccaggcattgtggctgccctgacctggccagcctcactcctcagtgtcgccaatgtcatcgacaacccctggggggtgtgtctccatcgatcagcagaggttggcaagcacctggcccacatcctgctctcccggcagcaggtacctgggaatggctgtgtgggcgtggcattgagcaagaggggaagtcaggtgctgacttgttcacagatatcagccttagaggcaaggctacttggagataactcaatggttttgggggtgtgggcagtccttgctgcctctccagttcaagtaatgaatgtgtcctaggatgaacagtaaaaattatagactctgcagctctagcaggtatttaggtaaggactgaataacagggcatctgcaggtaggaacaagtctgggggactctggcagaagcaaaagtggctcctatgtatcagctcttcattcaagtgtttaggataatcactgggctcatttgggtgatatttcagtggaaacctctgacgcagtttgcagtgaagccagtaaagtgaatgagaccaggtgcttcagctggccaccaatggaattcccacatgctggtggcctggtgttccttcccagaagtataaagctactttgtgaggtcatctttggtggtctaaataccatgtaaaatggttaggaagagacatcatcataatacttttaaaatttgaatctagtaaagatgtacttaccaagagaataaaaccatccccttcagaataaaacttgagtgaatggagacaaaagcttgagaagcagtaccagaaatgactgcattgtcaggatttgttttggctggaagtgggagaaaacccaaaataacagtggcttaaacaaggtagaaatttattttcctggagaagcctagcaaggttgtctaatagccttccatggtgcagaggcccaggttcctgctaccttgttgctctggggtcttgaccttgtatcaaagatggcatcatccgagctccagggagcaggagaaaggaagaactgaagaagaaacagcaaagccttacaacatttcagttggtgtctcactggccagagcctagtcacatgaccattcctagctgccacagaagctgggaaatatagtatttattctgagtgatgatgaacccagctgaaattcaattactatggaaaaaagggaggatggatattgagggatgacaactagcagtttctgccatgcagctaaactgcttgagcaactggccacccccttcaatccctgcgtctttgtcaaaagaaacagaaaatccttcggcaggcttgactctaaggcaaaggccaaagtggcattggcttagacaagatagaattttgttctctcccaagtaagagtctgggtgtcaatatctggagcaagatgatgtgttagtttcctgctgccactgttacaaattaccacaaatttaccagctgaaaacaaatgtactattttacagctctggaggtcaaaaggcaaaaatgcatgccttagggaggatcccctttccttgccctgtgctaagtctcagccctgtggccacctcaagctacggaggagtcagggaaacttcgtctttggctgggtggccgtgtgcccagtcaaactcaggagtaaaggacaaaggggagaatgatattgggcagtggccagcagggttggcacaaagctcctgcaggattcgaatactgtttaacagaggattttctactgtggtaagtggagtggtgtggggatgtggaatacgtgtattggcacaaaaccaaggaaaaggaatagactggtaaaaccaggctgggcctccagagctcatccactcccctcctctccttccatgtaagcttgtacccaaacacccccagataactttcattttctttagagtcttgacatgatcagttaccttttcttacaagtccttgagtcagaaaattcctctttccatctgacttactaccttatcttatcacttagagccaatattttgtgccccaccttcctatctagaaactgaactgttgtccctcccttgtcactcttgcctttttacccctcacacctgggggtgccttctgtctaatctccccagctccggaaggggtcccgcagcactgcagccatttgccgcaaggcagatcagtgcaagggaagttgctcttgtaattgactagccctgtctcctggggaagatgagacggtggctggataatgatttgagatgaaagggaattaacccagccgggggctgcctgttggccttggaggaagccaattccagcagcaggtgcactcctgcataaatgagggtcctgactctgctgattaagacatcagcgctcagggaccggaacagcacatgcatgattcattagatgagaatcaggtggtaaggaatgtgcaaaggctgccctcctcaggcctgatgttttgctagaactggcagtattccttccagacacctgtgtcctttttcccttcaggggcgacgacctgtcaccttgattggcttcagcctgg

SEQ ID NO: 4583 - DNA, 6000 bp, Homo sapiens
gctggagaatggggcctgcttggccaagaagaagacaaagatgaccaagaagacctgtgatcccctgtaccagcaggctctgctctttgacgagggaccccagggcaaggtgctgcaggtgggtgtcacagggcaagtagggcagggtggactcacagactggaagttgtaatttaaagtttttcatttatgattcatcctgtgccaggtgctgtggtaggtgcattaatttgcgttactcatttactttcacaaccctgtgaggtattactgtccccagttgattcataaggaaaccaaggttttgggggtaatcaaattgctccccaggttgcacagctggtaggtagaaccaggacacatgtgaccactgcctcctccttcccctagtgctaatgttcattgcacatcagttcagtgccaagccttgtgttaggtgctttccaaacacgacctcatttcatcctgcagatgatcctgtggagtaggtgtgattctcttcactttacggaaaccgagtctcttacagatgaagtcacttgcttggggtgagcccaggccaggtgactgtcatcccaattacttgagagcaacaaaggccttctgcacacttggtattgttagcccttctcaacagtcctgggagggagggatcttcatgctcgtttcatagatgaagaacctgaggtcacgtggggataaagcacagtggtggatcagtctctgggctcagtcctaggttcagattccagctcagcactcattagccgcgggtagatgtgactattaaacagaggattgcatgtagggagccttacatagggcctgccacataaacagctactcactaagtattaacaatcatggtggtggctgctgatcttgcctgaggccatggaggtgagagagaagaggctagagccaggggctgtctgggccatccaacttctcatctagggctgctcctctgggctgagatggttctgtggcaaggggccttggagttgcaaatttaaactgcagagccagacatggtggctcacaaccataatcccagagactcgggagactgaggcaggaggatcacttgagtccaagagtttgagaccagcctggcaacatagcaagatcccatctctaaaacatgaaaaaaaaaaaattatctggtcatggtggcacgtgccagtaatcccagctactcgaggtgctgaggcaggaggattgtttgagcccaggaggtcaaggctgcagtgagctatgattatgccactgcactccagcctgggtgacagaataagatcctgtctcttaaaaattaaaaataaaaaaagaactgcggaaccctaggctttggggagtgggaagaataatctttggtgtttgcttagaaaaggaataacggccgggcacagtggcttacgcctgtaatcccagcactttgggaggccgaggcgggtagatcacgaggtcaggagatcaagaccatcctggctaacatggtgaaaccccgtctctactaaaaatacaaaaaattagccgggtgtggtggcgggcacctgtagtcccagctactcgggaggctgaggcaggagaatggcatgaacccaggaggtagagcttgcagtgagctgagattgcgccactgcactccagcctgggcaacagagtgagactccatctcaaaaaatctcccagtggtgtggctggaaacactgaggtccagtgagggcatggagcttacacaagtcccacggcaagccagcagcacagctagagctatggccaagtcctgaactctcagtttgccccttcctggggaaggctgttatctgaaatgctgggaggctctggagtcacacacccaggtcctaatccaagctctgccacaagttactgtgcaactttaggttagctaattaacctttctgagctacagtttccttcatggaaataatgatacagagcacccctacctacatggcttgttataacaattgaaagaaagaatctaggtaaaatccataggatcgtatctaacacacctcaagtgctcagtaaattattgtgtgaaatcagtcttgagttctggctccctctgctccatctgtgccctgctgaaacgtgtaggttcctaggcctgctgcacagtcctggagtcagggaggtggctcactccctccctctcttcctcctggcaggtgatcgtctggggagactatggccgcatggaccacaagtgcttcatgggcatggcccagatcatgctggacgagctggacctcagcgccgcggtcaccggctggtacaaactcttccccacctcctcagtggcagactccacactcggatccctcaccaggcgcctgtcccagtcttccctggagagtgccaccagcccctcatgctcttaaggatgtcaggaagaggccaggatggtggtgtggggaggggtgcctgctggccccatgtcctcccctgtacatagtcttcgtgtctttctggaccccttgtcctgctgcatgcctgttggctactgggctcatcccagctggcagtggagactgtagtgtgtgcgtgtgtgcgtgcgtgtgtgtgtgtgtgtacgtgaccacgttctatctgttcatttgtctgggtatagtcactcctggtgatgatatgggctgaaatgtctccacgtctctttgtgtcttgttgaaaagaaacccaaaggagtgttgtgtggacatgactcaccctgaggagtctccagggatggaggtggggcatgcggccactggtcggtgctgcctggtcctggcctggggcagagcctgtgtgttcttcacctgtgcctgctcctggtggtctctgctttgttttctgtcttgtcttttgttccactcttgactctcccggctctgccactgttttctgagaaatgtagcatccgctgcagctggccacactgagggccctctgggaaccccaccccactggagccgctccggcagctcttcctgccactgaatgcgttctgcagcatgtagcatgcccacctagctccctggccagggccctggggaggcagagggtacccaggggactgagggcttagaaatgactttctctatgaggctggaacctcctccttcttccagtgaagcacgaggtcttggttccagggttcctggccaggtgcccccttagcatttgttcttcatctcctgtctcttcaagcctccccactccaccgtgccgaaggagctctgccagtgggcctgggcaggcagccacagagggcatgttatctgctaaagcaaacagtcctcctgaggccctgagggtggccctgaccccctcagggctcattcctggtgggcatgactcggtaaggaggttctgtgggtagggctgtttgctggaataaggagggctgaggctgagttgttccccgccactgttgaggatcccatctgacatttggggattcactgcatgaagttgttcatttggggctccagtttttgtgcatttccagaccagggtccctgtctgggagctcagacttagctgggctccagcagcctggctccggactctcgtctgccaccatcaccagctctgtctaagcaatacttacccctccgggcttccctgctttcctgtgccccactgctgccctctgcagagccatctgctccaggcacccacctgcctctgcttgctttctcacccatgtctggttggagcttctcacagccactcaaaccctgacttgatttgacaactgggccctgttggtggagaccagtgcctgaactggaccctgtgaaatctgtcccgtgggaatcctgaagtctgactcaggaatgcccagacctgtccctgtccctcctcagctctagggtgaaaggcgagaggttgcacaggacatggacagagcagcccttgggtttgtatctggtaggggagaaagcagcaggacagtggaggtgtgtggaaggcactctttccacctctctccaggcattatccccaggtgctgaaatggctgtggccccagcacctgaggcaggggtacgctacctggggtagcagtagaaaggtcttggggtctgaatgacttggggcctccattcataaccaaagttgtaggggcatggaggcagtggcgccttatggataggtcatctcagcccaaagggcctccttggctggcatggttctgtgttacgttgaagccagagtcttataacacctcccaagaaagataggggaagaagccagaaccccacctggcctgcccacaggacaagaagtgggtaagggcaggaaggaaatgaacggagttagctcccaggctcctatctctgcctgagcctctattcttatattatcagagaaagggaccattgggtgcatagagatggggaggaggccactgggctgaattttctctttaggcggaaatgctctccccaggcccattgcgttcgtcaagttcttggaaatggacaaagggctctgtcctcctcgaccctagtgggggatcaagaaggaaactccgttgcaaaagggtattttaatctcctgtttatgatatattcacctctagagcagtcactgtcagggtgttgcgaaaatactctacacctttgggatgatagggttgttagtgacccacaggacagtatagatgtttgtggatgtagcactgagtggtgatacccagaccagcagtcaccccaggaagtgggggctacccataccctcattcctctggtggggagctgcctgcagagaggcctgccactgggggttccaggccgtggtgacccttgcctctggggaagggttagcacaggggaggttctagctggaggaggggtctgatgtgctggtaacttgggctgacctacctacagtccctggctgccaaaactgctcagcagttgggccactccactattccacctctctaaaagaaggtaatttcctccccaaattgaccttggggaattattcttttaaccctttgcaccaaataagttactcatccccacctggattttaccccatgagggtaaagttgtgtgaggctgacacgtctgtgtgatgcagtgtggctgcacttaagggtctgtttctcagcatcatggatgcaggggcttgtctgaaaagccactctggacctagcctgtcccagaagaggagaatgcacaagtgtaactcctggttgtttgctggggtgggggagcatctgctgtttgaggacggggggtggggaaggaaggaacatgatccctccagaagtctcccaccctggggccaactcactgccatgttcagtgtcccggctccaaatgcccccttgcccagatgaaaccctgcagtggttacaggaatggagctctttgtcattccacctcctctggtcaggcgaggttcactgtgcatatggcagagacaggagtggccctgcagtgatgttgggttgtgggcagggacagtgatggatgactcagagcgtctgtctttgtatttctgctctgttcattctgtcccactttcttcatagactccttttccctgcaatgggtttttggtatgaaaaaggctccagtaaatggagccaagtcttggtttgacaaggggaacttgatccttcagggaagaatcatctccaaaatgactccccatctggtttcttctaccacccaattctactaggaaaggagcacttaggaggctcttgggatgcagcaagtcccaggcaatgccagcatttcatgggggctgaggcagaacccaggagctccaagaaaggccacccatagagctcatcctctgtggaatcactgccggttagaacactgaggtcaagccagtcctcccatggtcatgccacccaccagggaagcatgcctgatctcttctttactgccagccttgaggagagcagaagcctccatttttaaagacaataaagacctccaagggtacttctttggaaatgaa

SEQ ID NO: 4584 - DNA, 6000 bp, Homo sapiens
acctgttttgatccatgatgatacctattctggggagctttccttagaaataggtatgggaatgataaggctcatgtgttgaaagtgttcttttgggaccttgatgattctcactgtaaacttacagcttggatgtggacttaatatttatattttaaaatttggcccatcataaagctttggggatttctttcaaatggacaaaagaagacagaaagttataaatgcagcagattaattatatatatatatttaaattatcaaaagatccttaagggagaaaaaagagcagaaaacccgagtacctttccagaaaagcatattaaaactaattctattgttatatcttggtcagcaaactgaagacttggggtgagcaaagtattccagaaatgaatccctggtgctttgtgattcatgctggaaaaacaccaacagatcacaacaccttgagaaacagaaccagagagaaaaccacaaatgccaagcctgtttatatttagttttattcatgtttactgctttcctcttgtgaaatgatctagctaggcaggatgagggatactagcttagtaactaaactgtatttatatttatcacaattataaatgaactttagaagacacgagagattgctctgctgtttttgtatgcaatcaatgaatagtttaagacttccaatttaaattaaagttaaataaagttaaaaattcaatttgtcagtcaccctagccacatttgaagtacttaataactacatgtgtttagtagctactgtattggacaacagaagtataacatctttccctacttccagaaagttttatcagatagtgctattctagacaatacacttagaacttaatgttttttcatttactcttttcaaagaccctgtgaagtgtagaaattatcataattgtacagatacgaaaactgaggcatagagatgttaaaatttgcctgatagcacaatctagtgcgtattaaacatgaacctgaaatcaagtctttctttctcttaaaaatctttcatctttctatctacaacactagactgcctccaagatataaattagtatgtaggacacattcagaaaatactgatgaatttagagaatgaaatagatatgacatatattaatgatagaacaaaagcaaggagaagggcatacccgtagaccttgcctgactgtgctcatgtccaggcaggggggacattgtattcgagattaatttgaagttcctgccagctttatccagcttaatcagtggctggataaatagcaggactgtaacattcccctgggggaaaaaaggcaagaagaaaaggggagcatagggatttagataagaaagcgatataggccaggcacagtggtctatgcctgttatcccagcactttgggaggccgaggtgggtggatcacctcaggtcaggagtttgagatcagcccggccaacatggtgaaaccccgtctctaccaaaaatacaaaaattcactgggcgtggtggtgctcacctgaaatcccagctactcgggaggctgaggcatgagaatcacttgcacccaggaggcggaggttgcagtgagccgagatcgtgcctctgtactccagcctggacaacagagcgagactcggtctcaaagaaaaaaaagaaaaagagatatagatgactgattaaaaattatgagaatggattatgagaatgggccggttgcagaggctcatggctgtaatcccagcactttgggaggccaaggcgggcggatcatctgaggtcaggagtttgagaccagcctggccaacatgttgaaaccacttctctactaaaaatacaaaaattagctgggcatggtggcaggcaactataatcccagctactccagaggctgatgcaggagaatcacttgaacccgggaagtggaggttgcagtgagccgatactgcaccactgcactctagcctgggcgaccgagcaagaccctgcctcaaagataaataaataaataaatacataaataaataaaataaaaattgtgagaatgaaattccgccttagtttcttttctctgaaaagagccatattttagcgagaccctgcctcaaaaataaataaatacataaataaaataaaaattgtgagaatgaaattccaccttagtttcttttctctgaaaagagccatattttatatatgtgccaaagctgataaaatcagtggaggctatttgtacaaatgtaggacagtgtcgtatagtggaaagaatgttagatctggagttaaaatatctggatttctgtctgcttgcatcattagctatctgtgattgtgagcaagtttcctagtgttttaagtaattcacccaagattatgcaagtagtgagttgcagaaccaggattcagatgcaaatctttctaaccctagggttctatctctagtgtctatactcctaacctagactgtggtgtttcccctaacttctgaatctttctgatacagtttttgtccccatgaaagggaacattctcacacccacttggtttcatttgttgttagtaaagataaaatgggatcatacgtaggtaaagcccactgtgcagtctacattatcatgatacttattgtataatatctgattattcactattcaaagctctacctctgagaactaggtataaatgaagttagctcttgagctctgaaaatcaactaacaaacacagcccactcattggagacattcattcaacactatttacttattttttaaaagataaattgtattgtgtatatttgaggtttataacatatgttatgggatttatatataaatagtaaaatgtttagtgaagtaaattaacatgtctgtcatctcacatagttactttcttgtgtgtatgtcaaaggcagctaaaatctgcttatttaacaaaaatacctagtacattacaattttgttagccatagtcgtcatgttatacattagatctctagacttgttcatcctacatatgtgcaactttctatcctttgacctacatctccccattccctgccacctcccatttactcctaatttaggctaatttaattctggttttccagcctataacatatcaaaaaaatttttttgagtcagggtcttgctctgttgcccaggctggagtgcagtgacaagatcatagcatagttcactgcagcctcaaactcctgagctcaagcagttctcctgcctcaggcctctcagtgttgggattacaggtgtgaaccaccatgcctggcccatatcaaaatttatttgaggggcagagattgctactagagtcaggagtactaatagtaaattgtaagggacactttactacctgctagcagagagaaatataatgggaaagccacagatttggtgttggagagaattccagagccattaagttagagaagacagcctcactagcacctagagggcatctttgtacagtaaaatacttgaaatggttcaattggaggtacatggttcaagaaagcaaagatgtctataagacattttagggcaattcataacacaattattaaaataagaccgttttggcacttttaaaagcggtgacctattcaagaactagaaaaccggaatttttcattatattcaatttttgcccaaaagtttaagaggaagtattatactagtttcagtatatatttgccctaattttatcaaggtgtaatatattttcgtgatggtgagggtggagagagaacacagtgttcacatccaaaacataacttatgttcaaagggagaagtaaatctaaaccaccaagctgttacctttgaaaacaattaatggagtctattgtgttttaaccaaacattttagattaaaggattttgtattaaaggcaattcagatactccacaactcaaagataatgttggaatctggtttaaataaaataataaaatccagaaaatctactccaaggcctggaactccgcacagcaggttccatagcagagcaggttaaagtcaatgccttcacttgtcagtcttaatttgtttggtcttttagaagatagaagcatgccattactgaatgcaagccctcctcttcattagattaaaaagagttttcatccagctttttcagaaatagtaataagtgaagatttctattcatttttaattgttttgaaaaatattgtctctgtgctctgtggttcacttaatatgcttaatgtaaaataaagcttatgctttgaatttatgtttcatttagtgctgtgcaagcatctgcagaacatcagaaaagacttcaacagttcttggagttcaaagaatagttaagtaatataaactgtgttcattacactgctgatacaactacagatgggacagtaaatgttcagcattcttggatcagaagaaaacggactaattagatgcttcctttgtcgtggtggttgctttgaaaactatactttaatgggagaaatcatggaaagaaattctcaacagaataactgaaaactgccttttctgtaccgattgctttttgtgtgtgtggtataataaaatctttattcaattttacagaagcattgatggcagtcgaaatgtctctagctcatataacttaatagtaataactaaaaaacttttagaatttacttttgaaaggagggaagccagttctgaaatgagtataggttgatttcatagtcttcttaattaagagtttagctctttgtaaactcaaaatacataaactttttaagtgtagtttcatttactgaaggataaaaatggtaacagtgcagcaatattcacaaaaaatattgtctaacggacatattttgttaatctgttaggttgggtttttgtttccagggacaaattaaatttgtatgattacccaaaaaagggtctcagtttacagatgctaactctatataaaggaatgtggaaaaactcagttcttaagttacaagattaaaaattcacatttggtctttaagaaacaattgactgacatctatgaatttattttgtatcatgctagtaaacacgaagtattaatgtatgggtattttcccagctagttttgctttctttttctggagcaaaacattaagtgattgcagagtttttcaagcaagagaaaaaggtttgcaaaaaaacccaggaaatgttcccttttttccccaccattcatcttcattagatcaaattctgtgaaacttgtctggtctctcaaagggagcagcctctgtagtgttaaatggctaattaaaataggaagatctttatagccagaaacaacttagtcatcaaatagcaagtgaaaccaaaacgtcagagggattactgtacttggaagtatgttgtgtgtcccaaatgtgaacgaagtattgttagaatttattagatcagcttctttggagatcaaagattggaaatcctagtcatagatattcactggactggctttggactgaaatgctcctttgtaattcttttcctattgtcttttccttctagtgtcccaaaatattttctttaaagtcagcacagtactgtatatgaatctttaatgtggtatcatatatgtctacttttgtctgattcatcgatgtattatatctttataattgaatattttagctccgggtcctgttgccccttcaagcagtacatgccaaattataaataggtgctactggccttgagcatatcactgtgggacagttccccaattgtcaagtgtttagatatgtagactattgccatttgtttttttgttttggttttgctttgtgtctgaagctgaattgatttcttttttttgaatgtgaaagttgaatttcaaacgtagtcatttcttacagatggccaagacagaaaattgtggctaggttgactgagaactgttgtcttccatgtattaacacaattaagctttttatattccactctctgtgctgaccctggc

SEQ ID NO: 4585 - DNA, 6000 bp, Homo sapiens
ctgtaatcccagctacttgggaggctgaggcaggagaatcgcaggagttgtagtgagccgagttcgcacccctgcactccagcctgggtgacagagcaaggctctgtcccaaaaataaataaaaaataaaaccctagatcctaatcccagtcctaccactaagtcaaaagttcccctaacctcatcttccattgtcatctaccagtagggaagacacatgcctgacttcaaagggaatagataatcaaatgctttaatgataaagtgacttggtaataaacacagtggaagaaatttataaacagtaaactgctaaggacagagaccttctttcatggtttcttaaatccttatttcccctcaatcccaagcacttaaacaggttaagtaagaaaaagtattctctcacagaacacatactctacgggaagaagcagtcaacaaataagcataagacaagaaagatatggtaagtctatggaagcagaagacagaaaaaataattctcattaaggaaatgggtaacaaagctccctcaagaaagtattaacagagctgagccttaaaaagactaaaggccattacaaaaagaagaccactgagcaaaaatgtaagtgaagacagttcagtaagatggtctgtgtgcatttggctgtgtagaaaaataaggccgggcacggtggctcatgcatgtaatcccaacgcttcgggaggccaaggcaggcagatcacctgaggtcaggagttcgagaccagcccggccaacatggtgaaacccccacctctattaaaaatacaaaaaaactagccaggcctggtggcacatgcctataatcccagctactcaggaggctgaggcaggagaattgcttgaacccaggaggtggaggttgcagtaaaccaagatggcaccactgcattccagcctgagtgacagagtgagattccatctcaataaaaaataaaataaaaaataaaaataatagcctgggaccatattaggggccaaggggatttgtactgtactgaagtgtttgacctgtactgagcagtggggagttacccaaggtttccaaaaaggaaaatggcacatccagagctattcctaaggaagaccactctgatggcagtgtaatggagcagatttttctcgtttcagaggctattttagttgtccaatgaagaggttacagaacaaggaacaggcaaagatgaaaaggaaacagaatgacacctaaaagtcacagatatgtatgcaggcaaagaagtttagcctgggtttttttccaccttttagtgttattacacctgtcctttagggggaaatatgaaaatctggtttggtttgcttttgagatggggtcttgctacgttgcccagtctggagtacagtggcaccatcaaagctcactgcagcctccaagtcctaggctcaagccatcctcctgcctcagcctcctgagaagctggtggcacatacatggctaatttttaatttttcgtagagacggggtctctctctgttgcccaggctggttttgaaggcatcctccttccttggcctcccaaagtgctgggactagaggtgtgagccaccgtactcagccataaccttttttggtttttgttcgagacaggtcttgctctgtcacccaggctggagtgtagtggcacaatcacagctcactgcagcctcgacctcccatactcaagcattcctcccacctcagcctctagacctgcagcactgcacctggataattttattatttgtagagaacaagtctcaccatgttgcccaagctgagaatctggttttaaacataggtcaaaataactttctcgacccaccacaattttcattttatacagatggggtctcactatgttgcccaggctggcctcaaactcccgggctcaagcaatcctcctgtctctgcctcccaaaatgctaggattacaggtgtgagccaccaggcccagtcttggacttttttaataacaaaaatatcaataatcttaaaggatgacaaactatcaatcattcgtatgtcaaaaatgtacaaacaagcttgggcaacatggtgacctagtctctacaaaaaataaagattgccggcgtggtggcgcacacctgtaatcccagcactttgggaggccgaggcgggcggatcacaaggtcaggagattgagaccatcctggctaacacagtgaaactccgtgtttactgaaaatacaaaaacattggccaggcgtggtggcgggcacctgtagtcccagctacttgggaggctgaggcagaagaatggcatgaacccgggaggcggagcttgcagtgagccgagatcatgccactgcactccagcctgggcaacagagcaagactctgtctcaaaaaaaaaaaataataaaaaaaataaagattaaaaagccagcccaggtagtggctcacacctgtaatcccagcactttgggaggcagaggcgggcggatcacttaagtctaggcatttgagatcagcctggcaacatggcaaaaccccttctctacaaaaaaaaaaaaattagtcgggcatgatggtgcaagcctgtagtctcagctactctggaggctgaagtgggaggatcacttgagcccaacaggtggagggtacagtaagccaagatctcaccacggcactccagcctgggcaaaagagtgagaccctgtctcaaaaacaaaacaaatcaaacaaacaaaaaaattagccagtcatgatagtgccagcctgtactcccagttactccaggttgaggctgaggctgcagtgagctgtgacagtgccacttactctgggctaggtggaaatgcgagaccttgtctcaaaaattaaattaataaataaaaatgtacaacatgctttgaaaactgcagaaaaacggacccttcctttcttgagagtttctacactcttcctcctggataaaaatagcagagaattagctactcccacattggctcaccactatcccatccctcactttacccaagtaacaccaaaagcttgattatcaagttagaacaggtgacgactgagaaacacacaagaagaacaataacagagttattcaccttttagggtcgcagttttcaccctcgtggtaactaaattattcagatgattaccaagatcattttgtttctaaaagctcatatgcaagtttaagcctcctccccactttaggaggactggacttcagcttaaaatttggaccccactacatgccaggcaggcattgtgctaggagggctgggaaaacagccatgaacaacaacaacaaaaaatgctcccaatccaacaggaatatgccagaagagcaagaataattctaaaagaacaggtaaagcttcctgaagggctagcattctggttttgctttgaattactagtataagtcatagtaaagaacatactcaaaaattacaaatttttttaaaagccttcaaccagggagcacacagaacagaaacttcaggacctaaagcaggccgattcctaaccccgggagctacggacgagatcaacttcatcaataaagaagtccagcagcgccagccgccgtgtctggctgggctccttgcgctaaagtagtccagaccaggagggaaaaatgtaaaaccaacatggaggaggggctactgacgagtcggttcgggagctaaaacctcgtggctctttcctcatggcgccaaccagccttcctgctctgctctccccagccgggagaagcatcatcctgcctctccaaaccagcacccagcacccagctctcaggatcccttgaggaacccgtgctccaaatgaagttggagggtgttaaacggtgggaaaaacaagtagccacatcttaaaggctgttaggggagcaaagaaagaaccatctgggaggactccacccttctccacctgcagaaaaaaccccgggtaaagctaggaagtcatttcccttgtctctccttgccttgcggataaaacaaaggaaacaggctcctaagagggtcagacacccatacgatgacccccttccgtggatccaagacgcgtacgtcctggacaccgaagagcttggagccagtacaactttctcattgaagccgaccacgtttcctcttataaccttaaaaaacagaagcccctactattatcgtttcattgatgtcacggcacctatttggctctcagacttttacccggaaacccctgtaatccccagcccttgcgtgcagccccacactgggctccccttccccgggatgccgcctcgcgcgttcccgccaccctcgccctctcggccgcgcttcccggctcgctccgccctcggcaccaggctgcgccgcggggcgagcacgtctgtgccagaccggggcttgagggagtccatcgggggttagtgggggatcctgcggaaagccctctcccccgacactggagttgcaaaacaataagcatccgcttccctgcccttcccccataggaccccggccacgagttattaacgcggggggagaaaagccggaggagcactcccgccctgcgatcgtggccgcgtacccccggaacccccaaggcccgagtcttcgcctgcccccgccgcagcgcccccaggccgcgcggggcgcactcggcgctggagcgcggccgggagcggaggcgcgcgggccacgcggtggctgccgcaactgacacggcccgcggccgccggccacatgcgccgcccagggacagaagccgggaagggagcgcggctccgggccccgccgtaccttgccgctagctgttcccccgctgacgcctataaggaagggctcgccgccgttgggctgctggtggttctgcagggtctgctcgctgtccccggccatggttcgcgccgcccctcctcccgctgcctgtgcgaacggacgcacgctccccgcccgcgcccgcgtcggactccctccgctttccgcagccgccgctgggcgctgccggggctgaggccgctgtcgctcgcctgcgagccgctcggagcccggtgacggggctgggtttcccgaaggagccaagagccttcctttgcccgcagcggctggtccggtttacatcccaggcagaggtcagcgtgatgctgctgctccaatccgggcgggcagcgcgctgctattcgccgaggcggaggcggcgaggcgtctggccccagcctccgcccctcccgggccccgccgccgcccgaggtctctgcgaaaggtgtgagcccgaccttccctcccacccgcccggttaaccctttctccgacgcgccctagtggaccctgggggaaagaaacaggctgttctgtattttaatttggtatgctaccacctattttcagaagggataaaaagcttgaaggaaataataggcagattagataagaaggaatggcccaggtttgagaagcaaaatttgaacaagcttgaaagattagtgtggaacgaagagttaatgtcatttacccattatccaggctaaaaacttgtgtttccaaaaaatgagggttctttttcccttctcccgttcgccaagataatatgtcagccgctggctttagatatttcctgtcttggaaaccccccagcgccatcctttttagcaggcctgtcctcgtgcgactctctagtgaagggcaatttgaggggcttatctgaagggtgccctccgttggaaaagcaattcccttctaaaccacagtatctcatcccatacactgagcttcctatggagttagggtatctgaaaacatactgacattttgatccattaatatcttcaattgaacggttttccagagattggcaatcagtcacttagaaaggcagtttcagactccacctctggagccagatttctgcattcacatccaggtccctgagcaagttacttaatctctctgtgcttcagtgttcttatctgttaaatgggaataataatggcaattac

SEQ ID NO: 4586 - DNA, 6000 bp, Homo sapiens
acaaactggctttctgcaacagaaaaaaatccataaaagcttcaggtatagttggatccaggattcaattgatgccatcaagaaagtgtcgggccaggcatggtggcttacgcctgtaatcccagcactttgggaggctgaggcaggcagattgtgaggtcgggagttcgagaccagcctaaccaatatgatgataccccatctctattaaaaatacaaaaattagccgggtgtagtggtacacgcctgtaatcccagctactcaggaggctgaggcaggaggattgcttggagctgggagacggaggttgcagtgagctgagatcgcgccattgcactccagcctaggcaacagagcaacagcgagactccatctcaaaaaaagaaaaaaaaagtgttttggctgggcgtggttgctcacacctgtaatcccagcattttgggaggccaaggcaggaggatcacatgagtttgagatcagtttgggcaacacagaccctgtctctctaaaaaaaatgttttttaattagccaggtatgggccaggtgcggtggttcatgcctgtaatcccagcactttggggggccaaggctggcggatcacctgaggtcgggagttcaaaaccagcctgacccatcctggctaacatggtgaaaccccgtctctactaaaaaaaaatagaaaaaattagccgggcgtggtagcgggcgcctgtagtcccagctactctggaggctgaggcaggagaatggcgtgaacccgggaggcggagcctgcagtgagctgagatcgcgccactgcactccagcctgggcaacagagcgagactccgtctaaaaaaaagaaaaaaaaaaagcagcctgatgaacatggagcaaccctgtctctactaaaaatacaaaaattagccgggcatggtggtgcatgcctgtaatcccagctactcgggaggctgaggcaggagaatcgcttgaacccaggaggcggaggcttcagtgagccgagatcgtgccattgcactccagcctgggcaacaagagtgaaactccatctcaaaaaaaaaaaaaaaaaaaaaaaaatagccgggtgtggccacgtgcacctgtagttccagaaactctgggggctgaggtagaaagatcacttgagcccaaaaggtagaggctgcagtgagccatgaacacacaattgcactctagcctgggtgacaaagcaagaccctgtcttgaaaagaaaaagaaagaggccaggcacagtgactcacgcctgtaatcccagcactttgggaggccgaggcgggcagatcacgaggtcaggagatcaagaccatcctggctaacacggtgaaaccccgcctctactaaaaaacacaaaaaattagccgggcatagtggtgggtgcctgtagtcccagctactcgggaggctgaggcagaagaatggcgtgaacccaggaggcagagctggcagtaagcaagatcgcaccactgtactccagcctgggtgacggagcgagactccgtctcaaaaaaagaaaaaaagaaagaaatgtctactgatctcttgaccttttttttttttccttttgagacaaggtctctgttgtcgaggccagagtgcagcctcaaagtcctgggctcaaggaatcttccagcctcagcctcctgaatagctgaaactacaggcatgcaccaccatgcccagctaattttttaaattttttgtagagatggatcttgaattcctgggctcaagtgatcctcctgcctccacctcccaaagcactgggattatgggcatgacccactgcagccaggcatttcttgactcttctgtgtttccttcattgtcagctaaataattctcaaaagatggcaagatggccaccaagacctccaagtttataacttacttgctcagccagcccagaggggaataaaaatttccttcccaatagttctaacaaagatcctaggattgcacctcatttgggctgacaggtcactaatcccctcctactccccaaccaccccaaccagtcactagccttaggaggcagggatattggaatgctttgatttgccaagcctgtgtcttctgcccacaaaggaactgcaaagtaaggcaactccaccaaaccacacagactgagagagtcagaggaagagtagttccccaagggaaaaatcagtgttcttatgaggaggaagaatagatgctgagcaggcaaatttagtagtccaccactacaaggtgggctggagccacaggtaataggtgggtcacattcatggcagtccatacaagtggacttacctcccccgctttttttgagacaaggtctcactctgtcgcccaggatgaatgcagtggtgtgatcatttcactgtcatctcaaactcctgggctcaagtgatttctctcccttcagcctcccgagtagctaggactacaggcatgcacccatcatgcccggctaatttttaaattttttgtagagacagggttcccctgtgttgcccatgctggtctcaaattcctggacgcaagtgatcctcccacctcagtcttccaaagtgttgagaaagtgttgagattacaggcatgagccactgcacccagcctctaacagaatttctttttttttctttttttctctataagaatttctgtggctggaaaaaagcactcccagtcctgctttcttctttgcttgttgagccagggatagtcattttccatccctgggccacttttccccttgaagggaaggactgacttggtgtaaaatctgtcataattggccaggcgaggtggctcaagcctgtaatcccagcactttgggaggccgaggcgggtggattacgaggtcagaagatcgagaccatcctggctaacacggtgaaaccccatctgtactaaaagtacaaaaaaattagccggacgtggtggcgggcacctgtagtcccagctactcaggaggctgaggcaggagaatggcgtgaatccgggagatggagcttgcagtgagccgagatcgcaccactgcactccaggctgggcgacagagtgagactcagtctcaaaaaaaaaaaaaaaaactgtcataatttaaaaatatacatctgttgaattggactccatattttcattagtgcaggctacataccttggagtcatccttatctcttctcttcctcacacactcctatccattttgtcaacaagtcctgttttgtttttgttttaatttttttttagatggggtctttctacatttcccaggctggagtgcagtggcactatcacgtctcactgcagcctcaatttcccagggctcaagtgatcctcgtacctcagcctcccaagtagctgggactacaggcacatgccaccacaccttgctcattttaaatttttttttttgtagagacagggtctcactttgttgcccaggctggtctcaaactcctgggctcaagcaatctttccacctcagcctcccaaagtgctgggattacaggcatcagccaccatagtcagcccaacagatcctgtagactttaccttcaaatccagaattcaaccatgtctcaccatctcacccaacctggtgcaaacgatcaacatctcttgctaagatcattgccacagcctcctgcctggtctccctgcttccaccttggtgcccctgcagtctattctcaccatacagctggaatagttcttttaaatagaagttcaaaccctataatagctctgcatctcattcaaagtaaaagccacacagccctacatgatctatcccttctcatgtcctactcttatatctatacctgtgtcacacttgcctccttatttctcaaacacaccctcttggctgggcgtggtgtctcacgcctgtaatcccagcactttgggagaccgagactggcaggtcacttgaggtcaggagttcaagatcagcttggccaacaaggtaaaaccccgtctctactaaaaagtacaaaaattagccggtggtggtggcacgtgcctgtaatcccagcactttgggaggccaaggcaggcggatcatgaggtcaggagattgagaccattctggctaacatggtgaaaccccatctctactaaaaatacaaaaaattagcaaagtgtggtggcacacacctgtagtcccagctacttgggaggctgacgcaggagaatcacttgaaaccgggaggtggaggttgcagtgacccgagatcacaccactgcactccagcctggggacagagtgagactccgtctcaaaaaaacaaacaaacaaaaaaacaaaaattagaccaggcgtggtggtgcacacctgtaatcccagcattttgggaggtcgaggtgggtggatgatttgaggtcaggagtttgagaccagcctggccaacatggtgaaaccccgcctctcctaaaaatggaaaaattagccgggcatgctggcgggtgcctgtaatcccagctacttgggaggctgagacaggagaatcgcttgaacccgggaagcggaggttgcagtgagccgagatcgtaccactgcactccagcctgggcaacagaaagggagactccagtctcaaaaaaacaaaacaaaacaaaaacaaaaattagccgggcatggtggtgcacgcctgtaatttcagcttgttgggaggctgaggcaggagaatcgcttgcacccagcaggtggaggttgcagtgagccgagatcgagccactgctctccagcctgggcaacagagactccatcccctcaaaaaacaaaataataaaataaatacaccctcctgcctgagggaccttgcactaactattccctctgcctgaaatgccccctttctccagaaatctgcaccactgactcactcatttccttcatgtgtttactcaagtcaactctgaagcctgctctgcctgccctatttaaaactgcaaccccatccccctttcctgtttttccttcacaccattcccatctaacatactacagaatttaccaattttgttcatgtctatctcctcccacttgactgtaagctctatgactattaatgaaatatctactaattcattcaattaattgaatactgctattaagtgccaagcactgtgctaagcaatggagctacaagatgactaaaactgcttgtaggtcttgtgagggaagaatcctaatgacaataaatgtagctcatttagtcaatgcttctccaaacatcgtgatggctaatactaaaacagactcagttctgcatgctctatttcatttaaccctcaccgaaacctacacggtgaccatcagcagcctcatcgtaaagcataaaaaaacaagattgcaaggctgggaaatggcagtcaggatctgaaccacggtgttgacaatgagaacggtgagtaacgtcaaatgtgagaaatatttaggacttaggctcacaaagactaaggcaaagatcggatgtgggggccgagggagggaggaaatgactcctggattttgactggggtggactaaagcgcagtgaggcctaagagaaggatgaagcgcaacgtggggctgggctggaggtgcctgcggaccggtcagggatatggtccacccctaggggagcggagaggcggctccgcaccctcctccggtcgccgccgccccggtccaggagatgctgagagaagacacgcacgggaagagcaggaggtgggttccgttcccctccctcttgagtctcttcaccagcagctgcaggaagggcgtgggggaccgagagacaaagagcgcgcaggcaccgcctccgtccgggcggcccctttaagaagcgcgcgccagcttccagcccgccttgtatgcaaatgtagcggcgcggcgggagcgcgcggctgatacccgggactgggctgcggcggttagtcctctcccggccgccgtcgcctccgacatattgcccgcaggagctgcggcggcgaagcggag

SEQ ID NO: 4587 - DNA, 6000 bp, Homo sapiens
acctaggaatccaacttacaagggatgtgaaggacctcttcaaggagaactacaaaccactgctcaaggaaataaaagaggatacaaacaaatggaagaacattccatgctcatgggtaggaagaatcaatattgtgaaaatggccatactgcccaaggtaatttacagattcaatgccatccccatcaagctaccaatgactttcttcacagaattggaaaaaactactttaaagttcatatggaaccaaaaaagagcccacatcgccaagtcaatcctaagccaaaagaacaaagctggaggcatcacactacctgacttcaaactttactacaaggctacaataaccaaaacagcatggtactggtaccaaaacagagatatagatcaatggaacagaacagagccctcagaaataacgccgcatacctacaactgtctgatctttgacaaacctgagaaaaacaagaaatggggaaaggattccctatttaataaatggtgctgggaaaactggctagccatatgtagaaagctgaaactggatcccttccttacaccttatacaaaaatcaattcaagatggattaaagatttaaacgttagacctaaaaccataaaaaccctagaagaaaacctaggcattaccattcagaacataggcatgggcaaggacttcatgtccaaaacaccaaaagcaatggcaacaaaagacaaaattgacaaatgggatctaattaaactaaagagcttctgcacagcaaaagaaactaccatcagagtgaacaggcaacctacaaaatgggagaaaattttcgcaacctactcatctgacaaagggctaatatccagaatctacaatgaactcaaccaaatttacaagaaaaaaacaaacaaccccatcaaaaagtgggcaaaggacatgaacagacacttctcaaaagaagacatttatgcagccaaaaaacacatgaaaaaatgctcatcatcactggccatcagagaaatgcaaatcaaaaccacaatgagataccatctcacaccagttagaatggcaatcattaaaaagtcaggaaacaacaggtgctggagaggatgtggagaaataggaacacttttacattgttggtgggactgtaaactagttcaaccattgtggaagtcagtgtggcgattcctcagggatctagaactagaaataccatttgacccagccatcccattactgggtatatacccaaatgactataaatcatgctgctataaagacacatgcacacgtatgtttattgcggcattattcacaatagcaaagacttggaaccaacccaaatgtccaacaatgatagactggattaagaaaatgtggcacatatacaccatggaatactatgcagccataaaaaatgatgagttcatgtcctttgtagggacatggatgaaattggaaatcatcattcttagtaaactatcacaagaacaaaaaaccaaacaccgcatattctcactcataggtgggaattgaacaatgagatcacatggacacaggaaggggaatatcacactctggggactgtggtggggtagggggaggggggagggatagcattgggagatatacctaatgctagatgacgagttagtgggtgcagcgcaccagcatggcacatgtatacatatgtaactaacctgcacaatgtgcacatgtaccctaaaacttaaagtataataaaaaaaaaaaaaaaagaaaagaaaattctataactggccaggcgcggtggctcatgccagtaatcctagtactttgggaggctgaggtgggcgggtcacgaggtcaggagattgagaccatcctggctaacagggtgaaaccctgcctctattaaaatacaaaaaattagccaggagtggtggcacgtgcctgtagtcctagctacttgggaggctgaggcaggagaattgcttgaacctgggaggcggaggttgcagtgagccgagatcgcaccactgcactccagcctggcgacagagcgagactcggtctcaaaaaaaaaaattttataactaatgtggaaacagttttatgataagataacatgtgcatgatggaacagagtgaacatttttgcaagactagtcaaagcaaaattcaagacttcaaaaaaaaaaatgtgtacttgggaggagcagtttgctttgtttatatcctcagaccctgggctatgcactcactttactctgctattagtaatgataataaaaagagctaatacttgatgtatctgctaggataggctagcttatacagtggtaaacaaacaaaactcaatggcaacacaatgcttatttcttgcttatgctaagttatcctctatgggctggcagagagctcttgtttatcagctacacagaaatccaggctaatagagcaaccaacatcttcagcatcaatagttgccatgccagagggaaagagaagcacaagaggctcaaagcaacaaataaatgcttcagagacaaagtaatccatcctttctgctcaaactcattggtctttcccaatcacttgaaggccaggaaataaaatcctaccatgtgctcagaaggcaaaacgccagaaatatttagtgaagagcgctaattgtctatcattcactatctaccaagggctgttctaattatattacaggcattatctcagctaagcctcataataatcttgtgaaataggtactattaatgttatcatcattcccattctatagatgaaataactgaggcaccaagaggctaagtaacctgctcaaagtcacacagataataggtggtaaaagctgaagatttaaacttaagcattcttgccccagagtctgtgtgcttaaccacaaagccatgagatctctcactaggtgggaacaatttgagaaacactgccataggcaatggagagccactaaaggattttttaagcaggaagtgtgagtccatcagaattggcatttaaaagctccctctagagagcacggtgaaggattaatttaaccagatttagactaaggcaggaaggctatttgcagagtgaggagatgaagatggggagggcttgaactaaggtacaatcaccactcaccgcaattaactgggttttgttgttgttgttgttgtttgagacagggtaacggggtacattgggggttggaggggtggttcttactgtgttgcccaggctggattccaactcctgggctcaagtgatgctctggctctggcatcctgagtagctaggactacaggtatgtgccaccacacccagtaactagttaatcttgactgtctatttcaactgaaaaatggttatggtaatacctacttggatgggttttctgaggaaaaacaccccaatgaacttgtgtgtttttaaaagtcaagtcccctaggcatggctagaagggaagaggcttagccagaaaatttaattgttgtgattaataaagtaatagaaatgtttagttttcctctgatgagatgaaagctttgaggggatcctggtcttgggagaaagtaaagaaatggaggagagggtttcaccagagtttagataactcttagcatctgcttactatcttccctgattaattatttccatggcagccagagtgaccttttaaaaccacaaatcggatcatgctgtttccctctcccctagtacagtgcctgatacttagaaatttctcagtaacatcgtgctcagtgaatgaatgaatgaatgagtgaatgaaaacacaagccagatggcaggtggatccctaaggaaaaggacagccaatgagaaattatctgtagcaacggtggctttggatgatgatgtttaataatcatttttaaggagttgcctgttgtgtgctatgctttaatcactgtcccccacccttcccaaataacgttcagtaaaagtctgccacaaaaaactcgctgttttgtgagaatttaagaaatggaagaagaaacaaactgtctgggcaccaggccaaacaatatccaaaaaggcaggagtcacagaggagagctaatgagtattagtgggagcaggtattccaagtgagaggtgaccagagtcctctgaaaatgtggggagggggtgacgttcctatatcctgggttaggggcttggactcttatatttggctgttggaaaaaacaagctggaggactttggggtatcaacaaccctcaggttacataaggatgatcatagggtcgttgtgaggattatgttgggatagttcatgcaaagcgcttaacacagtgcctagcgcatagtaagagctcagtaaatgttagttgttgtcttccttcactttcttccattccctccactccctttctaccaggctccattcattctcttccaaggacacgcagggggcgtgcccaccccttccctccgcccccacccaaggcccgccccccgcttctccacggattggttcccgagaggcggagctgaaggaagagcccagtgcggcgcggtgggggcggggcgcatgcgcgagctgggcagggtggaggtggggaggaagagctgccggaagtaggcggtggaggtggtagcggagctgacggcagctgccagggaaaccgaggcgcgggacgcaaggccagcagacaggccggccagagggtcatctgcgtccggcacccaggaggctcgtggtccgcctttgcctgggctgagggtctctggccccgcagcctctcttggaggcgggcctgtccctaagcccgccaaggggcgccgcgccgaggggctgcggagtgggggacggacgcccccgacccgggaaggggcgtccggcggggccggaggagagggctctccccgctcaggaggtgcccctgggcgggggaccgggagtcctcaaccccggactgaggcaggggtctctgggggcgaggagggcgcgtcgccctctgcccccgccggcaccctggccatgacaggcaagtcggtgaaggacgtggatcggtaccaggctgtcctggccaacctgctgctggaggaggataacaagttttgtgcagattgccagtctaaaggtagcgcatcccacctggcgggccaggggtccagccgcgccggggtggtgggggtgggctgcgtgaagaggcggtttctgaagcttaggccgcccaactcggcttataagtggtaacgcgtgctgcgcttgcagtgagcctactgggctttctgcagctgggggattggtatgggtagagcttgcgagggcgagtctgtgtgtgtcggggagggtggaggtgatggtgcgggtggaagttgcctggcgtgttcaggtgagaatgtctgtatttgagggctctgaatgagttctgggccggctgtccagagagagctcccagcatgtcacttgcaaagctggggatgaactgcattgcgtgcgtgcgtgcgtgcgtgtgtgtgtgtgtgtgtgtgtgtgtgtgagagagagagagagagaatgacgaggaggaggaggagggaagtgagatggcggaaaggaaaactgcttaaatgatttttaaaggtggtgatttttgcttcctgctatttggttagcaactcctgtcattttgcagccttgctaagatctgacaagagtgcttaggtgactttattcttctggatgtgtgcagtgggaaactgccttatgcagtgacacagtgcggatttctaggcagtgtagccctggcttgtagagtgcgttggaggcctatgtatgagtggtggcagaaactagccgattatgcctgtagtgcaggatccgtttaatcagtggagagagaaagatgaattcgatgaattcattgcttccatggcgattacacttctaaaggtgaaatatgatcattgtaaattggcagaaccatttagtctttgttttctgtgccctagaagattcatgatttgatacaattaaaagtcagtacaataggaaatcttg

SEQ ID NO: 4588 - DNA, 6000 bp, Homo sapiens
tctgctacaaaaatgttaatttccaagagtttttgtttgatccccgactttcctttttggtagcctcttgctcttatgttgtggattcaggatcttctcttatttcatatttctgaggattccagttgtaattttctgctgttttcttctgcttcctagattgtctctgttgtttattttggtctctggctttcaagttggagcttatcctcagacaataacagctaccattgagtatcagcccctattttaagtattttgcatgttttagctaatttaatccttacaacaaccccgggaggtagagccaggccctggtccctcccatcccaagcctggaaggttctcagttgagaatcagctttcttcttgctgatgtcaagggttgatgtcaggaaccctttatctgatgtttcccccaatcctgcctccctctgcaggcacctgggttagagttcagtttttcctagctctattactagtgagccctctgctttccttcattaaagaaatgtattgacatctctattgcacagttacttactgtcctgttctctttgtccttataggcttttccttttgcactccaagattgtcattttagatcattttgggaggtaacagagataagcatttgtgttcaatgagacatgtttatttaactggaaatctagagctccctctttttaagtcaggaagcatatagaccaaaaaaattacagtgattattactggattctgagattacgattatgagtgatatctttatctatgtctgtatctgtttttctcactcatagagttagaagtctaaaaagaacatttcagataagaaactcattttatgatgtgatttagactatctgataaaatgcttctggagaaagcagtaaaaatattaattatgacaagttataaattggtacaattactttggaaaacaatttagtatcatctataacctggcaatactacttctaggtatatattctgagaaacgctttacatttaaaaattattgaggacctcagggagcttcagtttatatgagttatattttttgaaattttccatattaaaaattaaaactgactgggtgtggtggttcatgcctgtaatccagcattttgggaggccaaggtgcgaggatcactttaggccaggagtttgagaccagcctgggcaacgtagtaagaccccatctctacaaaaaaatttttaaaaatagctgggcttggtggcatgcacctgtagtcctagctactagggagactgaggcaagaggatcacttgagcctaggagttcaaggctgcagtgagctatgattgtgcctttgcactccagcctgggcaacagagctagaccctagctctaaaaaaaaaaaaaaagaaaactaagaaaaattaaatataattactacttttaaaaataaaaataataaattatataacaacaaaacatatatttatgaaaagcaacttttttgaaacaaaaatattactgagtagcactgctttatatttatataaatcctttttaaaaaattaatttttttttttttaagatggagtctcactctctcgcccaggctggagtgtggtggtgtgatctcagctcactgcaacctccacctcccagcttcaagcaattcttgtgcctcagcctcctgagtagctgggattataagcgtgtgccaccacgcctgggtaatttttgtatttttagtagagacaggatttcgcaatgttggccaggatggtcttgaactcctgaactcaggtgacccgcctggctcagcctcccaaagtgctgggattacaggcgtgagccactgcacccagccctaattaatttttaattgacacatatggtacatatttatggggtacagagtaatattttgatacatacaatgtgtagtgatcagatcagggtaattggcatattcatctcaaacatttatcatttctgtgttttggggacattcagtatcctttcttctttatttgaaactacataatatattattgttaactatggtcatcctacagtgctataaaacagtagaagttgttcctcctacctagctgtaattttgtgttattgaacaaatctctccctatcctccccttccctctccagcctctagtaacctctgttctgcttttcacttctatgagattaactttttctttttttttaacatctaactatgagtgagaacatgtggtgtttaactttctgtgcctgacttatttcatataacgtaatgttttctagttccatccatgtcactttgaatgatgggattttattctttttaatggctataaatattttagatgtctggcttaatagaagacagctgtattctcaagccagctatatctttcaatctgctgcagtatgttttgtggttgaagtgtatgcaattggaaaaggagcatttcagtagctttttcagataatcgtggatattctttgataagacaccaaaactcagcaagtggtagttttttaaagcttagttgtgacatgaaatctgaaaccatagcaatgacctttttatactctattacagcaacactcacagttttttcttgcattttaaatgaatgttttacccatgcagggttttgtcaacacacccattggtcatttggaaattgctgagtcactgagttttacagatcttctaaatgttgacacatttcattatacaacatcaaaaaatcacatttattaatatcaatgccaatctcatcagaaaagtcttttgctattgtgagggtatcaagcagcagataaaaattttccaaaattctaatttttgctcaaaagattgaatgttctcattgacaacaaacactgtcagttgcttttcctgaagtgacaggtgcactttattcattttggagaaaatgcctgccaaatacccaagtctgaataattatactttgtctttcagctgtactttcaggtaagaatggtgctccatgagtcaagcgattacttcagctcacaactcaatcacttaaggttttttcctcgataaagtcatcatactttgatatgcagcgtaactgtttatgcatccttcccattttgtcacacaaactattaaaaagatgtgtatctaagagttgaaatttaataaaatttgtaacttctactacagtttggtgccacttcctgatttgtgctagctgttttacccactattgcttttgcagtgtccttgaaaatgtcaataccgtgaaaaaggcaaataacgtctttattatgatgaatgtagttttaacctggatgatagggcctcagggacttcaagtgtttgtggaccacacattaagaactggtgctctagagaaattcttgcacatgtgagcaggaaatacctatcaagaatgttcagggcacgaggccgggcgcggtggctcacgcctgtaatcccagcactttgggaggccgaggcgggcggatcacaaggtcaggagatcaagaccatcctggctaacacggtgaaaccccgtctctactaaaaatacaaaaaaaaaaatagctgggcgtggtggcgggcgtctgtagtcccagctactccggaggctgaggcaggagaatggcatgagcccaggaggcggagcttgcagtgagccgagatcgtaccactgcactccagcctgggcgacggagcgagactctgtctcaaaaaaaaaaaaagaatgttcaggacagtattatttataaaagctaaagcccagaaacaacccacatttctatcattaagggacgagagaaactgttggtagatttatataatggtctactatatagcagtgaatgaatatcctagtgctctgtgaaacaacctggattaatttcagtgtcttaatttgtacacccccagaacagagtgtgaggtgtgagacaagtacttcagttcaagagtgtatttaggaggtaatcccaggaagcagaaatgggaatgagcaaaaaaggaagaaaagtcaataaaaggtgcagtacggagctacttaccactatgaaccaccgtgctcactcccattgggaacactcagaggaatcatgtcgaatacagctcagagctgaaggtgcaagcctggagcattttgtcttgactcctctcactgttgtttatgtctccgaggtgttagctttggtgaacttctgggctgcacagccttccaaggctttgtagaaagccccaagacaggcaagcagaaaaatgccatggcctatgaggtgacatgctagcagcttgcctgcaagtctcagctacaccaaaattgggtgggctgaggggacatggtgtgggccaccacagatgtctgctagactcagaagctaatgttgaataaaaaaagggaataattgggaattatgtacaatgggctccatctttataaagttcaaaggacataaaaatgtgtaatgtattgttaatgatataattatggagattatgaacatacagctaaggatattatgaaagcaagacaggcgggaagcgtttatcacatgttggaaaacagcaagcttgcttatcagaaggcacatgtcagggtgtagctggagataaagatagtgagttaaagaaggtggttaattggtggatgtctttgaaaccaatcttccaatttactctgatttgaaaagtaaagggggaaggttttcagaaagaatgtgataggatcaaaacgcatcagagggaattactattggcagcattggaggaaaagggagtggaggggcaaacgtgcctcctacccggtcagtcatactcagtggttccctcatttttgggagcctcctctttgctctgttcttttatcaggggcatacagacagggtgtggcttgctggtttacagggacagcgagaagggagttctgtgggggcagagagagccctggcctctcatatttcataaaatatgaacttttcccggcccacatccctaggccttcctgatgcgcttgcctgctccctggtctctctgcatggggaaggagtgttcccagcttgcaaactccagctttgcctgtgagaggaacaagcgtccctgatccagaaggtggtgagtcctcctctctctcttcatgctttttagtcctttaactttctcaggatcctcaggtttagtagagaaataatcccctttctccttacgcacaagaacattttcaagggtgaaatggggcagttgttagctatcactaaagaaacacaaaaggagacaagtgacaagattgctggatgggttttgttgaagtactcttatttaagtagtattgtcatcattattaaattaaagccaacatttatttagctcttactatttgctggacgctgtgctgtgtgcttttagactgatcaattgcagatttgcagggtcatattaaactgcttgggactgtcaagagaacatctgttacaatcttttttctgatttagaagttttaaaaattaaactgtttcaaacttaaaatgtaaataactgccatgtttccaacatgtgtagtggaaaaaaatggttagtatatgcagaattttgcaaaccattaagaaataaatgtcccaatagataaacgagcaaattacatagacaggtaattgacaaagtccaaataaccagtgagtaatcaaagaaatacaaattgaaatgaatcaccatcaaacaaaaaaaaagggatggcattttgttactcatgaaattggcaaatttttttttaaatgataatatccagtgatggtaaggttgtgggaaaacaagaaatttcataggatactttggtaagttgatatgactttctggagggcaatttgtcagtgcagatgaaaagtcttcccattttaaagatgggaaacttaaggcctaagaatctaagtgacttgcttaaagttacaaagtcatggctgggcgcagtggctcacacctgtaatcccaacactttggggggccgaggagggcagatcat

SEQ ID NO: 4589 - DNA, 6000 bp, Homo sapiens
aaacttactccacacaaatagacctactgctcagaaaagggtactaaaactttgttcattctggtgattctctaggctgacctctggttaacaaaaggcaaagtggtttttatcttagaaaaggaaggtgaacttaatgactttgttaaaatcaactcctttaagagtaattgctttttatgttatcctccaactattaagtattatctgttaaaccgtaaagttctttgttttatggtcatctagatactcccaatccctagtttcttaacaaaaataaatgattgagctgttttagctgaaaaatgattcagctaacagatcaattatttgccttagtaaagaaaaataataggctcttttaaatgtttgcctagcacgtttgaaatcacctataaaaattcaatttacataacattagaaatatatctacctcagttaaagtatacctgtggacaaaagttcagttcctcttactgaactattttccaagtttgattataggctgtttgaggcagatttcagtgggaaataggaaacactaagtctgatttagaagtaacttgggcaattaggtctctaacagcacaaccacgtattaaattccagacaacagcaactacagccacttagggggtatgttatttttcccctcatctatctgaacaaccataaatacaccaaaatttgcctttcccattagtttttttttttttagttggaatcctttaaaattttgtctgcctttcatcttttagaccaacagtcttactttcatgtttaaaggcagtgaccataacagtcaagttaaacacaacaacttagattgcctaaatttgaatataggccttttttttttttttttttttttttttttgagagggagtctcgctctgtccccaggttggagcgcagatctcggctcactggaagctctgccttccggattcatgccattctccagcctcagcctcccgagtagctggcactacaggcgcctaccaccacgcccagctaattttttgtatttttagtagagacggggtttcacagtgttagccaagatggtctccatctcctgacctcgtgatccgcccgcctcggcctcccaaagtgctgggattacaggcgtgagccaccgcgcccggcctgaatatagactgttacctaccagctggatgaatctctggactccttttcctcaactacaaaatagggtataaaacagtatctacttagacctggcgctgtggctcacgcctgtaatcccaacactttgggaggccaaagtgagcagattgcttgagtccctgagttcgagaccattgcttgagtccctgagttcgagaccagcttggcaataggatgaaccctccccctcctctctaataaaatacaaaaaaaaaaaaaaaaaaaaattagctgggtgcggtggcacgcacctgtcgtcccagctactagggaggttgaggtgggaggactgcttaagcctgagaggtggaggctgcagtgagctgaaatcatgccaccgcactccaatctgggtgacagagtgagaccccgtatcaaaaacaaaacaaaacaaataaaccagtatacttataaaagtaaacaacaagccgggcgggggcggtggctcatgactataatcccagcactttgggaggccaaggcaggcggatcacctgaggtcaggagttcaagaccagcctggccaacatggtgaaacccatctctactaaaaatacaaaaaattagccaggcgtagtggtgagcccctgtaataccagctactcgggaggctgagacaggtgaatcgcttgaacccaggaggcggaggttgcagtgaacagaaatcaagccaccgcactccagcctgggcaacaagagcgaaactccgtctcaaaaaaaaaaaaaaaaaaagaaaaagaaaagaaaagaaggaaaaaaaagtaagtaacaaatacaaagcactttaaacagcagtcagtccctggcacatcagagttatagccataaaataaagatatgcaatcttctgaagtatgattcacgattgtgtcttatctttaactcaaaattaaaaatgaattacaagcagaaatgtgcaccagatttcttatcattctaaatttaaatggttgaatgtgtcctcctcagctaagcattttaacagccactgatgagcaatctagtaaattgaattcgctcaaaataaaggtttccccaagagttccccccacaccacaaatcaagagctctgataaagacaccatccagaatcaactgaatgtttatattaacatgtacaaaccactgagtacccccccaaaaaatcaatatctcactccagtttagtagttaacagtgacaaaacacaaagcaactagcttgtaatttctattaaaaactttaaatatttttcctgtaaaaccaccaaaataatttaacaacaacaacaaaaaatcctaggggtattaacaaaaaccaacttttgtatttgaaaaaacgtcaaaaggtacattgaaaactgactccctaggaaagatgagtttattttactattaatttcaaagttctcattcacaattagcatttcactcttttatcttttaaatagatacaggcttcagcacctttccaaatattgaaatttattggttttggtttccaatctatgactttttgtttaaacttctggatctatcgattaaaaaaaaaaagcaaacaaaagacagtctcttgttcaaaagggcacgacaatcaggtactccatacctaaagtatgttttcacttgttaaaatgtcttacactattctagtaaatatctcaaacttaatagcaccctaatttcctttcaaatattggataaaaaagaccttagaaaagatcagcagtctactaaattacaaatataagtctaatgaggagtgactaccaatcactttacttttggataagatttacacaagaacacgacttactactaaactaaaacatgaaccactattattaactgtatttttctggtaagcaataaatgtcaatgttaaaaatatttcaacaaatatgacaagccaacttcagagcacgaagttggcagataaaattgacaccacagcacaatttcaaaactataagcaactattaaacacacacaccaccgcaccgcacccattcttatgtaaacttttggaatagtcaactttgtgagcctcacctttgttttcacccagcataaggagagttaaaggtgagacaccaactgcaaaaaaccaaaatatcaaaagattcagttaatgtccccacaggggaaaggactaaaatctttaaacgttaatgtatttaagtaatcgaagggcagggcacttccccaagctacagccattttggattcagactgtctttcgaatttcacgggttggggagaactagatttaaaacaacagaaaaaaaataacacttaaaacatttcaggatcgaccagctttccctgcccctccaaggaaaggaggttggtagatatcggatagactcaatctaagcgaaaacacctcgctaccacagagaaccggaaagctgggggttaaaacttttttcccctcagatatccaacatttgacttacactttttcctccttaggttttcctttgaaggaaaacaaaagcccttagctctcatttcaagaaggaaagaaaaaaacccgtaagccaagtcactcaacgagcaccaagccggatcgcctggagaggagccaaagagccgcaggtgagcgttccgacccgacgaccgaagttaaagtaggagcgctttcgcggagccccggcgacgctcgcgtgcaaagctccatgcacgggggaggcgggggtgccgcatccgaaccacttgacccgtgggctccgctcgcccctctcgggtcggacctatacccaaccacctgtgtgagagcttctttcaactagttttaacagcccgttggttaggcaccgggcggagccccgcgccagaacgactccaggatctcctactgccccgtttcccaaactcccactcaccgggcagcggcggagctatggccagggactagacgctgcgtctgaggacgcgtccccagcttgtcgacccggcagaggcggctagtccacaaccataacaaagctcttcccaaaatggctgcccggcccacaaggtccaggaggggcagagcgggtggaggaggaggagcgaccagcagcacggccctcccatcccccgtccgaccccgccttacacacgcccacctgaagaagcgcatgcgcaagggactgctccggcgaccctcccggacgccagttccctacgctgccaacgttcggcctccagaacggcggttatgccctgccccgcccccggctcccttcttcgccgcttgaggcggcgcatggtcacctctgccccctacagaattgaatcctctgcctttcctcgtgccgcctgaggcacggacaagcctagtttagtacgccccttctaacccccttgcccacttccagggcctgggcgcgtatgaatgagtgggtgggtatgcatgtgtgtatcccttttttcttcaccctcccacagcccgccccttggccagtgcgcgtcccgaaactacctctacaaggacttgcaaaccggtttcggaggaacgtgtgttttccggccctttcccaccttccgctccttacttctcgtgtgcgcgtcgttgagactccagtccccagcgggccacacggcctggccccggaggctgcgcggctgcgtcggccgcgctacccgctgggagtagtagttcccctggagcgcaggcgtcactcccccgcccaagcgaagggcgggattccggcgagagcctgcgcttgcgacagtgccgtttctcctacctgaagtctcattgggtatcgcactactggaaggggcggcgctgccatgacagagaaggcaataaaactgaaggcctagctcgactaaaagcgcttactattaaggaagacttcgctgtggctccatccggcacggaaagctaaaccgtgtaatggctggcaaccaggaagctagactacctagaatccggaggattggagggactggccggcgtgggcccctgagatctcctactacatgtcttcagttttatccatagacacggaagggcactaaaattgcctggtgccatttcctgtgaaacaagtctagataagagaagggacttgcccaaggtcacatagccgagaaataaagccgagggcagtaggagaaatgatctgactttccgaaccacccccaagcctagggcccttatcaccacacctttcatggaagtgaaaatcctgctcttgtgctctttaacccttaatgaagtttataggtcccagcaaagaaaatggatgtaagaactgggcttttttccccctctaaatgatagtaaagggccctaatgcagtgagatgtgtccccataggccttataaaccctgttttgcaaagtaaaacataagtcccacagatggcaagcaattcaggtcacactgggcctaaaatcccgtctcttaccttccttcaccaccatcattctgagattgtttcagtacttgcactctacttacccgaactctgtgggcagattctgctgcctgggagccctggaatagaacttcaaggaccgttcaacatctggattcaactagaaattaagaatggcccccaaacagaaagccgggcctaggaaccaattagcgcaggtcaagtccctacccggactcattttttttcagccctcaggaagtaggggcctctctgaatccacttgccggaagtgcctttccagtggacctgggctgttgttgcggttgttttccttctctccgtgcaacgctggcaagtctcaaagtcgccacaggtgcaggttgggatgggaggcaccaagggttggtagtaaatttgcgacgttgggatgggagggcaccaagggttggtag

SEQ ID NO: 4590 - DNA, 6000 bp, Homo sapiens
tgtaatacacaggacagtccaccacaataaagcattaccctacccaaaatgtcaacagtgtcaaagtagagaaactgtgatatggtaaggccgactctcccaatggaaagagcacacgctgtgatgccaggcagaaaatctagggtttgaaccctggctgtgtcttactctgtgcctttgggcaaattacccacccttttaaagccttagttaccacatcaataaaaacgaagataataatagctacttcagagaactgttgtgaggattaaatgaaataataatttatatatagctctggtatatggtaaacattcaataatggtggaatgaataaattattacataaggccttattatccctgacataaaggaaagacacttctagtataaaattctactatggaattgtggggtatgatggggaagtagagggagctcctgggctgcttagccgtaagcaagattctgataagcctagattctgctgaaggaattatttgttgaacatagtggttaagagtgtaggcatgaaaccagaccgcctggattcaaatcttagctctacttcttaccagctatgtggtcctgggcaaaatacctaacttccttacgtctcacttcacccaaccataaaatgggaatattattacctactttgtgaggattaaattagctaatacataaagcacccataacagtgactggtatatagtaatcactccaagtgttagtctccatccttcttgttctaaggctgagggggagactccaggcactaagaggtaagtctgtcatcacagcaaagaaaaagccacagaaactctacaatggacggccaagaagtcccagaggtaggtctcatatctggaagggtaaaacccagaggacatcaggcaggagctataagaacatgtgaatcaggcacaactgtggacacaaaagcaacaaaaacagagtgaagattcccaaacaaaccaagacgtgctcccgggccaggaaaagtgggccacaacagttggcaccctgtggtggtggtggctcaggaggcacactactaagctgccctacacagggtgaagtgactgccagcacccagcagagtaggtgggatggtaatcgataccttctcacaagcaatcatgtttcttcaaactggacagcctagagatggatgccaagcccttttggccaacctggccctcgatgccaggggcagcaccagtgatttactttataccagctcagtccctagggcagggcttttatctttggtgccatggaaagagctaatgggagtgtatatttttatagacaagctccacagctctccttatatccttaatccaaaagaaggtaaataaccaccactctaggaagttctaattgaaaacgcttaaatatgagagggctcaccacttttttctcattttccatcagatcataagctcctccactaaactataatctctcttagaacaaaaactacaaaatctagccgtgtgtttcattcactattgtactctcgggcctagcaaaaacaaaaatgtttttaaaaacaaataactaatgaattggcctaattaattaattggtgcttccaggctcctttctcctgctgccctttcttctgacttaaaatatttcagaatttcatatccgtaaacagctaggtgtgagagttccccaaatttctgaagctcagagtgacaagtccatagtctaacaacacatttatcttgagcagagaaatcagactttcctcctagttccttccactgatcaccactgctataataaattataaaaacagtgattggctgcctcaaatttctaccctgctcaaagccaacaacacaattacaggcagatacccatgtgcacacaggtaagccacacaggcaaacacatcagcttaggttagtcctgtgaatgtagtggtttaagaaagaactacatttgatgacaactggaaggatgaccagagccatccccaaaagctggagacaaggaatattgcagacactgcccacgctctgtctgacaggcagcactgacactcggcagcatgataaggcacacgtgccacccccagccaactcctcacccgcctggggactgcttggggcagcccatagtgggagccctggggccgctagattgaatcacttttctatttttggagcagcctatactcccctctgcctctggcttacaaagccagagaaggcaggatgcctactcaaagagaaaaagacaacatgctcttgactctttcaccgccaaaatgtggccaaggctctgagggtcgtcttctcatgcaaatatccgtgttctataaagcctgagctaaatgaaaaccccaaactctactctgtagtagaaggcacaaaactcagtttccacgcttcatcctattttgacccagttgcggagcccatgttccagttgacctacccaacaaattctccacctttgatgggaagagctcattcgggcctgttgccaacagagggctgaagggctgaagatgtgacttgtggagcgtgggtggcattatggaaatcagaaaccaggaacggaagttgcctggcaagagactacagtcatgaggctgggaggaaggcaggactcaggagtccccaggtgcccggaattgcctcccaaatcccaagaacgctctggacacaaaagtcgttcgtgacccttccaggccaagactttctcattcggactcctcaaaattagagccgtatgggactttagagcacatccaattcaaatcgttctttttaaggataaggaaactgaggcccaaggtcacaccgtgagagagtggcaaaggatggacctgaacctagctccacggacttcagtccaagactcttccttgtaaatcccccaggattccaagcaccgttcccttccgggtttttctacacctgtgaccccaccttcacctacccaacccttccagccttcaattcccaccctattaccccaactccaccaagcttagtgcccgccccaagaaagctcactgcagaggggattcctccacgtgcttccctccaaacctcccacctacccaattcctcctttcagttccatcccgagttactacgggaccccgccccgcctccaaaattgcaccctccttcctcacccgcacctcaccccgacacccgggccccgcccgcccgggaggccccgcccctcgccgtctccccacttccctcggtggctgctctcacgccctggcccctctcaccggtaaagccgcttagtgtggaggacttttgcttcgggctcgctgctctcccctgtgggggggccttggctcatggtgcccgggtccgggggcagctcccggtcacaggcccctgccacccaccactaccgccaacactgccgtctccggccgtagccgcagccgccgccgccaccggccctgctcggccgccatcgctgtgaggcggctgcccgcgacagctcctcctccgcctgccaaatctcgcgatggcagccgcacagttgcggaccagtggcctgctgctaccaaatctcgcgaaactcgttttccctcccgggaagttgccagaactaactctgggcagcatggcgtctttccggcttctccaaacccttgcgaaaaactttattggcaaagctatcagagaacggacagtgtacccactgaggcggccaaagcttaactggatcagggcaggtgagcttacagctaggagcgtgactgctttgtcctacaatggtcatttggtccatccttctgcccctttcccgcctccccgtttgagccaagcctctttcagattactggttagagtgactccagctttcccttttcccccataatttaaacaaacaaaaagtgcatgtgaaagtttccttggaaagggccgagcatcacataggagtaaagccccggaagaaatgacttgtacaagcgtctcggcccttcagctcccctcccaaagatttccagcttgcatatctatctcttacgagccagtaacatttattgaactgccatcttccagccacagtgcaagattctagacacacagaggtgagcaagctagacactatccctgccctcccaaagctcaaatgattttagggataaggactcatagaaatgagaagctagtccctaacgtttctatctcctaatcctcacattggaaatcagggcaggtgggcttacagctaggagcgtgactgctttgtcttgttttagcttaaaacctaagttaaaaagcaagggtggtttgttttgttgttgttgtttttgcctgtgtatgaattgtaatgagaacataaattgcccttctaccactatgctcctggctgcagccacccaccttctttctgttcctgaaacagcctaagtctttcccatccattggtctttcacttgctgttcctctgtctgtaacactcatactcctgatttcccatcaggtttcagctcaaatattaccttaccaaagaggtctttcctattaaaattgtctaattgatttagttgctaggcttcttcattatgttaccccaatagaacataagcttctcaagggcagagacctcaactgtcatcttgttctcttctgtgtctgcctagctaataattggtgtccagtaagtatttactgaatgaataagtgtacaaattccatttctgggtatcccagcctactccgagcaccctttgttgcacaaatccacttttctccctctgctttcctgagctgggagttcttacgcattccaggtgcctagaatgtgaacttacccctttgcccagctgcatcccaactttcagaaaggatgacatcctcctctgatgcttttttttgtcggcagattcagcagggcggggcctgcccctttaagctgggccccacctgctctggtcagacaggttttgagacacaggtaaagggagggagacagagagaaatacttgcagagccagcaggtagctgggcagctccttcccggacggacggatggacagacgctggggaccctccactccatatggaaagtaagaggatgtcatgggtccaaactgcaaggtttggagtgcccttgagataaaggaagggaatcagtcccatccagaagcaatgagatggagggcagcagggaggagagaaagacaggagagaaggcatagaaaacagccatgatcagacctaaatatcagaatagcagacccaggccctgcagagatggatgaggtgggctagtgaggagtttgggaactgaccaagtaccagtgaaggaagagggtgcctggaactgccagctctttgggtcagatcagttggcaaatcactggtctcacttggaatgcaggagggttccaagcagggatgtgtagggatgggacagtggagaggaagcttctctgtctacagcaagatcctcagtgggaaagaaacttggcaaagttctagacacctcttctgcctcctattcctgcattagagtggccatgactccaggggttttggtggaggggcatagaaggcgtgggtggaggctgactgagttcacagctgccagggcctgtgtcccttgactcaccctctcctgttggacggcatttgatgtcgaaagggtgcctccatttcagctgctcacttccttccctcctccctctgtttcagtgtcttcctctgtaccacgttctccctaaggctccagaaggggccaaaacccatgaagccagttgccctggagagtatgagttctgtcaacctgtcctaataactagaagacaggggtttctgacagagctttcctctgttccctgcaggatgacatgaccttgtggtagatcccagaactgaggccccaggatgacagaacaggagaccctggccctactggaagtgaagaggtctgattccccagagaagagctcaccccaggccttggttcccaatggccggcagccagaaggggaag

SEQ ID NO: 4591 - DNA, 6000 bp, Homo sapiens
gctgtcacctagaagtagggagaacctgggaataaggggtcccaagtttggcagcccaggtcaccaggtggccttgggccaggctgggggctgctgggctggacaggcctggggttcgggaaggaggagcatgcacagggccagccttggggagtcggttcagagtccagggagcccctgctgagagtaggccaggcccctgcatctgtttctccctctgtggatttgtaccttagagacaagaacactgtgacatccagaaagggcctgctggcaccagggctgtcgggcaggtgggctcggaaaggctctggcctctccccatagcaggagcctccagccaggctggaccctggcccactcccagctccccagaaagggcggtcccagcttcctgcttggctggccttgacattgtttccatttgggccagcaacccaggcagcctgaggccagactgcagctcctgggctggttgctgggcgtgatggcagggggctgctaggacagccagcgggccccagggagagacttcccgggctcagggtggtgtctgggatctgatcccagcctggctgcagctcgaagcctttctcctcccagggcctggccaacctaaagggccatagacaaagcttccaacagcactcagcgtgggagacctggccggggcggccgtgaggagcagtttgccgtgggacccctagctctgtggcccagccctgcccagatgccctgacacatgcccaaggcctgggcaggaggactcgttctggggattctgaaacagaagctagaaacctcatcaggcctggagaatcagacagagactgctctgcccagaacccccgtccgcaagcagggctgggtgcagggctcacactctgatcactgcgaacccttcagaagccacagagcccttctgccagctccccggccagggctgcccaccctctgtagcttgaggtctgaacctcatgagttttctgtgggcagagggaagcagccaaacccaggctagtatctctgggtgggaccctcctggcagccagcgcccacccccttcaggaccaccccttccccttgcaccttggcaagatccccagaacccaccatcctccttggagattgaagagaaagaacacccagggtggggcctttgtaaccccccaccgggtggttaggggcagagcagagggtgtggagtaggacaagggcctgaccttcctcccagcagcccctggggcccctttggactgaaaggtcaggagacagaagcaaggaaggagggcggcttgggaggcggggccagaggccctgagaagggcacccatgaggcagggcagcccgggtgccaagaagctgccctcagcccctccccccatgccacacccccagtggaacctcctgactgtgagcaggagtcaccgcctccagggagcccatgcctgcatcacaaaggaggcccagaagccttcaggcagcctcaactcagccccaagccactgctctcccatcccagtccctggaaatccacccacttggcccagctcaccccaactccaacccactgggacccagtctccaggggcctgactgtgggcggcagccactcctgagtgagcaaaggtgagttgtgctgaaggaaggtacccggcctgctttcctgggccttgaaaccctctccaggccctctcctgggccttgaaaccctctccaggcgctcagcccctttctcaggaggctgggcagggcgtcctgtgtgcagtctcgcctgtgccagggcaggcagccccctctggcatacggtttatcttacccaaaggacccgctgtcccccatctgtagtaacctggagaggccacgagtgtccccagggagccgcagtgccttcgcctcagcagacactccacacctgccccgggtacttggctcaatttgaaggtgtttattttgtgtgtgccgtggggcacatggagccgtctgtggatacctgcaggacagaatgaattcaggacgcaggagcagattcattaattctgaccaaagaaagaagttcgtggaagctgagctcagacttgtccaaatgattgatccattcattcatcattcattcattcattcacccaacagataatgaccgaggtctctggggtgggggtgccagtctaggtgaagcggcccccacagagggtgcccctgcccgtggagctgacgttcccagggggctgcagaagtatcgaggagatgtggaggtggagctgggagtccctggagagacacagagcaggggaggggctggggctccccgagttgaacccgaggccgagccaaggaaggccccactgggaaggggagcttggcaggaatctgggaggcctgcctgggtgggtggggagggtggggggagaaacctggtgggcctgcctgagggtaaggggagggcatagtgagaggggaggagggccaaagagggtcctgacatcagggcaaggcccggctcttcctccaagggtttggctaccaggggccagggagtgacggcctctgattctagttacaggcccctgggcccctgtggtggggatcagtgggtgagacagacccctcagggggaggtgattggtggggcctggaacaggcagcgagtggcaggaatgagaaagggtccgactgagatgggcttggaggctgaggactggcgcggggtgtggacgcaggcaagggaggcagatggctccaaagtccagcttcagccagtggcgggataggggtgtctaggggcacagcagagggcgtcaaaggaagcatctgagggtgtgtggatgcatgaacgctgcggttcacagagccagggactgagagaggtggctgaggggacaggaagggaggagcgagggacctggaggagaggagtgaggtccaggtccccgtccccgctcctcacacagccagaggtcagggatctctggaggagtcgctgaaatgagctggcccagccacctttgcagggtgttgcccagacaggctaagggacatctaggatctcccagggagtcagggacagaactcaggcaaagtccacagcaggggggcggtggggtacaggggggcggaagcacatttagcccaggtgctggcagtctcagcagccagtccctgacccacccacaggcaggactgggcctggcttcctttcgctgctcccacattatccgccctgcctggtacagggctaagctggggctcagcacagcaggtgtgtgattgcgtgtgacgactgaaagtgctggaaggccaaagcacccagccgcttccctaggaccgggcaacttcccagcagggctccgagtgccagcgagggatgtgcacatccatgcatgtgctcacatatgtgcacacacacacagacatgcacagccacacaccagagcacacgcacacacgtgcacacccacacacacaatcatgcacatgcacatgagcgcacacgcacaggtgcacaatcacagtcacacacgtgcacacacgagcgtacacgcacacacgtgcatatccacgcacacaatcatgcacatgcacacacaagagcacacgcacacaatgcacagtcacacacatgcacacacgagagtacacgcacacaggtgcatatccacgcacataatcatgcacacgcacacacgagaggacacacgtgcacactcaggcacacacgtgcatatccacataatgcacatgcacacatgagagcacacgcacacgtgcacaatcacacagtcacacacgtgcacacacgagtgtacacgcacacacgtgcatatccgcacacataatcatgcacacgcacacacgcgagcacaggcacacacgtgcagtcacacacatgcacacacgaggacacacacgtgcacactcactcacagtcacacacatgcacacatgagcgtagacagtgcatatccacgcaatcatgcacacgcacacacgagagcacacgcacacacgtgcacacacacacatgcacacaccagagcgcacacacacgttcacgctcatgcagtcatgcacatgcacacaccagaacatgtgcacacgtgtgtgtacacgatcatacatcagaacatatgcacacacgcacagtcatacacatgcacacgcccaactacatgcacacactcatttgcacacatgtgtacactcaggttcacactcccacacatacacgcacactggagcacgcagacttgggagcctcctgagtccagtgtcctgtgccccaacccttcctgcccagctccctgtcctgcctacagcagcagcctgtgcccagccgtgtgtgtcttcaagtgctgcccactgccctgctggctccagaaggtgtcccctccatagtaacagggtcaggggacgaccagagctgcacaccagccaggtggctgccagggttgagactcaagcctgcctggccctgcagatcccttcctggcccacgtagtcaccgcctgtgtgggtacctactgttctggtgtcgcccatcactggcttctgggcttcaacaggaaaggtgggctgggagcccagaagcccaagtggcctccccgacagcgtccctgacctagcgctcaggcccacagctccaagacaaccagcatgagcagcccagggggggggctccactacaggagtcccttgacagcacaggagctgagcctcctgggtccagcttgcgaccccaagctgggagcatcccagtcctagaacctccatgcactcagagattccggcccaggggtagtgtggaaagtcccgggacccagtcacccagggttgtgagcttggagagggagacgggaagagtgttccaaaggcacccagcgcccgctcccagccagcatccggcccttccagcctcgggccgggctcggggagctccacgcccctctcccctctcccctgccctgggcctgcaggttcctccgcggtgctctcccgtccagagccctgctgatggggaagtccgaaggcccagtggggatggtggagagcgccggccgtgcagggcagaagcgcccggggttcctggagggggggctgctgctgctgctgctgctggtgaccgctgccctggtggccttgggtgtcctctacgccgaccgcagaggtgagtgcgggtgccccgcccccgcctgtccccgtgcccgctctccgcgctcgccccgctgcacctgctgcagggtccgcctgcccccagcccgagcccgcccgtcagatggggcaggtgggtctgcactgggcacccaggggctcccggggccgagctgcggactcagaggcggcgggaggggcactgacctgcagggagcccgcggtcccttccagaaagctctgccccggccccgactcccgcgcgctgcttctgcagctccgcacccgcccgcctccgcctccgcctccgcctccgccggactcccggagggtggggggcgcagacccgtcgcccgcccctccgcccaccccctccctgcctggccgcgcagccccggctggggaccaccggcgtccgtgtccctcccgccgcccgggctcacctggctgcctcactcccccgctgccatcctgcggagagacctgagggtcctgccgcccccgccccgctcaaggccgggtcaggtcacgggaccacggcgggaaggggccagtctggggtcccacggagacaaaggcgtggccagggctgctcgctggaacctcgggctgtcccgggaacactccccccgcccccggctgtcccgggaacactccccccgcccccacgccggcccctcccttgatctcccctcttggttcaggggctcccaggcacccgtagacctggtcaccttccagccgcccctgccagcccctccgcaggcacagccctggtccctctgagaccgggcagcgcgcacacatcggggagcaatgctcacccccggggcaggtgcgtagggcgctccc

SEQ ID NO: 4592 - DNA, 6000 bp, Homo sapiens
tgcctagccatagtaggagctcaacaaatacagacctctttccggcctggactattgcaatagcttcctaatcagcttcctctgtccactcttgtctctctgccctccacacagcagccaatgggatctttttaaaaggtgaggtcatgtcaattcactgcccccaaccctctacaactgtccatccacacccctaactgagtagacaaggccctacatcagtggctcctggaactgctcacacatttgaaatacctgtgagccactagcaaagacatggaatcaacctaaatgcccatcaatgacagattggataaagaaaatgtgttacatatataccatgaaatactatgcagtcataaaaaagaatgagatcacttcttctgcaggaatatggatgtagctggaggctattatccttagcaaactaatgcaggaaaagaaaaccaaatacctcgtgttctcacttataagtgggagctaaatgatgagaactcatgaacgcagaaaagggaacaatagatgctgggacctatttgagggtggaggttgggaggaaggagaggaacagaaaaaacaactattgggtactaggcttaatacctgggtgatgaaataatctgtacaacagaccccctgtgacacaagtttacctatataacaaacctgcacatgtaccctaaacctaaaacctttttttaaagttttttaaaaattaaaaaaaagttttttttgagtcagagtcttgctttgtcgcccaggctagagtgcagcagtaccatcacagctcactgcaacctccgcctctcaggttcaggagagtctcctgcctcagtcttcccaatagctggggctacaggcacccgccaccacacctggctattttttttttttttttttttgtatttttggtagagacggggttttgccatgttggccaggctgttcttgaactcttgacctcaggtgatccgcctaccttagcctcccaaagtgttgggattactggcgtgagccaccactcctgggcaggttttttgttgttgttgttttttgtttaaaagaaaagaaaagaaaagaaaagaaatacctgtgggcttctgaacaacacctatgcctggccagatcccagaccaatggaatcagaatctctgagagtggggcccaaatagggttaccagataaaatacaggacacccagctatacttaaatttcagatacacaataagtaattgtttaatataagtatatcctgtgcagtattgggacatactcatattaaacaattatccattgtctatctgaaattgaaataaaacagagtcctctattttcatttgctaaatctggcaaccctagcctaagcatcagcaaatatatatatatatatatatatatatgtatttttttaaatttcgagacagtttccctctgttgcccaggctaaagtccagtggtgcaaacacggctcactgcaacctccgccctccacgaagctgggactacaggcttgccctactatgcccagctaatttttggatttttagtagagacggggtttcaccatgttgcccaggctggtctcaaactcctgggctaaagtgacttacccgtcttggcctcccaaagtcctgggattacaggcgggagccgctgcacccagccctcatcagcatttcttaaaagctcacagtgatacgacccccactacctgtctgatctcatctcatccaggactctcccccagcactctccactctcctctcacaccgttttcttataagggccaaccacactcccacctcaagacctttgcaattgctgggtctaccttggatgctgtgccctgtaacctgatagcctcctcaaagatcgcctgcagcggttccctgactgcttcatcttctatagcgtgacctccctgctttactttttctgtaaaacagattaaaatcagtttgtttgccaggtgcggtggcccacgcctgtgatcccagcactttgagaggttcaagagttcaagaccagcctggccaacatggtgaaaccccatctctactaaaaatacaaaaaaattagccaggcatggtggtgcgcacctgtagacccagctactcaggaggctgaggcgtgagaatcgcttgaacccaggtggtggaggttgcagtgagctgagattgtgccattgcactccagcctaggcgacacagcaaggctccgtctcaataaaaaataaaatataataataaagtaaaataaaatcagttggtttcttgtccatctccctccacccatcccccaaaccagaatgtaagctccatgattttgctggaaacactttgattctcctgctataccctcaacatctagaaccccaccagccactccacacatcctggttgaattagtcaatggttcattagaaggcttccccttccacaactccctaaacattcctttgggggagagttacttagaggaaacaaaattcttcaatgtccaataccaaacctaacaaaatctcaaaagcatacaccaaaaggggtaaacatattttctccatctttcccacccatagcctcaatgatgggatcaggaactgtgtgcagtgggggcgactagggtgagggttgggtgccgggcaatggctgaacagggtccaatacccaaagacaagtgtgttcaacacaaggtctctaatcaaattagagacagggcaaagcaggggagtgcagagtggtgcctggtcccacaaagctgatctgctggaaggggctgccagacattaagaggagggctggctgcagttctcaatcttgacaaagctcacatgctcagatataaccccttattcccctaaagcctgcacacgattgacccatttgaccctcacaataacttcatgggtgggtagagctgcccttcttggtcctgattggccagtggggagatgagcagatgaaggaaggaacatttcacaggtgcgtgagtcccaggctctgagctgggatgctggtctctgacccccgtcggtaccttttcctcccataaccctagattgtcttcactgggagtaagggcaacagcttctgaggccacgatgattcatgccctagctctggcactcattagctctgtggcttctgcattgtctggacctgagcctcggtttcctctccttcagagtgggtgtgatgaaatttcacagggttgctaggggaaagagatccattcattaagtgcttcttttgagcacctgcaagtgctaggcacagtccctggggctgggcacacagcggagagcaaggcagcctaaacccgcccacctccagggcttttaaagtctagttggggctgcgcggtggctcacgcctgtaatcccagcactttgggaggccgaggcgggtgggtcaccagaggtcaggagttcgagaccagcctggccaacatagcaaaaccccgtctctactaaaaatacaaaaattagccgggtgtggtagcacacgcctgtagtaccagctaccagggagcctgaggcaggagaatcgcttaaatccgggaggcggaggttgcagtgagctgagatcgggccagtgcactccagcctgggtgacagagcgagactcttatctcaaaaaaaaaaaaaaaaaaaaaaaaagaactgtacctggcgcgtagtaggtgctcggtaaatttgttcaatgactgaatgtgctgggtgctcagggaagactctcagatcccatcccaagagaccagaatggaaagcaggaaatggattgggggaaagggaggtctgaaggcagagagtcccaggcacgggagcctccaggcagaggccctgagacaggaccaaacttagcgttagggaaaatgaaagtagaatcaggaagaacttagatatctgaacactttgcaaactacaaagtgctgcatacacgtgcgggaaggcggtttctgcggctggttctttgtttacattatacatttttgaagactttgtcttcaaaatgtggctttggggcatgccactctcggggccgagtccttcgcgggcagtttctgcaaagtccaaccctgcagggcccttctcccgcgccgcgctgtctcgctgcttcctggagggtaaatggacccacacacagatgtggcgccgcgggcttgccggtcacctgcagaggccggcacccctgtcgcgatgggtggtggaggtggggcagaggtgggacgagccaggtcgggacccgcagctggcgagtcagagcctggaaggccccgcgcccccgcgccgcgctccctaagtgctccgcccggccggtggcgaccaggcgcgctcggggcaggcggcgggacgggccgggaccggggccgggacgcggcggggaggggaggggccgggccgggccgggcgggaggagccgctcgccggttttgccgcctccgcctttgccttcgcagccgcctccaggtaagggggccccggaggagccgccaggccacggtggcgcgcacctcgctgggccactccccgccggccccacgcggggcactcggagcccggcccagccccggggccctttgccctgcgccccgccctccaccccggggacactggacccaccaggaagcggccgcgcgctccctggcgctgcctgccctaagcccaggccgcctgctggtggttggtttgttttcagagccggaagtgcttttagaaatcttggggaggcagagggggaaactgaggctgggcggagcactcgggcgactccggcctcggcctccgagttcttagaggtcacccagccgctcccttgacaaatgaggacgctggtcaaggtcagagaggaagggggcttgcccaaggtcacaagaggtccctgtgcttccccttgccccacgtggcccctccacgcccccgtcaggaaggcctctaggactcccccgcctcctgtctccctgtccccccgcagactctcaaacagagaattccaggagggcttggggagcctctggagaaaaaccaggctcctcatgttacaaggaggccatgtcttctggtgcccatgcctgaagttacaggagggaagaattactgctgctgacttttgagtggattttacagctgggtaaactgaggctcagagaggtgaggtaacttccccaagaccacacagctaggaagcaagagataaaaacctgggctacctgcctggagagcctgacccagtgcttcgcacagagttggcctccacaatgcctttgccctgaccaggctgcctggcccttccctggggttgcactgggaattaggagcagggccaggctagaatcccagactactacctaactcgaagtaggagtcagcacatgagccccctttttcctaactcagtgttcattgcagaaaatatgacactcttttaagctttgggaacatccatttgttcattcaccaaatatttgttgagcacctactgtgtgcattgtttaggcaacgaggatacagcagtgaacaaaaaggagcgctgccctcaggaagtacactccagagggtggaataaagccctgcccttcagcctggggagggagggctgggcacaggggagaccactggcatttccccaactgtgaagtacatgaagacagcagaagagatcggtattagagtggcctcaagccctcgtgtgcagcatcagacagagatgggctcaggtgctagctttgcagctttgtaactgagtgggatcaggcaagttaaatgacctgtctccaaggttgttgtgaaaattaaaggagctgaagccacaaaaggcccagtgcagtatctgacactttgggagactttatactttttagtcctaaggcccaaggaggagttggacaggaggagttcatcgattaggttgtcatagctcagcatgtagctcccacaaaagctggggtctggagagttcctcataaggctcaaaccatctctctctactctggtaccactg

SEQ ID NO: 4593 - DNA, 6000 bp, Homo sapiens
ttccttacaccttatacaaaaatcaattcaagatggattaaagatttaaacgttagacctaaaaccataaaaaccctagaagaaaacctaggcattaccattcagaacataggcatgggcaaggacttcatgtccaaaacaccaaaagcaatggcaacaaaagacaaaattgacaaatgggatctaattaaactaaagagcttctgcacagcaaaagaaactaccatcagagtgaacaggcaacctacaaaatgggagaaaattttcgcaacctactcatctgacaaagggctaatatccagaatctacaatgaactcaaccaaatttacaagaaaaaaacaaacaaccccatcaaaaagtgggcaaaggacatgaacagacacttctcaaaagaagacatttatgcagccaaaaaacacatgaaaaaatgctcatcatcactggccatcagagaaatgcaaatcaaaaccacaatgagataccatctcacaccagttagaatggcaatcattaaaaagtcaggaaacaacaggtgctggagaggatgtggagaaataggaacacttttacattgttggtgggactgtaaactagttcaaccattgtggaagtcagtgtggcgattcctcagggatctagaactagaaataccatttgacccagccatcccattactgggtatatacccaaatgactataaatcatgctgctataaagacacatgcacacgtatgtttattgcggcattattcacaatagcaaagacttggaaccaacccaaatgtccaacaatgatagactggattaagaaaatgtggcacatatacaccatggaatactatgcagccataaaaaatgatgagttcatgtcctttgtagggacatggatgaaattggaaatcatcattcttagtaaactatcacaagaacaaaaaaccaaacaccgcatattctcactcataggtgggaattgaacaatgagatcacatggacacaggaaggggaatatcacactctggggactgtggtggggtagggggaggggggagggatagcattgggagatatacctaatgctagatgacgagttagtgggtgcagcgcaccagcatggcacatgtatacatatgtaactaacctgcacaatgtgcacatgtaccctaaaacttaaagtataataaaaaaaaaaaaaaaagaaaagaaaattctataactggccaggcgcggtggctcatgccagtaatcctagtactttgggaggctgaggtgggcgggtcacgaggtcaggagattgagaccatcctggctaacagggtgaaaccctgcctctattaaaatacaaaaaattagccaggagtggtggcacgtgcctgtagtcctagctacttgggaggctgaggcaggagaattgcttgaacctgggaggcggaggttgcagtgagccgagatcgcaccactgcactccagcctggcgacagagcgagactcggtctcaaaaaaaaaaattttataactaatgtggaaacagttttatgataagataacatgtgcatgatggaacagagtgaacatttttgcaagactagtcaaagcaaaattcaagacttcaaaaaaaaaaatgtgtacttgggaggagcagtttgctttgtttatatcctcagaccctgggctatgcactcactttactctgctattagtaatgataataaaaagagctaatacttgatgtatctgctaggataggctagcttatacagtggtaaacaaacaaaactcaatggcaacacaatgcttatttcttgcttatgctaagttatcctctatgggctggcagagagctcttgtttatcagctacacagaaatccaggctaatagagcaaccaacatcttcagcatcaatagttgccatgccagagggaaagagaagcacaagaggctcaaagcaacaaataaatgcttcagagacaaagtaatccatcctttctgctcaaactcattggtctttcccaatcacttgaaggccaggaaataaaatcctaccatgtgctcagaaggcaaaacgccagaaatatttagtgaagagcgctaattgtctatcattcactatctaccaagggctgttctaattatattacaggcattatctcagctaagcctcataataatcttgtgaaataggtactattaatgttatcatcattcccattctatagatgaaataactgaggcaccaagaggctaagtaacctgctcaaagtcacacagataataggtggtaaaagctgaagatttaaacttaagcattcttgccccagagtctgtgtgcttaaccacaaagccatgagatctctcactaggtgggaacaatttgagaaacactgccataggcaatggagagccactaaaggattttttaagcaggaagtgtgagtccatcagaattggcatttaaaagctccctctagagagcacggtgaaggattaatttaaccagatttagactaaggcaggaaggctatttgcagagtgaggagatgaagatggggagggcttgaactaaggtacaatcaccactcaccgcaattaactgggttttgttgttgttgttgttgtttgagacagggtaacggggtacattgggggttggaggggtggttcttactgtgttgcccaggctggattccaactcctgggctcaagtgatgctctggctctggcatcctgagtagctaggactacaggtatgtgccaccacacccagtaactagttaatcttgactgtctatttcaactgaaaaatggttatggtaatacctacttggatgggttttctgaggaaaaacaccccaatgaacttgtgtgtttttaaaagtcaagtcccctaggcatggctagaagggaagaggcttagccagaaaatttaattgttgtgattaataaagtaatagaaatgtttagttttcctctgatgagatgaaagctttgaggggatcctggtcttgggagaaagtaaagaaatggaggagagggtttcaccagagtttagataactcttagcatctgcttactatcttccctgattaattatttccatggcagccagagtgaccttttaaaaccacaaatcggatcatgctgtttccctctcccctagtacagtgcctgatacttagaaatttctcagtaacatcgtgctcagtgaatgaatgaatgaatgagtgaatgaaaacacaagccagatggcaggtggatccctaaggaaaaggacagccaatgagaaattatctgtagcaacggtggctttggatgatgatgtttaataatcatttttaaggagttgcctgttgtgtgctatgctttaatcactgtcccccacccttcccaaataacgttcagtaaaagtctgccacaaaaaactcgctgttttgtgagaatttaagaaatggaagaagaaacaaactgtctgggcaccaggccaaacaatatccaaaaaggcaggagtcacagaggagagctaatgagtattagtgggagcaggtattccaagtgagaggtgaccagagtcctctgaaaatgtggggagggggtgacgttcctatatcctgggttaggggcttggactcttatatttggctgttggaaaaaacaagctggaggactttggggtatcaacaaccctcaggttacataaggatgatcatagggtcgttgtgaggattatgttgggatagttcatgcaaagcgcttaacacagtgcctagcgcatagtaagagctcagtaaatgttagttgttgtcttccttcactttcttccattccctccactccctttctaccaggctccattcattctcttccaaggacacgcagggggcgtgcccaccccttccctccgcccccacccaaggcccgccccccgcttctccacggattggttcccgagaggcggagctgaaggaagagcccagtgcggcgcggtgggggcggggcgcatgcgcgagctgggcagggtggaggtggggaggaagagctgccggaagtaggcggtggaggtggtagcggagctgacggcagctgccagggaaaccgaggcgcgggacgcaaggccagcagacaggccggccagagggtcatctgcgtccggcacccaggaggctcgtggtccgcctttgcctgggctgagggtctctggccccgcagcctctcttggaggcgggcctgtccctaagcccgccaaggggcgccgcgccgaggggctgcggagtgggggacggacgcccccgacccgggaaggggcgtccggcggggccggaggagagggctctccccgctcaggaggtgcccctgggcgggggaccgggagtcctcaaccccggactgaggcaggggtctctgggggcgaggagggcgcgtcgccctctgcccccgccggcaccctggccatgacaggcaagtcggtgaaggacgtggatcggtaccaggctgtcctggccaacctgctgctggaggaggataacaagttttgtgcagattgccagtctaaaggtagcgcatcccacctggcgggccaggggtccagccgcgccggggtggtgggggtgggctgcgtgaagaggcggtttctgaagcttaggccgcccaactcggcttataagtggtaacgcgtgctgcgcttgcagtgagcctactgggctttctgcagctgggggattggtatgggtagagcttgcgagggcgagtctgtgtgtgtcggggagggtggaggtgatggtgcgggtggaagttgcctggcgtgttcaggtgagaatgtctgtatttgagggctctgaatgagttctgggccggctgtccagagagagctcccagcatgtcacttgcaaagctggggatgaactgcattgcgtgcgtgcgtgcgtgcgtgtgtgtgtgtgtgtgtgtgtgtgtgtgagagagagagagagagaatgacgaggaggaggaggagggaagtgagatggcggaaaggaaaactgcttaaatgatttttaaaggtggtgatttttgcttcctgctatttggttagcaactcctgtcattttgcagccttgctaagatctgacaagagtgcttaggtgactttattcttctggatgtgtgcagtgggaaactgccttatgcagtgacacagtgcggatttctaggcagtgtagccctggcttgtagagtgcgttggaggcctatgtatgagtggtggcagaaactagccgattatgcctgtagtgcaggatccgtttaatcagtggagagagaaagatgaattcgatgaattcattgcttccatggcgattacacttctaaaggtgaaatatgatcattgtaaattggcagaaccatttagtctttgttttctgtgccctagaagattcatgatttgatacaattaaaagtcagtacaataggaaatcttggttattagtgaaatgttggcacttgacatttatacaagcttctatgaatctttttttcctgtattttctaattcttttggcatataattggaggattgggaaaattattttccctttggttgggtcgaaatggatagttatattttgggggcgacaatttacttttgttcataatgcagtggatttgccatggttgtttgccgtacagcgtagtgggcatatactataaaacaaagattcagttatattcgtatttatctattttgagaaaggaaggacatatttaattgatgctttcacttaattaccttttatttttgaagaataaggttataaaaggagaacaggggagggatacatagacacctagtaatgtattttagtgacctctaccaacagataaatggaatgtgccattaggaaaacaaattcctagacttctttcctgaatttttgcattagcaataattcattttaaaaagtattttagaatcaatttatgttgagtaggttagcttcttgattcttgttacatcttctgttaggtctat

SEQ ID NO: 4594 - DNA, 6000 bp, Homo sapiens
taatagaaattgtcctcttaaaagattgtacttttacagtcccaccagatagatatgtaagcagtgcttgtttccccatagccttttcaatatgaactgctactattttatttttttttttctgccctgttgcccaggctggagtgcagtggccaatctcggctcactgcatcctctgcctcctgggttcaagcgattctcctgcctcagcctcctgcgtagctgggattacaggcgtgcacccaccatgcccagctaatttttgtatttttttctttctttttttttttttggagacggagtctcactctgtggcccaggctggagtgcagtggtgcaatctcagctcactgcaacctccgcctcctggattcaagtgattcttctgcctcagcctcccgagtggctgggactacaggcacgcaccaccacgccccgctacttcctgtatttttagtagagatggggtttcaccatattggccaggctggtctcgaactcctgacctcgtgatctgcccgcctcggcctcccaaagtgctaggattacagacgtgagctactgtgcctggctaatttttgtatttttagtagagacagggtttcaccatgttggtcaggctggtcttgaactcctgaccttgtgatccacccacctcagtctcccaaagtgctgggattacgggcgttagccactgcacccagcctatttactttttgagatggagtctcactctgtcactcaggctggagtacagtggcacaatatcagctcactgcaacctccgcctcccaggttcaagtgattctcctgcctcagcctcccaagtagctgggactacagatgcgcaccaccacacatggctaatttttgtatttttagtagagacaggatttcgccatgttggccaggctggtctcaaactactgacctcaggtgatctgccctcattggcctcccaaagtgctgggattacaggtgtgagccaccacccccagcctctaacattcctttattaaattcttttaactacctagcctgagggtaccatctgttttctctatgattttttttttgagacagtcttgatatatatatatataattatactttaagttctagggtacaggtgcacaacgtgcaggtttgttacatatgtatacatgtgccatgttggtgtgctgcacccattaactcgtcatttacgttaggtatatctcctaatgctatccctctcccctccccccaccccacaacaggccctggtgtgtgatgttccccttcctgtgtccaaatgttctcattgttcaattcccacctatgagtgaggacacgcggtgtttggttttttgtccttgcgatagtttgctgagaatgatggtttccagtttcatccaagtccctacaaaggacatgaactcatccttttttatggctgcatagtattccatggtgtatatgtgccacattttcttaatccagtctatcattgttggacatttgggttggttccaagtctttgctattgtgagtagtgccacaataaacctacgtgtgcacgtgtctttatagcagcatgatttatattcctttgggtatatacccagtaatgggatggctgggtcaaatggtatttctagttctagatcccagaggaatcgccacactgacttccacaatgtttgaactagtttacagtcccaccaacagtgtaaaagtgttcccatttctccacatcctctccagcacctgctgtttcctgattttttaatgatctccattctaactggtgtgagatgatatctcattgtggttttgatttgcatttcttgctctgtcacccaggctggagggcagtggcgccatcacagctcactgcaacctccaccttcctggctcaagcaattccccagcctcagcctcccacgtagctaggattacaggcacacaccaccatgcccagctaatttttttgtatttttagtagagatggggtttcatcatgttagccaaactggtcttgaactcctgacctcaggcaatccacctgcctgggcctcccaaagtgctggaattacaggtgtgagccaccacgcctggccttctctaggatcttatttgacagagcctacaaggcccttcatggtctctccttatttctccaattccctttacttttagtctttcaggttgatttgtttgtttaaagtctctggctctaatcccagctactcagaaggctgaggcttgaggatcacttaagacccggagtttgagaccagcctgggaaatatagcaagaccccattttttaattgtattttttttagaatttaaaataaaatttcttggggagacagggtcttgctatgttgcccaggggctggtcttgaactactagcctcaagccatcctcccacaccttagccttgcaaggtgccgggattagagacgtgagccactatgcctggccgtgagaccccatttctaaaaatatatatataaataaaaaataggcaggtgtggtggtacatgcccatggtcccaactcagaggctgaggcaggaggatcactgaagcccagaaggttaaggatgtggtgagctttgatcacgccactgcactccagcctgagcaacagagtaagacccaatctctagaaaaatcataaagtaaaataagaataaataaagttcctagaatgcaccaagtcctttgctgcttcaggacctttggccaaggatcctctgcctgaaacattcttcctcctattctcttatgcttcatgtctcaggttaaacgtccttttctcccagagacctttatagacctccatgcaaaaataggtagccccagtgattctctctcatacactttgctcttttatttcatagtacacatctcagcttgtagctggatatttgtgttcattttttcagtgtctgtctttctcattggtctgtaatctccatgagggtaggacccatgggctttgtttagttataagccttagcaattatcacatagcctggcacatggtaggtactcactaaatccataacgaatggatgacttttagtgctgtctgcttactatccttcaatagccatacatttggactccaggcaagttcttgctcaaaggtggctgacaagtcattctagctcctgcaaacaacagcttttacattaggatgctggggaaaccactaaccagtccaacaaagcacaagaataaaattgatcccaccaatcctctcagacacaactattaatactctctattgcctatttcacacccctccttgtaagaatgaaacagggaggaaatgcactgggctctcagagctataagactcaacaagctgccaagttgggttagacacccaggtgggagaaggagtaaagcagctagcctatgtaaccttggcaagatgactgctcagatgccactggtgcatagatagatgactggcttcccaggggaatgtcaacaactgacacccacactgtggtctcccacatgtgaatacgtcaatgtttacttaaccattcccttatttcaacacacgttgaatgaaagtctactatgtgtctgttactgtgtgccacaaaggtaacaaagtcactgctcttgctgtcaagacatttaaaaggaagtacttgacagacaattatgaaaacaaactattatgcaggataaaaatacagtctacacacaggagcagagaggacaaaggataagggggacctaatcctgtggaaggtttcactgagaaggcagcacagaactaacttgatgcggaaggtaggcgccttctggaccaacaaggcagggagtgcattccaggtgagagaaacatggacatgggcactggagggagatttgggtttttaagttctcggaatgtggagtgcaagtgggaagtgctggaagtacaacacggacggaaaagccaacctgacttagatcacataggaccttgcaaaggagcttagcaaataacctactggcaatggtcagccactgaagcatttacaggcccaagagcagcattacgtttgccttaattcattgtgttggcagtgagaagatagagtggaggaagactagacacaggtaaggaaccctctccccatctcccctactccctcccgctggcagaagaggctacgcagtggttgagggaaaggtaagtaccagaaccagggcagaggcagtgcaaatgtgtgatctagtacagacacgtaggaccttacaacgtataccatgatcttagggtggaggtaggtgtgagggatgactgcagatagagctcttctctttgccttggacaactggccagttttaccaagctggaacagagatggtggtaggagaggggtcctaaaggaaaacatgaatgcgcttttcataagtggattgtgaggagttcgcaggacttccagctgaaattgtcccctagggagctgaatgataggggtctgggggttttgagctggatccaggttagagacacggatttgtggcgtcatcagcgtggatgagactgcgcaaagttgaatgggaaaatggcaaacctagaaaacaacaaatatcacagtgcgataccagtgtcagctttacggcttttctccgtcctcagcttggaatgaggaacatctttcatttcacaagaggttcaggaactaccagtgtgaaaagaggctacgttcaagctgctggagggccagttccacctaggcgcagtcaagaagggcgcctggctttccggcttcacgtccctggaagctcggcactgcagcggttctagatctggggccgccggctgccttcccgacctacctcgctgactgggcaccgcccttaacgtcacgatcccgcccccgccagcgctccgaccacaacccgcgggagccattgcgtttgacgtcatcatcgcgcgccatctcttcccttaggtgtttaagttccgcgcgcaggccaggctgcaacctgacggccagatccctcgctgtcctagtcgctgctccttggagtcatgttcccagccgccccttctccgcggaccccgggtaccgggtcccgaaggggcccgctggccggactcgggcccggctccacgccccggacggctagcaggaagggtctgcccctggggtctgcagtcagctccccagtgctcttctcgccggtcggccggcgtagctcgctaagctcgcggtaagtgatctccctggttgggtctggcaaccaacagcctcacgggccgcagtgggccggataggttgttgtctttagaagcctttggaaccggggcggcggaatagaatgccacagtattggaaaatagaccttttccactgctgcaggtagtatctgcttcgttttgattatcagttgatcagttgattccccactttgcatttttcatggatacctttgtgcagaagtgaagtacaaactggatttgcatcagtgtttacctacttcccacctactacccgtgtgatctggtgtaagtcactcgtgattttcttcatctgtgaaatggcgataatatatctcacctgagccagaggagttattatgaattgccacgatgcagatgtaaggtgatggtgataatgaggacctacaaccctgaaagatcattgtttaatgcctaacataccaactgacattaatatctgatgattggtaattaaagggtttctagctacggaatttaactttctaggtaaattataaggaaaaggctttacataagtgagctaagagtactgtgatagtttagttactaaaactgctcgtttggagcaccagtaaaatcatcacacacacacacccctccccacccccaacacacaccatgttcataattaacctaaaactttagtgtttctgcatagttttctctgaattcatctataaaaaatgaatttttccctgcaggaaacacaaagtattgtgtcttgaaattatggttaaaatttatctg

SEQ ID NO: 4595 - DNA, 6000 bp, Homo sapiens
acttaggctgggtgcagtggctcacgcctgtaatcttatcactttgggaggctgaggcaggtggatcacctgaggtcgggagttcgagaccagcctgcctaacatggtgaaaccccatctctactaaaaatacaaaaacttagccaggcatagtggtgggaacctgtaatcccagctacttgggaggccgaggcaggagaatctcttgaatctgggaggtggaagttgtagcgagccgagattgtgccattgcacgccagcctgggcaagaagagcaaaactccatctcaaaaaaaaaaaaaaaaaaagctgggtgcggtggctcatgcctgtaatctcagcactttgggaggccaaggcgggcagatcatgaggtcaggagttcgagaccagcctggccaaaatggtaaaaccccatctctactaaaaaatacgaaaaatcagctgggcttggtggcaggcgcctgtagtcccagctactcaggaggctgaggcaggagaattgtttgaacctgggaggcggaggttgcagtgagccgagattgggcctctgggcctgggtgacagtgagactccgtctcaaaaaaaaaaaaaaaaaaaagaatcacttgaaccctgaggcagaggttgcagtgagtcaagatcactccactgcgctccagcagctgggggatacagcatgaccctgtctcaaaaaaaaaaaaaaaagataaatcaagaataatggacaccagattcctcggtgtgaaagacaggaagtataaatacacaaggggcaaaaactagaatgaaccccatgatatgagcttggaattggagatgatagtctgaattcatgttgtttagtatgtataattatagaaataaatataattgtaaatgtgtgtgtgtgtgtgtgtgtgtgtgtacacattcattagctctaggaaggactgggagtagtgaccctcataacaatgaacagttctggtttcttcttcttttttttttttttgagacgcagtctcactcttgtcgcctaggctggagtgcagtggtgggatcttggctcactgcaacttccgcttcccaggttcaagcgattctcctgcctcagcctcccaagtagctgggattacaggtatgcaccaccatgtctggctaatttttgtatttttagtagagacagttttaccatgttggccaggccggtctcaaattcctggcctcaagtgatccggccacctcagcttcccaaagtgctgagattacaggcgtgagccaccatgcccaggtggtttcttttatttatttatttttatttattattagtatttttagaaagagtctcactgtgtctcacccagtctaggctgcagtggcatgatctcagctcactgaaacctctgcctcctgggttcaagcgattctcctacctcagcctcccgaaaagctgggactacaggcgtgcaccaccatacccagctgatttttgtatgtttagtagagatggagttttgccatgttggccaggctggtctcgaactcctgacctcaggtgatccatccgcctcggcctcccaaagtgctgggattacaggtgtgaacccccacatccagccctattattattattattattttgagacaaggtctcactccgttgcccagtctggagtgcagtggcactatcttggctccctgcaacctctgcctcccaggttcaagctatcctcccgcttcagcctctctagtagctgggactacaggggcatgccaccatgtctgactcatttttgtatttttagaagaaacaagatttcaccatgttggccaggctggtctcgaactcctgacctcaggtgatctgcctgtcttggtctcccaaagtgctggggattacaggcgtgagccaccacgcctgatttttatttatttatctatttttagtcagggtctcactctgttgcccaggctagagtgcagtggcatgatcacagctcactgcagccttgccctcctggattcaagcaatcctcccaccttagtctttcgagtagctggaactataggtgtgcactacctacctagctaatttttgtatttttttgtagagatggggtttcaccatgtttccaagctggtcttgagctcctgggctcaagcagctcacccactgcagcccccaaagtccagattacaggtgtgagccaccgtgcccggccagttcttggttttttagtatgattctagtgcctacttcatgctttctaaatattattttccactaaaagattaaatcagagctctttggagtattggttgattccaggggctggaaaagttgatatcttgctataccagaaagcaagtgttccaggaattatggaagcaggccaaaatgacacagacaccagcttgaaagggttcccattgaccacattgatcaaataaatataaatattcagggtctaaggggaggttttgtgtgtggggttttttcgtttttttttagacagagtcttgctctgtctagagcaaggcaggagggcagtaacacagtcataactcactgtagccttgaagtcctgggctcaaaccatcctcttgcctcagcctctcaagtagttgggactacagatatgccccaccacactggctaattttttttttttggtagagatgaggtctcactgtgttgaccaggctgatcttgaactcctgaagcctcaagtgatcctcccacctcaacttcccaaagtgctgtgattacaggcgtgagccaccgtaaccgagtgtgtattctattcttaaagagggtcctccaaatcgtaaccttcaggccccataaaaccaatatccacctccagaaattcttgtcactgttttaaaaatgaggaaactgaggcacagaaagagaaagtgatttgcccaaggtcactcagctaagtgaagcaggatttgaacccagccagtctgactccagagtctgcttcaaggggacactgtgagaattcagtgagatttaaaaacatgaaaggaactttataaatttaaggattaagactaataatcaaatgaaagaggtgtgcctgtttgtccactggtgctcagctccacagaggaaaggggcagaaaaatcctcctaccgtatgccagaaaccacttggaatttaacaaccaggacctcattttgtccccatggcagccctacagccaggcattattgtcccagggaggcttatcgaggttcaaggatcaacccaagtcacataaccaaaaagtgatggattctggagcagatgccagggctagtgatgccagagcctctctctccccatccagggcaccaggctgcccaacagcatgcagcagaaggcttgccacactggactggccaaggtccaggaacatgacacaaccaagggcctctccaccttctctcatcccctgtgctccaccatctgagaaagatgcccgggacagaggagccacgtggcagcagagcaacacttctgcccagatcacaagtgggcaacgtctgcaaagcaggcagcagcaaggtgggggcagctagccacaagctctgagaatctcaggctctggctgtgcaattgggccagtgggtccagggaaacaaacaaggactttggagtcaggcaagatctgggctttgtcttcctggtgggatgaccttgggcaagtcactttagcttttttagtctcataaagtaagaatctagccttaggaagaggctgccaatattagagtgggaagtgcctgacacataataagtgcttagagaatggcaaccatatatatacatatatatatatatatatgtatgtatgtatgtgtatatatatatacacatatacatataaatatacatatacatatacatatacatatacatatacatatatatttttttgagacaggatcttgctctgttgcccaggctggagagcagtggcatgatctcagctcactgtaacctctgcctcccagtttcgagtgattcttttgccttagcctctagagtagctgggactacaggcacatgccaccatgcccggctaatttttgtatttttagtagagacgggattttgccatgttggccaggctggtcttgaactcctgacctcaaatgatcccccttcctcagcctcccaaagtgctgggattacaggcatgagccaccgtgcccggctggcaactatcttttattataattctgtgagttcttctcagcagacctggcctttcaggagtggtaggaatcaggctggggataaggattctgaaggaccttattcctgcagggggcccagaactggaatcagaggaggaggcctcctagattggacagtgggcaaagtcctcccagcccccagggtcctggctcccttccctgtagcctgcttctggctgacaacagaagcagggccccaaggttaggcaaacaagctagtgataaggcacttccaggttgggccttgcattcaaggcccacccagctctggggctggcttcctggcttagcaaaagccctagtcttttgtgcacacaagagcgggcaccaatggggacacctgctgattgtgcacctggggccttggtgccctggtacagcctgagttaatgaccttgtttatccacttgagtcatctgataaggggcagctgagtgagcggcaggtggccctgtgccctgcaccggccacttcattgactgaggtgatatcagtgccacgtggggttcccaatgccccctcccccaccacttccccaccattcctgccaggggcaatgtctgtgtgtttttttcaatgaacatgacttctggagtcaaggttgttgggccattccccccgttccactcactgggaatataaatagcacccacagcgcagaacacagagccagagagctggaagtgagagcagatccctaaccatgagcaccagccaaccaggggcctgcccatgccagggagctgcaagccgccccgccattctctacgcacttctgagctccagcctcaaggctgtcccccgaccccgtagccgctgcctatgtaggcagcaccggcccgtccagctatgtgcacctcatcgcacctgccgggaggccttggatgttctggccaagacagtggccttcctcaggaacctgccatccttctggcagctgcctccccaggaccagcggcggctgctgcagggttgctggggccccctcttcctgcttgggttggcccaagatgctgtgacctttgaggtggctgaggccccggtgcccagcatactcaagaagattctgctggaggagcccagcagcagtggaggcagtggccaactgccagacagaccccagccctccctggctgcggtgcagtggcttcaatgctgtctggagtccttctggagcctggagcttagccccaaggaatatgcctgcctgaaagggaccatcctcttcaaccccggtgagctcccagacactcctgggtggggggcaaggctgaagcaggggccagccagggaaggtagcttctaagggtttgatatctgttatctcattgggtcctcattttctttttatttttctgagacagagtctcactctgtcacccagtctggagtgcagtggtgcgatcttggctcactgcaacctctgcctcctgggttcaagcaattttctctgcctcagcctcccgagtagctgggattacagatggccgccaccactcccggctaatttttgtactttttagtagagatgggctttcaccatgttgatcaagctggtcttgaactcctaacccctcaggtgatccacccaccttggcctcccaaagtgctgggattacaggcgtgagccaccgtgcttggccagtcctcattttcatcaaatagccatctcacagaagaggcacagagaagctaagtgactagctaaaggtaacacagccaggtagggacagaccaggatggcaactcaggtctattcactc

SEQ ID NO: 4596 - DNA, 6000 bp, Homo sapiens
aggctcacagaggtgatctgctctacccaggcctgaaggaccaagaggatcaggaggatcgaggaggagggtttgaaagtaagggtgtgtgacgtgattccaaccagagggaacaacaagggcagttgttcagaggtgagtgagcacagcttgttcagggaactctaaatgcctaagcacatctagagccaaagtgtgatgtgctaggtcaggggagggaagtggggacagaatagatgaggccagagtgattaaataggggccagatcacaaaggactttgtgtgacatgctaaagagattggattttatcgtgaaggtgatggaaagcaaatgaagaattttaagcagaggagagacatgatcaaatttgcattttagaaatagcaacagcatggaggatgggttggaaggagatgaggctgggagcagggagaataattgaatagtctactgcagcagtaagtgaaaaatgatgagggcctaaactcagctaagaggtagtgggcatgtagaggtcagaagataggaatgacaggtcatggcatttggtcatttatagggagtgagggagagaaaggagactaggtgactcaccagtttctggttttgtatctgggagaagacagcagtaaaaggggaaggaaacgaagaaggtaagagaatgaatatgtgttgatttccttccatatttcaagcaccgtgtaaggaattttacattttactactttattactttgtttaatcttcacagcaaacctggataatgagtgttttaaccctttttttttccaggtgagaaaactgaaattcagagagcttaacccatcaggtcacaatcctcacaggtgtttttcagaccctggcctggaaaaggcatgttggaagagggtgagggtgtcagttaaccctgaaagcctgttcaccatggatgccaggggcatcctgcagcagattccactctccatctgcattacagcagtgaccctgaagccaggggagggtttgtgtacacagaagagcaaactcaaagcagtctgttcccaaggcaaccccatctcaaagaacttcaaggtggacttctccaagaagaacaaggctcggtgtaatccctggccccaggtgaagggcatccctggaccagaacatctttctagcctagcctctccctaagcattcaaagctgatgtaggaagaggaagtatgcctcccttccctggtccggtattggctcagcctgatgatatctgattcccagggccccatggagctgggtctcagtcacgtcaaacaattagagaagtggcaaaaaataagtaattcaactagcaagagccagtcagaatttgaacctaagtctatatgaccccaaagcccatgttctttccactttctcacattggactagtcaccaagttaggtaacataggaaaagttagtttgtgggggattgacaattcaatttgagacatattgaatttgaggtgtctatgtgacatccaagtggagtcatctaataaactgttgggtatattggcccttgtataagctatctaaacactctgagcctcagttttctcatctgtaaaatgatgatattacctatcttacagtgttaacacaggcaaggatttttacatagtactctgctcatactgggtacacaagaagaataaattaagggagcaattaatacctataatattatacatagtctttaccacaaccttaaatcaaacatttaaggtttgattatatattttcttttaagacctaggaattcaatttatgtattcagtcttcataattaatctggaagtgtctctgtaatagggactctcttttgtctctccttctggtgcctaatcatgagtggacacttgataacttattgctggagtaaattgtcaactgtgaaaatggattggcacccaagtatggagggcccttgtccttctcctgtagtctgtctcccaattggcgatactaccatccactcagtcacccatgccagaaacctggagtcatctttaattcctcgtcctctttcttaatccaggcactctagtagtcaccaaattccaataattccactttccatgtatttctcaaaaccctctcctcccctacatccttccactatcttagctccagcttaatcttctctcacctacattatggcaatagctttcttcttcttcttctttttttttttttttttttttggtaggggggacggagtcttcctctgttgcccaggctggaatgcagtggtgcaatctcggctcactgcaacctctgcctcccaggttcacgccattctccggcctcagcctcccaagtagctgggaggcacccgccaccgtgcccagccaattctttgcatttctagtagagacggggtttcgccgcgctagccaggatggtctcaatctcctgacctcatgatctgcccatctcggcctcccaaagtgctgggatcacaggcatgagccaccacacccggcaggcaatagcttactaactggtctctttgccttcagtcctaccccctcaaatccaacagccagcagagtaaatgatctagaatatagacatgacaatgtcatttcacagctttctctttcaaagtttcctgatggactcaaagtgtttagcctgacacatgaggtctcctgtgatctgcctacatctcagccttatatcccacctctccagccttatctcttcccactcccagcctgaaatgttatactccagtaagagaggcccgtctgtggttctaccatatctacctttttgtatctggcttcttgaccatctcaggttgcaccctctgcctgaactgccttttatattccccctagctaactcatcattaccctgtaaaagtcaactcagttgccacacctccagaaagcctctcctgcctcttcctcgacaccccttttccaaagcagaattaggtgccccgctatttcagtgccataatgctctgtgcatggcaccatcactgatctgaccatatttctttatatctgtgtaaaggtctgtctcccccattagcgattaaaattcatgagggtaggagagcatcttactcatcttttaactctagtatctaagacataggtggattcttggtcaatatttgttgattgaataaattagtatgaattgtcagagtcacaaagacaccaacagatacatacacataaatattcttaccatctcccaaggaacagatccaagcatctgtgctctctggaactcagtttatttcaaaatacaaagttatgcatagttagatgctataccacttgagattaggggttctaccaactcattctggtaacctaaacaaggatctttttaactcagtctctctctctgtgtgtgtgtgtgtgtgtgtgtgtgtgtgtatgactccagcctgcacttggggttttaactcatctttagagaaacattaattataatttaatgcaaatgaagaagcagaagacataatagcaaaacaaagaaaaataggccgggcacagtagctattattacaggtgcacgcctgtaatcccagcactttgggaggccgaggcgggcggatcacgaggtcaggagtccgagaccagcctggtcaacataaaccccagctctactaaaagtacaaaaattagctgggtgtggtcgctctgtcacccaggctggagtgcagtgctgcgatctcggctcactgcaacctctgcctcccgggttcaagtaattctcctgcctcagccttccacgtagctaggaatactagcgtgcgccaccatgcctggctaatttttgtatttttagtaaagacagggtttcaccacgttggccagatctcttgatctcatgatctgcccaactcggcctcccaaagtgctgggattacaggcatgagccaccccgcccagccaaaaaaaaaatattttttaaaaatagcactttattattattattattagagatagggtcttgctatgttgcccaggttggattcaaactcctgggctcaaaccattctctccctgtctccagagtagggggatgtacagggcatgtcactgtgccctgtggtcactctgatttgattctcagccctccctagttaggaagtgagagggctctttccgtaagctcttacttagatcgtagtctctctctctctctcttttttttttttttttagacggagtctcacttgttctgtgcccaggctggagttcagtggcatgatctcagttcactgcaacctccgcctcccgagttcaagcagtcctcccacctcagcctcccaattagctgggattacaagtatgtgccatcatgcccagctaatttttgtatttttagtaaagacagggtttcaccatgttatccaagctggtctcgaactactgacctcaagtaacctgcctgcctcagcctcccaaagttctgggattacaggtgtgagccaccgtgcccagcccctagtctcttaaaaactttttttgggggagccttgtggaactgtcacacctcttcttttagtactgacatactgcgtgtgaaaaagcttgctctgtctgtctgcctgtctctctctctctctctctcttcccagcttgttcaggatctctgtacacagaaggctgcagatgtagccttaaactcatcaacagggaaaatctcgatgagtctaataagcagcagcttccaatgagtcacaaggttcccacccactggagtccctccccgtgtgccaccaaccagcacttttgtcatgctgggaaaacctcccacccaggcctttgccctgagtccagggtctgtgccctaaccccacagtcactgagagcaactggaggccacataaaacagacatctcttgttttccagatactacgggtcataatccctaactccaatcactggcaactcctgagatcagaggaaaaccagcaacagcgtgggagtttggggagaggcattccataccagattctgtggcctgcaggtgacatgctgcctaagagaagcaggtaggaaatctgttggggaccaaagactaaatgtaataaaatacagataatgctgggggctaggcatagtggctcacgtgtgtcattccagcactttgggaggccaaggtggggggatcgcttgagcccaggagttcaagaccaacctgggttacataacagaccccatctctacaaaaaagaaagaaaagaggccaggcgcgggagctcatgcctgtaatcccagcactttgggaagccaaggtgggaggattgatcacttgaagtcaggaatttgtttttttgtttttttgttttttgttttgtttttttgggttttttttgagatggagtctcgctctgtcgcccaagctggagtgcagtggcgcaatctcggctcgctgcaacctctgcctcccaggttgaagcgattctcctgcctcagcctcccaaatagctgggactacaggcacatgccacgatgcccagctaatttttgtatttttagtagagacggggtttcaccatgatggccaggatggtctcgatctcatgacctggtgatccgcccacctcggcctcccaaagtgctggaattacaggcatgagacactgcaccaggcctaagtcaggaatttgaaaccagcctggccaatatggtgaaaccccatctctactaaaaataaaaaattagctgggcatggtggcgggcaccttaatcccagctactcaggaggcggaggcatgagaatcacttgaatctgggaggcggaggttgtagcgagccaagattgcaccactgccctccagcctgggtgacagagcaagactcaatttcagggaaaaaaaaaaaaaggaaagaaaggaataagagagggagggaggaaggaaggaaggaaaagaaaaaaatatcctggtgtggtggtgtgtacctatagttccagctactcaggaggttgaggcaggaggat

SEQ ID NO: 4597 - DNA, 6000 bp, Homo sapiens
ggagtccacctgtgtgaaaatcacttttaaaagctaatctaaacaactctgggtgttccggagctagtttctgacttgttggggttatttggtgttatcaccaactttgagaattacataggacaaagggggtctccttcataaacatgcctccacaccaggggattgcccttagcaaaactgaaagcagtgattctcaactggagtgagacattggaatcaactggattggaatagccgcagccccgtgctcaaagattctgattctgggatggggtctgggcatcagaatcctttaagggtcttgaaggttggacccctggatcagcgtcgacaggaggcgtgggagttcatcattgacttcctgtgccccgtttagtaattagaccaaaatggctgcaatggttaagaacagatttgacacttctcaggaatgtctgagcaagcagggaggcagcagatgcttccccaggaaatgaattcatggtgtggggaggggtgtgtgttttgcaatcagtttggcaacaagatcagagctctgaggcacatcgaaacagtgggcaggtgttccatttcactcttctggcaggttctaagaatttgcttgcttcttcaaactgaattaagccctgagcggacagacctgcaaaaacattcaaagttgaccatctgatttcatatatgagcttaaagaagaaaaagaaccaaaccagcttttgttttgaaatggactcgctagggcgggggtggagttgggggataatattaaagtacctaacgtttttagcatgttctgtttatttttgagacagggtcttgctctgttgcccaggctggagtatagtggtgtgatcatggctcactgcagtctcgacatcctgggctcaaggaattctcccacttccgcctctcaagtagctgggaccacaggggcacaccacctcccactcccagctaatttctgtaatttttgtagagatggggtttcaccatgttgcccaggctggtcctgaactcctgggctcaagtgatcctcccgcctctgcctcccaaagtgttggaattacaggtgtattctaaatctacatcataaaagtgcttttacatttattatttcattggctcctaccatgagctctacaagacagggaggattgccattctacagatgaagaaactgagactcagcctgaaggccagtcgattctactatatacttattccaaagccatggcaaacctgggtgatttctccaactaccccggcactggtgcagttgtatgcctcagcctacaacctgtctctcccccaaagctgggctttcagaaacactttcttttttttttttttgagacagagttctgctgttgttgcccaaactggagtgcaatggcgcgatctcggctcactgcaacctctgcctcccggggtcaagcgattctcctgcctcagcctcccaagtagctgggattacaggcatgcgccacacgtccagctaattttttgtatttttagtagaaacagtgtttcaccaagttagccaggctggtctcgaactcctgacctcacgtgatctgcccacctcggcctcccaaagtgttgggactacaggcgtgagccactgtgcccggcccagaaacacttgctttttgctccacctctacttacagattaggtagataatgttttcctaatgatttcattgattttggttgccactgatacatagctcaaaacagatcctccagtgaaaaaatttcagcaagttgtgagagtccccctccttttctactttatttgcagggtccagtaacaatgtttgttacctgcacctcctgagtgaggttagcaggctgattttggccttgcctgtccttgactctcaggggaagaagggagggaataaatcttcccagacactagtttccctctctggtaaattgtaaaggaaacagcttttgggttcctttagggccaggatggagcctccttcactgctgtatccccagagcgtggcatagtgcctggcacaaagtaggcaccagataaatctttgctaaatattttgtattaaacatccatgtatttattatgcatttggcttccagtttaggtgagctgtatcctgagagctgtttgtcggcatcaacattttcctatttgaattgagaactgctaataggattgtgctggtggagctgagtttaaagaccatatggttctggcagaggctgtatcagatgtcccaaaaaaggtattattttaacttctcctctctagttctgagctgttgcgggcacttggtaaatactaatgaatgatgaggctggagctagcctgagagggtgctgggagtctgggacgcagtaaaagctttaacagtgctttccccaagggcatctcgactctgaccttctggcaaagaaactggttctgccagatggtaggatggaggcttcttgttgcccgaacagccccggcagcccagtcaacagtcagtgtctgctctgagcaaaaaaccttttaggtgctggagagcacagatgctgcaggcaacctgcagcctggcctcttgaatcctagtacctggctttcaactcgaaaccgtctgagccttcatctgtacagtgcggatgaaaacagctcctacctcacaacattattgtgaggattaaatgaaatgatgtaagaaaaaaaaatttagcacagggtagggggcagagtaaggatactctgtgtgggtttatacatttccaatgttatgtgtgcgtttatgcagataaaattcagagtggctgaagagatgaattttttttttttttttttgagacagtgtcttactctcacccaggagtgcagtgttgtgatcgcagctcactgcagcctctacttcctgggctcgggtgattctcccaccttagtctctcaggtagctgggactacaggcgtgtgccaccatgcccagctaattgttatttgtagagatggggttttgccatgttgcccaggctggtctcaaactcccgcgctcaagtgatcctcctgcctcggcctcccaaattgctgagattacaggtgtgagccatgccctgccatgaaaagactaactctagactgcaatggctttgaataattttctaaacgtttagagtttagattttattccgtatcacaatttggagccacggaagtgtttttttgtttgttttttgttttttaaagtgacaccattaaaaattcattaaatacagctggctattatctggctagacgtctaagcaaacttcttgaatgtttggaaaacagattacactttcactaagacacctgttggtttaccacatacttcttatttgaatatgattagcatcagaaagtccctatgctcaaaaatacctcttttatcaaattagattaacaaactgcatcccgtaagatgcagtaacttttcttaagatccaatggctagaatataggaatttgggttggattgggaagtgggggataacggtggcaaaaaattgaagattaaaaaacgaaatacaggccgggtgtggtggctcacgcctgtaatcccagcactttgagtggctgagacgggcggatcacgtgaggttaggagtttgagaccagcctggccaacatgatgaaatcctgtctctactaaaaatacaaaaattaggagggtgtggtggcaggcgcctgtaatcccaactactcaggaggctgaggcaggagaatcgcttgagcccaggaggcggaggttgcagtgagccgagattgtgccactgcactccagcctgggcgacagaaggagactccgtctcaaaaataacgaattacatgagatttataaaaagttggtaaatataaattctgtaacgtaaacttgggtatatatgtgtatacacgaacaaactgtgaatgagactgattttgtaccgtttggcccagaattattcacgctcattgaaattagtgctcttttaaaagattcacattgggttacttatacatttactccaaagaaattgccattttccccttacctgcatctggctggcataatcaactgaacaatattctctttcttcccctttttcacttacaagtggggcagaaaggggaggagagcagtcctcattctttcagcaaacttactgtgcacttacaacgcgcgaaggcgctgtgctcagagaaacaaaacctaaccggttgtggccctcgagggtgtgtgggtggggagagctgcagccacaggaaacggtaacacggcgcgtaaagggctctaattgaacttaaggaccaatggggccaccaagcaggaagtgactgacttgcccgcgtgtgtctgaaccgccttcacagggaggcaacttttgagtaattgcggggctggagggtgggggcactggagggaaccgcggggaggcgccggcttcggacgcggagttgtgggtgtgggagagaggcgacccagaagccgaggcccgaggcgggagggggctgcgccctggcaagaggctttccggagtatcttccatctgtcaatacaggctacaggactcagtggccctaattcgagaaccaaacgtcccccgccggtcagtcttttcccccagggcagtcccaagggcggcgagcccgcgcgcacgagagccgagcggtaggaagagccgagagctagcggccggggcctcggcgggccaggggcgcggagaggccgccggagaaaggactaagacaccggtggaccgagcagttactcccggcatgctcctcctccccgggcagatttcaaaccctctgcagccccacctccgcgccttcgcccccggccagccccagcaacaggcggcggcccgcttctcattggccaggcccgcgctgtcgtgttttgattggccgcggagcctcccggccctgcttctgcagtcgctgccgactccattttgtcggtagaggcagaaggagaaggtcgggttgtagaagctggggtggccggcagctcgctcatcggtgttcgtgggctttgtcggtccgtgcctcgtctctccctggaaagggagggaggcttcgacgtcgagagggagccgctgccgcgttagttccgagcttgaagtcagtaagtagcggctgcgctaagggcgcggccatgttggtggccgcgctccccattgttggaggaaggaggcgagcggaggcgagatccgggtaacccgggcgggcgcgggcggtcacgggcggtcgcagcgccgcgacccctgcggctccggagagatggggccactgggaagccaagcccttgtggcgtcggaggaggcgttttccgggttcgagttgggaattactcacagtccggaaatggcaatttatttagggttgtttatctgtttggaaagctctcttacccctttgaaaggagggggcttaactatttggtaacttattttcttggaacatcaaattaaaaccaaaccttgaaagttaagctgttccctctagggagacatttttatatatttaagatgggcttagactgttagggcttgtgagaacttattttaagacggggaggaggcgagagcgttcataaccaaaggaaacactgcgtgatgtctacatgttccaagagactgaaaatggatgtgacatgtgtggaaagattggaaaattctggtgggagtttaaaaacacggtctctttagaaaatccgcctgaagccaattttttgatatgactcaacatttaacacttccttgattttatacgcgagagaatctgaaggtctttcccaggaaaaagataaagataaaacttattgcgggacttggagacacttacaaaaattccccaggagtgactggatctcaagggtgaagagtttttttaaatggtcgtggttataaggtcaaagaaagccatcttacgagaaattttctaccttttagttcaggaagtagccttctttacagtcaacgattttcgtagtaaatctaa

SEQ ID NO: 4598 - DNA, 6000 bp, Homo sapiens
tagatgggatctcactctgttgcctagactggagtgcagtggagcaatctcggctcactgtaacctctgcctcctgggttcaagcgattctcctgcctcagcctctcaagaggttgggattacagtcacccgccaccatgcccagctaactttttttttttttttaaagtagagacggggtttcaccacattggagaggttggtctcgaactcctgacctttggtgatctgcctgcctcggcctcccaaagtgctgggattacaggcgtgagcctccgtgcccggcccctgacagattgtcaatgtagatgaaatagccttccactggaagcagatggcatctaggactttcatagctagagagcagaagtcaatgcctggcttcaaggcttcaaaagacagactgattctcttttttcaggctaatgcagctggtgattttaagttgaaggcgatgctcatttaccattctgaaaatcctaaggcccttaagaattacgctaaatctaatctgcctatgctctacaaatggaacaacaaagcctggatgacagaacttttttcttttttgggatggagtcccactctgtcacccaggctggagtgcaatggcgtgaccttggctcactgcaaccttcacctctgggtttaagtgattctcctgcctcagcctcctgagcagctgggattacagatgcacaccaccacgcccagctattttttgtatttttgtacagatggggtttcactgtgttggccaggctggtgtcaaagtcctgacctcaagtgatctacccatctcggcctgccaaaatgttgggattacaggtgtgagccactgtgcccagccctaatgttgtttttatgcctgctaacatgatgtccgttctatagcccatggataaaagagtaattttgactttcaagtcttatttaagaaatacattttgtggccaggtgtggtggctcatacccataatcccagcactttgggaggctgaggtggactgattacttgaggtcaggagttcgagaccagcctggtcaaaaaatggtttacgatacaatcaactcttgttgtaaatgttgtgaaggctgggtgcagtggctcatatctgtaaatgaatgacaagaatgaataaatgaacccagcactttagaaacccagtgcaggaaaatcacttgagcccaggagtttgagaccagaatgggcaatatactgagacctcggctgggcacagtggctcacgcctgtaatcccagcactttgggaggctgaggcgggtggatcacctgaggtgaggagttcggaaccagcctgactaacatggcgaaaacctgtctctactaaaaacacaaaaaattatctgggtgaggtggcgggtacctgtaatctcagctactcgggagactgagacaggaggatcgcttgaacccgggggcgcagagactgcagtgagcagagatcgcactactgcactccagcccaggcaacagagtgagactgtctcaaaaaaaaaaaaaaaaaaaatatatatatatatatatatatatatagtgagacctcatctctacaaaataatttttacaattttagctcagcatggtggtatgcacttgtagtcccagctacttgggaggctgaggcgagaggatcctttgagcctgggagatggcggttgcagtgtgcacatattgtgggccactgcactgcaatctgggtgacagagtgagaccctatctcaaaaaaaaaaaaaaaaaaaagctgcgaacattgttgaagtgacaacacaggatttagaatattatgtaaagttggttgataagacaccagcagtatgtgagatgagtgagtccaattttgaaagaagttctgctgttaaaatgctatcagagcactgcacgctacagagaaatctttcatgaaagaaatagtcaacttttcattttctcagtggatgaaaagggaaaaaaaaaagaaaggaagagtaaatggatggggcaaacttcattgctctcttattatcagaaactgccacatccaccccaaccttcagcagctatcaccctagtcagtcaacagccatcagcataaaagcaagaccctccaccagcaaaaagtgaccacttgctgaaggctcagatgacagcatttttattgagacagttttgctcttgttgcccaggctggagtgcaatggcgcgatctaagctcactgcaacctccgcctcttgggttcaagcgattctcgtgcctcaacatcccgagtagctgggattacaggcatgtgccaccacgcccagctaattcttttgtatttttagtagcgacggagtttcaccgtgttggtcaggctggtcttgaactttttttttttttttttgagacggagttttgctcttgttactcaggctggagtgcagtggcacgatctcggctcaccgcaacctctgccttctgggttcaagcgattctcctgcctcagctttctgaatagctgggattacaggtgcccgccagcatgcccagctaattttttgtatttttagtagagaccagggtttcatcatgttggccaggctggtcttgaactcctgacctcaggtgattcaccagcctcgccctccccaagtgcagggattacaggcgtgagccactgcgcctggccttggtctcaaacttctgacctcaggttatccacccgccttggcctcccagtgttgggattacaggtgtgagccaccacgccaggctgacagcatttttaagtaatattctttattaaagtatatatattttaggtcataacactagtgcacacaatagactacagtatgatgtaaacatactatataactttaatatgcactgggaaacttggactaaccttactgcaatctttgctttattgtggtgttctggaactgaacctgcaatatttgagatatgcctgtatttctttttttcttttctttttttttgagacggagtcttgctctgtcgcccaggctggagtgcagtggcatgatctcggctcactgcaacctccacctcctgggttcaagcgattctcctgtctcagcctcctgagtagctgggattacaggtgcccaccaccacgcccggctaatctgtagtatttttagtagagaacgggtttcgccatgttggctgggctgatcacgaactcctgacctcaggtgagctgcccgcctcggttctcccaaagcgttgggattaccggcgtgagccaccgcgcccggcctatgcctgtatttcttaaaaggggagccaaaattatgtattttggtatccatctagtttactaccgtgttcccagtattttacactgggcattgtatacagtagacacccagaaaatctttgaatttaaaattacattggttcagccccgtggctcacgcctgtaatcccagcactttggaaggccgaggcaggtggatcacttgaggtcaggagtctgataccagcttggccaacgtggcgaaaccccgtctccacaaaaagtagaaaaattagccgggtggtggcatatgcccgtaaaatcagctactcaggaggcttaggcaggagaatcgcttgaacctgggaggcagatgttgcagtgacccaaaatcgcaccactgccctccagcctgggcgacatagggagaatctcaataaataaataaataaataaataaaaataaaatcaattaaattagaacgttttaagaagcactgcgcagtacgtcgaccacaagaagtgctcaaagaaggaagaaagagtaagccgtgtgcaaggaatgctgccgaagccactaagggcaagggctgatgtggcgtggtctgctacttgagttgagccttgcagcttttctcttaggaagagcattagatttctttattaattgatgtgtactgtgtctacttttctctggaggtgcagaaatccatcaaaactgatctcggctctcaaagagctcacagtcttgtcggggaaggccccgatacttacagagtaagatgcaaacttactgtgggaacacaggcatagggaggagctagtcaactttgaaagcatcacagatgacctatgagatgggtcttaaatgttcagagacactagagcagaaattccggaggaaaccagcctgtgcaaaactgataaacgcagagattctcaaatttgtaggtgggtaagaatcacccgagagatcggtttaaaatgtagactgcagggagacactccccggtaaacttttggttcaataccccagtagcacccattttaacaaacttcccaggacgacagtcagaaaatcatagttacagaaggcaggctggggagaggcggtttctgggtctccgaatgaggtcacacaattaaaattaaaaaaacgaaaccaaaccaacccctccatttgcgttgcgctttcagggtgcttgaggctttcctgtgccttactttgtcggagcctggcaacatcgctgtggggtagaaattacaagtctcatttcacaggggaggaaacaagtttagagaggagggatgaatttgctcaaggtcacaaagcggaagggagcgcagcagagaccaaaaacagggagactcgacttccaactcggaagcttttcaacaaggcaagctggcccggagtgggtggggctcagactctccctccaggctggttccaaaatggtgggggcagtggcgtcagcaacgcccccgccccttccgtccaccgccctcctccatctccaggccacccaggcggggggaggggacggccccgagcaacccacgtgaccgccgacaaccgagcgcgtgacgcaaagcggcgggcccaacgctcgccttgtcttttgggaaacgtagttctgatggcagccaagtcggccaggagaggagggcgtaggactacatttcccaggaggcagcgggtctacgccgtcgccgtcgtcggagagcggagacgctgggcgcgctgtggggcgggggcgaggttcgggctggttgttccgttgcgagctgcagctgcgatctctgtggtaggcccaggtgagtgagcgcctctgatggaagttagggcagcttaaccggctctagtggtttcgtctcttatcttttttccccagctgctggtcaggggctcggggaaggcctggcgtggagtcgctccccccagcttacaccctggcctcttctgagcgggctccgttccctccggctcctccccttccccgccctttaggtcttcccctggccccggcctagctcccaaggctcttggtcgccttctctgcagagcagctcctacgccgctttatcttgcagtcggcctgggggcggccactccctactcctcccgttttggtcgtatgaaccccgttatttggatttcttttcccggaactcccgagtgcccttccccccacccagtccccattggcctggttcggtcttctcctagggcgcatgtggctgccactcagtaaatgttagtaccgcttccgttctttccagcctggtggccaaaaacgggatagtccaaatttgtctcctacgggaatattagagttctcacttttttcttgggctggagctgaggccggcttgcattccagtggcaatcggcgtgagttctgcttatatgaggtgaattattttgcttctcttagcacctaagcaacttttatcaactgttgtctttgactttacaaatcttaggggtggagcatggcagcagaagctggggagcagcaatggtgcacagaagttggaagccatcagtggcagtacagtgtttatggggaatttgttacttggggtgaagggaaagcctctgagagtatagaaggacctggcaagagagaggcagtgaagcttctgttgggagcataacagaagtatcctgaaccagttggcttgggtttaaatcttggccctgctatcttttgatcttaggtcaagagtcttcatctccagctgcctcagt

SEQ ID NO: 4599 - DNA, 6000 bp, Homo sapiens
tctcacaaagtactgagtacgtatttctattcaatcagcctgatggataagcttcaaaggaccaaagtaactcattaatataatgtttcctcaacaagccagtgagttttgtaggaaagcaagagagtgacaaatggcaaatagtgtcttttaaagattctgttaggagttattaggcaagctggtaatactaccacccccaattttttgtacattcttaaaaataattatgtctgattagaggcagacagtatagcatgaaattcaatctttgtgctattacatgctttgttaaccatgtacaataaggatgagaaaaaaagcaaatcactttatttttggatttattattattaataattatttattccttattcctcattatttattatttcatttattatttaagagatagagtgtcactatattgtgcaggctggtctcaaactcctgccctcaagtgatcctcttgcttcagcctttcaaagtgctaggatttcaggtgttaagccaccgtgcccagccacaaatcactttatgatgctgtttaattatatgaatcctatgaggtcttctataaggtctctaatagtgtatgtgactaggatagaactggtgtcagaaacaaaacccaaaaacagaaactttcgtatgtcttctaaaattccactaaggaagatgtgtctttcacttaagatcccaagtcacaaagcccataatcacttttttttttttttttttgagatggagtgtcactttgtcacccaggctggagtgcagtggcacgatcttggctcactgcaacttccgtctcctgggttcaagcaattctcctgcctcagcctccagagtagctgggattacaggcgtgtaccaccttgcccagttaattttttgtatttttagtagagacagggtttcaccatgttggccaggctggtcttgaactcctgatgacaagtgatccacctgcctcagcctcccaaagtgctgggattacaggtgtgagccactgcgcccaacctccatattcacttttgatgacacgttgagtactttctttctctgacatgatactgagtactttatttctcatttacatcttaccacaaaaactactggatttcatcatttttgtcatttttacttatgaggaattcaagccttaaaaaagccaagcattactttgccaccaagaaggaggcaaagtacaaatggaagccctgagctttctgacctcaaatcctaggctcttaaccaccctgctaccctgccttcattcttaccatgatctcataatttgtgcttatataggctgcattcagcaacccaaactgactggtttcctcaggaaaactgtcagagctacaaccagtgcattgagaggatccgatggactatgtaattttatggactgaatgatatgaaaggcctcaggaaatgtgtatccaacactttggcaggtgtaaaagaagacctacatatttcaaagcagttacagatgcaaaatacgtccatagaaatatatgttccacacacttggaaggctaaggcaggaggatcgcttgagcccaggagttcgacaccagcctgggcaacatggtgatatactgtccctacaaaaaaatacaaaaattagctgggcctcatggctcacacctgtaatcccagcactctgggaggtcgaggtgggtggatcacctgaggtcaggagtttgagaccatcctggccaacatggtgaaaccccatctttactaaaaatacaaaaattagctgggcgtggtggtgggtgcccgtaatcccagctacttgggaggctgacatagaagaatcacttgaacccgggaggtggaggttgcagtgaaccgagatcatgccactgcactccagcctgggtgacagagtgagaccttgtcaagaaagaaagaagaaagaaaagagaaagaaggaaagaaggaaaggaaggaaggaaggaaggaaggaaggaaggagagggggaagggaggggaggggcgaggggaggaggggaggggagaggagaggagaggaaaggagagggagaaaaagagagagagagagagaaagagagagagagagaagatggggaaggtcccttctgggtttccatctaaaatcaaagaagaaatcattggtttcaataataatattttaaaatccaccctatgatttttttttctttaaaagaaaaatatcaatctaagaaaataatacctaacatggtgttaatgaaaagtaggttggattggttatgtgtacataagaacttaaagctcaaaggaaaaacagcacgtataccagcatgttgacctggctccgctgacagccaggattaccagttatttcacttggtgtgtaccagtgctacttggaaactacccaccttccatgagcaggtctactcaataaaatcttactttcatgaggctgtgaggatatccaaatggggacatttcttatactcagaagaccacaagtcacgaatgtggccacttctgattctgacttcaggggtcacccagaccccaagccaccccaacccgataaaggcaagttcaccttgggcaaagttcagagccagcagcacagctgaaaggcagtggacagcactttcagatgctgtattccaacatttcaactgacatgaagtgaggcaagaggggaaataactaacagtaatctgattaaaaaacaaaagagaaaaaaaaaagggcctggtgtggtggctcatgcctgtaatcccagcactttgggaggccgaggcgggtgaatcacctgaggtcaggagttcgagaccagcctggccaacatggcaaaaccccatctctactaaaaatacaaaaattagccgggcatggtggcacgtacctgtaatcccagctactaggggggctgaggcaggaggattgcttgaacctgggaggcggaggttgcagtgagccaagattgtaccactgcagtccagcctgggcaatggagcaagactctgtcattaaaaaaaaaaaaaaaaaaaggactggcctgggtttacaggtagctcacacctgtaatctgagcacttggggaggctgaggcaggaggactgcttgaacccaggagaccaacctgggcaatacagcaacacactgtctctacaaaacatttaaaaaattagctgggtgtggtggtacacatctgtagtcctagttactcaggaggctgaggcaggaggattgcttaagtccatgagtctgaggttgcagtgagctatgactgtgccactccattccagcctgggtgacagagtgagatcccatctctaaataaattaatagaccataaattctgtaatgtgaatctttagacaaagactgctaaatctatcatctgatatatgaagttttattacaacaaatgtttatatattgagttaaaaattatctgtacccatacacacaacctgcatttacttaatttaaaaggagtgtcaatattaaaattgaggattttggccaggtgcggtggctcacgcctataattccagcactttgggaggccgggtagatcatttgaggtcacaagtttgagaccagcctggccaacacggtgaaaccccgtcttgactaaaaatgcaaaaattagccgggcatggtggtgtgcccctgtaatcccagctactggggaggctgaggcgggagaattgcttgaacccgggagacagaagctgcagtgagccgagatcgtgccactgcactccagcctgggcaacagagcgagaacccatctcaaaaaaaaaaaattgttattttgttgttattgttgtttttgaagacagagtctcactctgttgcccaggctggagtgcggtggcatgatcttggattgtgttcttccagggttgcagagagaagtgcaacagcgtctcattgcaacctctgcctcccaggttcaagcaattctcccgcctcagcctcccaagtagctgggattacaggagtgcaccatcacacccagctaatttttgcatttttagtagagatggaggtttcaccatgttggccaggctggtctcgaactcctgacctcaggtgatccgcctgccttggcttcccaaagtgctgggattacaggtgtgagccaccatgcccagcctaagaataataactttataactatgaaaaatgtgttacatattcaccattttgccagcattaatctcaaagcataagttttaccttttggggataaagagatagattgtgttttagccatatgaccaatgtagaaacaagctaaggttaactcctcatctaatgaataggcccgataaaaaagttggttgaccacaacatgaataaataaataaccataagcttggaaatgctacctgtagtatttcagagtgtcgatcacatttgtagtcatcacttaaagaattaatgtctgccaatgttatcatctaaaatgtatttacagaggtcagaagagctatgtctgtcctcctctatgcaaagaggtgatgacatcaaggggtatgtcacaagccaaagtttagttagcctaagttagttagctggtttgcagtttttatccactaagtctgatcttctgacccctcagttttacaactttccactctctgtgctgcatagcacctctccacttctgagttaatcatttctttgccattatctggcaagaattcttatctcttttgctgtcactttataacagggtcctcttatcaacctgcatagagtcatgtgatgagtcaaagcctatcaaaagtttccattcttctgattagaaaccatcatgaaactggatacatggtttacagcaggtcactaatgttggaaaaagtacagagtccagggaaagacttgcttgtaactttatgaattctggatttttttttttcctttgctttttcttaactttcactaagggttactgtagtctgatgtgtccttcccaaggccacgaaatttgacaagctgcacttttcttttgctcaatgatttctgctttaagccaaagaactgcctataatttcactaagaatgtcttctaattcagatactggggatttacaagagtctttaaagcacggacttacacctattggtaagtaggagtttctctattgatcatctatttattctgctactacatacatataatttaatcttgttgatggattttgcattttaagtcatggcttttcctattatgtttattaaaagcacacaataagcctatgtatatatatcacacatttatctttcttgcagttcaaaaaaagcaaatggatatttcaacatatgaatattattcattatatctagtgtttactggtgtcattctaataccctaatcagccagaaaatataatttatactttatcaatttcaactttaatattttctgataatttttaatcagaaataataagctaaaatttgaacaatttgaaacaagttaatcatattgagtgatcattgatcaaactttaacagatagctgtcaagtatttgttacttttcaacccacacaaaagtatggtgtcttattctctgcttataccgtaaaaaattttcattttattttcctggggaatgaaagtcatgcccccacctccaaaaaaaaaaaaaaaaaaccaaaaaaactagaccatcattagtaaaggatttgaagagctactgtttctcgcaacaattagtatattttgtttttacaaacagaaataagtaaataaagctactattcatttaaaaaatagagttacaaacttatgaattttatagcaagactacattcaattaattctaaaagtaaaggactgaagggaagtgattcccagtgatctgtaattatttgtctgttggaagtcaggcccttctgcctttccccagtttttgaaggacctgtgccttttctggcagcatttgcctaggctttcagactggaatttccctccgaatttgcaggggcctgtcatg

SEQ ID NO: 4600 - DNA, 6000 bp, Homo sapiens
tctagttctgagctgttgcgggcacttggtaaatactaatgaatgatgaggctggagctagcctgagagggtgctgggagtctgggacgcagtaaaagctttaacagtgctttccccaagggcatctcgactctgaccttctggcaaagaaactggttctgccagatggtaggatggaggcttcttgttgcccgaacagccccggcagcccagtcaacagtcagtgtctgctctgagcaaaaaaccttttaggtgctggagagcacagatgctgcaggcaacctgcagcctggcctcttgaatcctagtacctggctttcaactcgaaaccgtctgagccttcatctgtacagtgcggatgaaaacagctcctacctcacaacattattgtgaggattaaatgaaatgatgtaagaaaaaaaaatttagcacagggtagggggcagagtaaggatactctgtgtgggtttatacatttccaatgttatgtgtgcgtttatgcagataaaattcagagtggctgaagagatgaattttttttttttttttttgagacagtgtcttactctcacccaggagtgcagtgttgtgatcgcagctcactgcagcctctacttcctgggctcgggtgattctcccaccttagtctctcaggtagctgggactacaggcgtgtgccaccatgcccagctaattgttatttgtagagatggggttttgccatgttgcccaggctggtctcaaactcccgcgctcaagtgatcctcctgcctcggcctcccaaattgctgagattacaggtgtgagccatgccctgccatgaaaagactaactctagactgcaatggctttgaataattttctaaacgtttagagtttagattttattccgtatcacaatttggagccacggaagtgtttttttgtttgttttttgttttttaaagtgacaccattaaaaattcattaaatacagctggctattatctggctagacgtctaagcaaacttcttgaatgtttggaaaacagattacactttcactaagacacctgttggtttaccacatacttcttatttgaatatgattagcatcagaaagtccctatgctcaaaaatacctcttttatcaaattagattaacaaactgcatcccgtaagatgcagtaacttttcttaagatccaatggctagaatataggaatttgggttggattgggaagtgggggataacggtggcaaaaaattgaagattaaaaaacgaaatacaggccgggtgtggtggctcacgcctgtaatcccagcactttgagtggctgagacgggcggatcacgtgaggttaggagtttgagaccagcctggccaacatgatgaaatcctgtctctactaaaaatacaaaaattaggagggtgtggtggcaggcgcctgtaatcccaactactcaggaggctgaggcaggagaatcgcttgagcccaggaggcggaggttgcagtgagccgagattgtgccactgcactccagcctgggcgacagaaggagactccgtctcaaaaataacgaattacatgagatttataaaaagttggtaaatataaattctgtaacgtaaacttgggtatatatgtgtatacacgaacaaactgtgaatgagactgattttgtaccgtttggcccagaattattcacgctcattgaaattagtgctcttttaaaagattcacattgggttacttatacatttactccaaagaaattgccattttccccttacctgcatctggctggcataatcaactgaacaatattctctttcttcccctttttcacttacaagtggggcagaaaggggaggagagcagtcctcattctttcagcaaacttactgtgcacttacaacgcgcgaaggcgctgtgctcagagaaacaaaacctaaccggttgtggccctcgagggtgtgtgggtggggagagctgcagccacaggaaacggtaacacggcgcgtaaagggctctaattgaacttaaggaccaatggggccaccaagcaggaagtgactgacttgcccgcgtgtgtctgaaccgccttcacagggaggcaacttttgagtaattgcggggctggagggtgggggcactggagggaaccgcggggaggcgccggcttcggacgcggagttgtgggtgtgggagagaggcgacccagaagccgaggcccgaggcgggagggggctgcgccctggcaagaggctttccggagtatcttccatctgtcaatacaggctacaggactcagtggccctaattcgagaaccaaacgtcccccgccggtcagtcttttcccccagggcagtcccaagggcggcgagcccgcgcgcacgagagccgagcggtaggaagagccgagagctagcggccggggcctcggcgggccaggggcgcggagaggccgccggagaaaggactaagacaccggtggaccgagcagttactcccggcatgctcctcctccccgggcagatttcaaaccctctgcagccccacctccgcgccttcgcccccggccagccccagcaacaggcggcggcccgcttctcattggccaggcccgcgctgtcgtgttttgattggccgcggagcctcccggccctgcttctgcagtcgctgccgactccattttgtcggtagaggcagaaggagaaggtcgggttgtagaagctggggtggccggcagctcgctcatcggtgttcgtgggctttgtcggtccgtgcctcgtctctccctggaaagggagggaggcttcgacgtcgagagggagccgctgccgcgttagttccgagcttgaagtcagtaagtagcggctgcgctaagggcgcggccatgttggtggccgcgctccccattgttggaggaaggaggcgagcggaggcgagatccgggtaacccgggcgggcgcgggcggtcacgggcggtcgcagcgccgcgacccctgcggctccggagagatggggccactgggaagccaagcccttgtggcgtcggaggaggcgttttccgggttcgagttgggaattactcacagtccggaaatggcaatttatttagggttgtttatctgtttggaaagctctcttacccctttgaaaggagggggcttaactatttggtaacttattttcttggaacatcaaattaaaaccaaaccttgaaagttaagctgttccctctagggagacatttttatatatttaagatgggcttagactgttagggcttgtgagaacttattttaagacggggaggaggcgagagcgttcataaccaaaggaaacactgcgtgatgtctacatgttccaagagactgaaaatggatgtgacatgtgtggaaagattggaaaattctggtgggagtttaaaaacacggtctctttagaaaatccgcctgaagccaattttttgatatgactcaacatttaacacttccttgattttatacgcgagagaatctgaaggtctttcccaggaaaaagataaagataaaacttattgcgggacttggagacacttacaaaaattccccaggagtgactggatctcaagggtgaagagtttttttaaatggtcgtggttataaggtcaaagaaagccatcttacgagaaattttctaccttttagttcaggaagtagccttctttacagtcaacgattttcgtagtaaatctaaatgatcactttctcaacgtgtttttgaaataatgaagtaatctttacttttctagctaggacttctctcaaacttgtgtgctgaggagactcagatgttggcctcagctcctaggctgaactcagcagatcggcccatgaaaacttctgtattgagacaaaggaagggatctgtcagaaagcaacacttgttatcttgggcttggcagcaaggaagaggacaggtagtggagatcctgcaatctgaaaagcagactgaaaggtaatcatcataatgggcaaacattttatgatggaaccatcctaaaccaattgtttttattttaaaatagattatgtagatttgtgggtaagctcatttttcttagggaaggtataacaataaaggttgtgcatatattgaagtctgaacggcttgcttttttgagtttaaagcagctgaatagcctgttattgagtcttgtccaaaatatctggagttataagttggagccatagaagcttcttaaagattttgaacttttcttaatggaattttactcaatatttgtttccattcacttgtaggtgacaaagaagctgaagatgggtggtggagagaggtataacattccagcccctcaatctagaaatgttagtaagaaccaacaacagcttaacagacagaagaccaaggaacagaattcccagatgaagattgttcataagaaaaaagaaagaggacatggttataactcatcagcagctgcctggcaggccatgcaaaatggggggaagaacaaaaattttccaaataatcaaagttggaattctagcttatcaggtcccaggttactttttaaatctcaagctaatcagaactatgctggtgccaaatttagtgagccgccatcaccaagtgttcttcccaaaccaccaagccactgggtccctgtttcctttaatccttcagataaggaaataatgacatttcaacttaaaaccttacttaaagtacaggtataaaataagacaaatgtttaaatttagttatgttcacggatagttgtcaattggtctgaaacaaattcgctagggaatctatttgtgtagaactaattaatgtaaaaaaaatagaccatctcgtgttgtgtgcactgtgatataatggtagtatcagtgcaacttaaactaatgattgtacttgatattaagtgttctcaactgagtaacttttaagtggaaaccaagtttagatttggggagtggtaaaggaatcagctttttctattgttaggggaagacagtaatttatcattcatggaccagtagattgttgaaagttggtgaatcggattataagcttctagctaacacaaggattcagaattaggtaaacatctgaaggtttagtatattagaaacacccaaaccagtaatatgctaacctgatgcactgctgaaagaaaatgtgaatttttcgtaataattgcattttagtgaattgtacagtgggtggaaagggcatttggagctcattagaatgagacatagtacaccccaatggccctgtttattaaatgtagtggattaagtgtctgtcaacaaatacaccaaaaccattttttatagaaacagtatttaatggtcactcaatagctttcaaaatacatttttgtattacagcactgcacaagctattctaatagtgctctggcctcatcattcctgcaaagcttgctttggggagttggataatgtgaaaattttaagtacctaggggagaaagagccatgtaaatatctgtaataaacttgtagcatatgtaaagttttcttggcctttatcttacaaaaatggagtattttagtatgaatttgctgaatgtaagaccgtggactgttttttataatatggcctaattttaaaggtccaaaataacttgtttttaaagtttgcccttgtgctaaagtgccagtgtatgtatgttatacttgatttggttgtaaactatatttcaaagtaaaccctagtgtaataagttttataactaaaaaggtttaagctgctaaaactatttttaagagatgtgaaatgcagtatgggactatctttttttcctcctctaagcccaaagattaactagagtccctccaaccttatagattgttggctttcacaatcttataacctaggatacaggtagtttcgagtatggtgccagtgatgttttgtttttgtttggtcaaggggtaggtgcaacccaatggaccacttatgcaaaagatgtaaactct

SEQ ID NO: 4601 - DNA, 6000 bp, Homo sapiens
tgggtgcctgtaatccccactgctcaggaggctgaggcgggagaatcgtttaaacccaggaggtggaggttgcagtgagccgagatcgcacgactgcactccagcctggcgacagagtgagactccatctcaacaacaacaaaaaaagacaatgcaaagactcaaatttgaggccttttgagagtcttttttttttgttttgttttgtttttgaggtagagtctcgctctgtcacccaggctggagtgcaatgatatgatctcggctcactgcaacctctgcctcctgggttcaagtgattctcctgtctcagcctcctgagtagctgggtagctgggattacagatgctttccaccacacccagctaatttttgtatttttagtagagatggggtttcgccatgttggccaggctggtctcgaactcctgacctcaagtgatccagccgccttggcctcccaaagtgctgggattacaggagagagccactacgcccggccagagactcttatttttgaaaacctcttgaaatagcacggatgtttagtggggtcagagttgaagttacatgaatcctatcacagtaacttagatttcccctttgtatgaataagtgtgtgtgggtgaggagcagggagcatgatgcctttcataatggaagactgagggagggaaggacaatgataggttactgacatttggctggctctgctactcctccactcctgggatcctggccttgctgccccctagaggtattcagtaacctccactatcacatggcagggctggtactgactttagtacatagataatgactcatcgtattaagctaatttgccctagtctgtaatttcccctagatgaaggaaagggaagggaaataactctgggagagttgcgccagatcctaggcttagtcacacaacctgtttgagctcagtgggaggtaatatgtggagtcgtggtataattagtcagagctaggttagaatccagactctgctcgcttctctcacctgagcctcctacctgtaaaatgagggaaataatactgagttgtattgtcctttactgcatgccagctatgttggtgtaaagtgtttaaacacagtgtttatttagagaaccctgtaagacaggtagcattcctgtaagaaataaaagtaatagaacgcactaacagatgataatatacaaagctatttatctggcccagtaccagatactttggagctctcaatatagtgttaatttccttctcccttattaattcatgcctgtatcttagactgagctcctggaggccatggactgtgttttgttcctgcttctatgtatgtcatatgtttatcacagactcagacatagatgtgtcactgaacatgactgacagaattgagaggaagtatcttgggtgggtaggttgggggtgagctggctttataaggttactcatcatcagtttcttccatcacaggcatacttttgattgccctgtgcttatccatgaggccccagccaagcagtgtcccttagaaagatgattgatcaccctggctcttctcttttcacaggaagcatcggagagcaagagacaggtccagatcctcctcctcttcctcccagtcatctcactcctacaaagcagaagagtacactgaagagacagaggaaagagaggagagcaccacgggctttgacaaatcaagactggggaccaaagactttgtgggtccaagtgaaagaggaggtggcagagctcgaggaacctttgtaagaccttcccctctccccctttctctgagacccttgctcctaccagctttgatcacgtttcatcagaataccagttttgttgcctttgacataagtaatccaatccaaagaccctggaatctttggttctccttcccacatttcctggcctttccattttttgttacttttctgttcataatcacttagctagaaagcctcttatggcttctggtctcagaacttcccccacttaaccttgactactgctgtttatagggaggcccttggggcaggtttgtcctctgtgtaggctgcagacttgagatgagcagaaagggaatggctggaaaccagctgaccagcatatgactggaagacagctgtctattccacaccagaaaaatgtttgaacaaaaagcaggggggtttgttccccattcctggcatgatcctttgttctttttccctcatttattgcaatagcagtttcgagccagaggaagaggctggggcagaggcaactactctgggaacaataacaacaacagcaacaacgattttcaaaaaagaaaccgggaagaggagtgggacccagagtacacacccaaaagcaagaagtattacttggtatgtgtctggggataaccaggaagggttagagggcctttgacacacagagtagctgataccaagccttaattagtttgtccaaaactgcgattaaatgtacgtgcaggattattgcactggggcatgtgtacttgcatagtgctaactagatgggtgtcctctagagaggcagtcctggtcttcaaagggtttatcactgaagatgtttgtggattccaagataagcaagaagcattggtcttgtctttttagtctatgaacttgttttactgctcacccaccaccaacctcagcctccctcatttctgtggatacagccataacccttccctgatgccgctgtccctctctgccactccttcatgcaagaatgacaagaaagaccgctcaggatctctttgaggaaagggatgtctctccaaaatgaaatgccagtggggcttctctcatctaggctgttgatcattcctgtgcactctgggcctccctcagattaatacttttataggctgaagtacctggccttgagtgagctctcttggccttgatctgtaacagcagactaagatccaagctggtgtgagtgttataactaaggtaaaggagcagctgaatctccatcacttgccaaaatggctggaatggatctgtattgtcagttggacagctaggaaacaggttgtgtgtggatggctatgcgtggccaccatcccttttctagggttgctgctgctggaagctgctttgaggctactagaggacctttgaacttatctctagggaattgtagttggctgggcccgggttaggtgctggagtgggactgctgtagggaaaagattaaaggccctctcccttgctcctatctgccacctgagagagtattgccagcctgattcgtttagtgtgaacaagcagccatggtcagaagaagctgacacctgctgagctgagctccaacagcctaagaccctagcttttgtgggggggtggtttagactctgaagtcatggggctgataaggtaatgactgctggttttcaaaatgctttctccttcattgtttgattggatccctccttctgtctcatgagattgtcagagcaaggattgtttgaaatgtaggttaatcctttccttgaactaagtgaaaaagaaaaaatgaaatgtaggttaagtgtttttcctaccccgtcacactgcctccttgcataaaacaggggagatacaaaatgagagtgtggaggtggaggatcaggaaagccccagccccaacattggattctgagcatttggagtgcagtggtatgatcttggctcactgcagcctctgcctcctggattcaagcagttctcctgcgtcagcttcctgagtagctgggactacaggcgcacacccccatgcctggctaatttttttttttttttttttttttgtattttagtagagacggggttttcaccgtatagcccaggctggtctcgaaattctgagctcagacaatctgcctgcctcggcctcccaaagtgctaggattacaggcatgagccactgcacccagccgcattgcctcctttcttagctgcctaacaacccagttcacatggagttgcacgttttggtgtgattggctttctcaaacccaccctttgagagaggatatactaaatcatatggagttgcttaaagttcctaagctttaagcacgtttgcagagtgggaggtgataatgatagggtagataggagaattaaatgagatagtacataaatgtcttacttcagtgctcagtgacgtttttattttctttaaactattaagggttcttgctcagtgaatcatcatcattgtcaatcatcgttacaatgcccaagctgttaccttaaaattcctaaatcacccaactgatattctcatggatctgaaccactggcatttttggagtgggggacagggagaagtgcagaaaaggatcaaaaggctgggttagggcacaggttcttttgggaaaggcacatttgggtgcgtgcagagaagagagctctggccacatcttgttcactctggcactgatggcaattttctttcccctcagcatgatgaccgtgaaggcgaaggcagtgacaagtgggtgagccggggccggggccgaggagcctttcctcggggtcggggccggttcatgttccggaaatcaagtaccagccccaagtgggcccatgacaagttcagtggggaggaaggggagattgaagacgacgagagtgggacagagaaccgagaagagaaggacaatatacagcccacaaccgagtaggggccacccttgacgggattcctgcccaggggagagaggcgctgggaagatggctggtgaggagcttaacagaggaacctcaagaagattctgaaaatcctacccccaccccccaccagccgcacagattgtactaccgcgagaggcatccctggcgctgtctcccactggacagaggaggctggccatggggcccaggggtcaggcccagcttttgagcagaatacaacgcattgggctttagctgtttttctcatttgttggtgtgtggggtgggggcaggggtagggcgggagagcgatgcttggatttttgtttcctattagaaaccaacagttttgttctaatttcatttcatttggagctaagatgactaatttgatgattttcgatctcttttcccctgtcctgattttaaaagccccctcctttttttttttttttttctttttttaggcatatgtagtaatattagaaacatttaatttgggaaactttgattcttgaaagagaaaacaaaagcatgtgaataaactttgaagtgttcacctcagtttgggaccaaactgcttggatctttgtaaaaaccggttttgtatgtcaaggaggagtttaaggcctttccgaccaccttgtgttccccttttctgcgcagccatgtatcacgtggagttgctccttaccacacctcacgtgcccctgagccctatttcctgatttcttctgggctggacttccccgttctccaccagcagctccagtatcccaaactttctagtcctgctgatcctcccagcaacggggtggaaactggagggcagtgtctggtctgttttctaagaaacttatgaattctattatctttacaaatatgagaaaattttttcaatattttttattaatctttttataaaatgaaaagaaactcctatgatcgattaaggaaggtggttatggctgggtggttcaggggtttttttgggtttctttttttttttctttgtctttttaaccttaagctgtttaagttgaagcattctcagatgtttggggggaaacatcctcttaaaatgggtccttgtgcttgccttctggggaggcggtcctgagcaggtgaatcataaggcatttatgcatatgttatatgcggactgcacccacctctcccccccagcctttgcctcttgcgttgttgtgctgctttccccttactttgctacatttctatagttaagttggttttacttgaatgattcatgtttagggggaaaatgaaaatctcccttaaa

SEQ ID NO: 4602 - DNA, 6000 bp, Homo sapiens
caaagtgagaccctgtctcaaaaaaataaaaaataaaataaaaatttgtattcaaaacccattctatcaaggctattctgcagaactgcaggtaactatagtaagtaggttgtgataatgatagttttctgagttgtcctcctccttcaatcagaacagttgtgcatttatattttatactttgaggctctgcttaacatttcattttttctttttctttttattttgagatagggtcttgttttgtcacccaggctggagtatggtggcgtgatcacggctaacctcagcctggacctcttgggcccagggagtcctcccacctcagcctcctgagtagctaggactataggtgcccaccaccatgcctggctaatttttgtagttttatagagacagggtttcaccatgttgcccaggctggtctcgaactccttcctcagcttcccaaagtcctgagattacagatgtgagccaccacacccggccaacattttatttttaaaaagataaaactgataagtcccctaatacccttctaccctaccccagggtttattcaagcagagcacacattttgtgaaagccctggtggggcagggaggtgtcttcatttcttcccccctgctcacagacagatggtggttgaaaaaattcagacattacagaaataggaaatgtagaaagtaaaagtttctcataatgtcattcttcaggccagtgtttggatatatagaagagatttttactgttatggtatgtcgtatgtatatatattttttcctttggtactagatgaaggtatttctgaatagtaaagataaagaggaaccgtggaggagaaatagggatgcacttcttgggtttgtttattatgaaagcttaatatttagcatcttgcttcagaagaacttaaattgtaaaagcctgttctgataattcatcttttccttggaaatttagaaggtgacattaattcttgggttaatggtgaatgctttgtcttattcattgtgtagaacctagcttgcctcttctcttcctttatttctgtttcagtctttttttttttttttttttttttttgagatagagtctcgctctgtcgcctaggttggcgtgcagtggcacgatcttggcttactgcaacctctgcctcccggttcaagcaattctcctgcctcagcctccggagtagctgggattacaggcatccactaccgcgcctggctaatttttgtatttttagtagattcggggtttcgccatgttggccaggcaggtttcgaactcctgacctcaggtgatccacccgccttggcctcccaaagttctgggattacaggcgtgaggcactatgaccagcctgttcaattttaaatggaggtagaaatctctgtctagctgcagggggggttattgtgatggttagatgattaacccaatgacaggcacgtggtaggtattcagcacatgaatatcattataattttcttttttctgtgaagattttgacaccatagataataatattattgtatatggaaacaagaagatagattgtttggtaactatttggaaaaggaaagtagtcataagaagttaagtctgaaaagacaatgagaaacactcagaaccctcaaccccacagcagttggaaagaacaaaggataccaaaaaggcaatattttaagatagtgaaggatggtgtaattattcagtaaatggttctagaaaaattggttgaccattttgaaaattagattattaatactgacaagtctcatatgaaaaccagagagatacagatgaaattgagataccattttcttcctgagatttccaccgtgacaaaaaaatatgatgattattgttggtgaaggtttggggaaattctcaaacactgctggtagcagtataaattgctgtagacttttctagaggacaacactatgtacttcaaggaacacaccttaaggatttcctattggacaggtccttaaagataagaataatcattacagtattatttatgtaagtgaaaaactgatagcaacctaaatatatgccaccatgggactgcttatggtacattcatatagtggaatgctaggtagaaaagagatggagacaggaaagtcatgtttattgacataatacagtgagtttcaaaaaagtccaggattaatgcttttgtttggtttaaaaacctttatgtcggactgggcgtggttgctcccacctgtaatcccaggactttgggaggccgaggtgggcagattgtgaggtcaggagttcaagaccagcctggccaacatagtgaaaccccgtctctactaaaaataaaaaaaaaaaattagctgggcattgtggcaggtgcctgtagtcccagctacttgggaggcagaggttgcagtgagccgagatcgcgcccctgcactccagcctgggtgacacagcgagactcagtctcaaaagaaaaaaaaaaaaaaaccttcatgacagactgggcgcaaaaaccaaacctttatgtctctccatttcctccttgatcagtgtctattaagtatatgttgagctctaaaaatttagttcatcagtcatactagctatatagaactacatagatataggacatttcattctcagaaagttctagtagagagacagtgctggtatacattgccctttttcttcctttcttcccttccttcttccccctttccttttcctccttccttctccccactccagtcttccttcccctcccttcccctgagcttaactgatcctcccacttccccctcccaaagtgctgggattacaggcttaagctaccactgcaccagtctaccttgcctcttcatatctttgtcagcatcttctgccggggccggctagtacatgcagttttccatccttagatttcacagaagagtttccgaatttcctttgtcatttatgtatcaccattttcatattaactaattaaactctacctctcagcccacaatggacatgttcagaatgcagagagaatgctgttacctctatgctgaaagtaaacaatttggggacaattttactgaacctcttagctctggagtatgcatatatataactttgagtttctgttctttaaaaacaatgctgggtgtggtggctcacagctgtaatcccagcactttgggaggccgaggcgggcaaatcacctgaggttaggagaccaagaccagcctgaccaacatggagaaaccctgtctctactaaaaacacaaaattagccaggcgtggtggcgcatccctgtaatcccagatactggggaggctgaggcaggagaatcgcttgaacctgggaggtggaggttgcgtgccattgcactccagcttgggcaataagagtgaaactccatctcaaaacaaaaagcagctaggtaggggccgggcatggtggctcatacctgtaattccaacacttcaggaggctgaggcaggtggatcatctgaggtcaggagttcaagaccatcctagccagcatggtgaaatcctgtctctacgtaaaatacaaaaatcagctgggcgtgttggcaagcacctgtaatcgcagctacttggaaggctgaggcaggagaatcgcttgaacccaggaggcagaggttgcagttagccaaaattgctccactgcactccaggctgggtggcaggagtgaaacttcatctcaaaaaaaaaaaaaaaaaaaaggctgggcgcgatggctcatgcctgtaatcccagcactttgggaggccaaggcaggcagatcacttgaggtcaggagttcaagatcagcctggccaacatggtgaaaccccctctctactaaaaatacaaaagttagccaggcattgtggcgggcgcctgtaatcccagctacttgggagtctgaggccggagaattgcttgaacctgggaggtagaggttgcagtgacccaagatcatgccactgcacttcagcctgggtgacaaaatgagactgtctgaaaacaaaacaaacaaacaaaaaaaaacaactaggtaggaaataggttttttttgtgtgtgtgtgtgtttttggagacaaccttgctttgtcacccaggcctcagtacagtggcatgaacatagctgactgtagcctcaaactcctgagcttaagtgatcttcctacatcagactcctgagtaactgggactgcaggtgtgtaccaccatgcctggtgatttagcaaaatttttttttcttttttttaatagagacgggtttcaccgtgttagccaggatggtctggatctcctgacctcgtgatccactcatctcggcctcccaaagtgctgggattacaggtgtgagccaccgcgcccggcgatttagcaaattttttgtagagacagggtctcgttttgttgcccagggtagtcttaaactcctgacctccagccatctgcccacctcagcttcctcagagtgctaggattatatgggtaaaacatcgtgctcagcctgaactagaatttagattaagtaccacatttgatgttacttgatttttctgtttgtgggaaatttggaaattaggcattaagtacttgcctatgagtgctaggcatttattggaatggaaatatgtggtatgaaaaatcttttttgattcgtatcattttcagatttaattcctatccagattatttttttaggggtagactaatttattgcttagattggggcttcaagtgttgccttcaggatactggatatttatgatgagtgagctaaagcttgtttagtgtctattttggggctatggtaggcagatctcttcccactggttagtgttattacagctgttgtgatgatctcattgaatgtagctaaaatggacttttagtcagcaacacttttagaagatttagtgtaatgagtgagcttttcgggcttttgttttgtttcgtttttttggagacaaggtcttatttcattgcccaggctggagtgcagtggtgcagtcatagcttactactgcccctcaaactcctgggcttgaaaggtgactcctgatcctgagaggatcgagtgatccttccacctcagcttcacaagtaagtagctgggactgtaggtgcatgccaccatgcccgactgttctttctttctttctttattgtttaattattattattattttttgagatggagtcttgctctgtcgcctaggctggagtgcagtggcgcgatctcggctcactgcaagctccgcctcctgggttcacgccattctcctgcctcagcctcccaagtagctgggagtacaggtgcccacaaccacacccggctaatttttttgttagccaggatggtctcgatctcctgagctggtgatccgcccgcctcggcctcccaaagttctgggattacaggtgtgagccaccatgcccggccgtgtttttttattttctgtagaggcggggtctccctgtgttgcccaggctggtcttttttttttttttttttttgagtcagcttctcgctctattacccgggctggagtgcagtggctcgatgtcagcttactacaacctccgccgcccctgcaccggctttcagcgattctcctgcctcagcctcccaagtagatgggattacaggtttgcgccaccatggccagctaatttttgtgtttttagtagagacgaggtttcaccatgttgcccagattggtctttaatgcctgtgctcaagtaatcctctcacctcggcctcctaaattgctggggttacaggcatgagccaccttacctggccaaactggcttttacatttcatcatccctgtaaggcctttgtttccctggttctgggtaggttaatcactctgtatcaagtgtattctagcagggatggcaatatctttgatttctgttttcctccaacattttattaggaaagatttcaagcatacaaaaaagttgaaacaattgtacag

SEQ ID NO: 4603 - DNA, 6000 bp, Homo sapiens
aaatgccatttatatgccagggagagtgggggaagacagttatttaatttttcccagagggtacaggctatttgcttttagggatggtcatttttttgggtccttaattagacaataaccagcaggaaaaaaaggtgataaacagactgctatggttaaaggctaatcagctgagtatatggatccaaattaaggtcttatgttgctttgtctttactaggtgattagaatgtttcaggcttcacagacaaaatacacttagaagacatgttggttgatcaaaacactcagccaaagaaatgaataattatttctttatactgttcccaaacacataaaagctgggttctgtgatgtcgggaagatctactcatcagatgctacagagactaacacttggggggcatgctggcagagagccagatgttcacagctgcacataccccactcatgacacaaaatatgtatattcaccgatctacaaaatgctttcatcattgtgtttaataattccttatcatctccaaagtaaaattagatgacaagtatttgccaaggcacaacacaagagggtgacacatgactgtgacactctttgtctgctgtgcacttagcctccttttaattgtctgtcttcagagaagttagagctataccaaatgcaaacaggatggcaaacaaagagaccagagcaaaagatcattttttcactttctaaatactggaagttattaatttactcattctgaccttgtacttgctcaacttgtaagcagaagaccttcttatagagtaaaatttaagttgttgccataaacccccaactgctttaaaatagctcttctgcctataatcctagtgctttgagaggccgaggtgggaggaggactgattgagaccaggagttaagagagctgcctaggcaacatggtgaaccccatctcaaaaaaaaaaaaaaaaaaaagtcgggtgcggtggcacatgcctgtaatcccagcagttcaggaggccgaggtgggtggatcacctgaggtcaaaagtttaagaccagcctggctggtagagacagtgaaaccctgtctctactaaaaatacaaaaattagccaggcatggtggtgggcgcctgtaatcccagctactcgggaggctgagacagaagaatcgcttgaatccgggaggcagaggttgcagtgagctgagatcatgccactgcactctagcctgggtgacagaggaagactttgtctcaaaaaaaaaaaaaattaactgggggatggtggcacacgcctgtagccctagttgctccagagactgaggcaggagaattgcttgaatctgcgagtttaaggtacagtgagctaggaccatgccactgcactccagcctgggtgacagagggagatcccatctctaaataaataaaaaacagttatccttccctgcagcctgctatggttgcactgttatttcatacttcgcctgaaaattttactcttatagttatcctttgctgtagagaacagttttttggctgggcacggtggctcacgcctataatcccagcactttgggaggctgagaccgggtggatcacttgagatcaggagtttgacaccagcctggccaatatggtgaaaccctgtctctactaaaaatacaaaaattagctgggcgtggtggcgcatgcctgtaatcccagctactaggaaggctgaggcaggagaatcacttgaacacaggaggcggaggctgcagtgagccaagatcacaccactgcagtctagcctgggcgacaatgagacttcatctcaaaaaaaagaaagaaaaaaaagagaaaaaaaatagtgttttttttctttttttgctccagaaagcaactatttaaagatacataataggccagcatggtggctcacagctgtagtcccagcactttgggaggctgaggccaacagatcacttgaggtcaggagttcgagaccagcctggccaacatggtgaagccccgtctctactaaaaatacaaaaaattagctgggcatggtggcgggtgcctgtaatcccagctactcaggaggctgagcaggagaatcacttgaatccaggaggtggaggtttcagtgagccaagattgcaccactgtgctccagcctgggcaacagactgagaccccatctcaaaaaaaagaaaaaaaagatacctaatatatgttctgggaccacacggaggccctctccagagctgaaaggagaaaatatcgaaccataaatgcagtgagagaagagtaaggaggagaaggctgatagccctgggggtcggaggcggggagtaggagtggctggccggccgatggaagggaaagtcctggatggagtatttacacattcagtttgttcctgcagtaatatttgtggatacaggtattgtgcttggtggcatggtccttgccctcctggagtttatagccatgctgtgggactagggctagcatccattaagaggtctcccggaagtagaccaagtattcaggcaggtgaagtggggagaaatcggaaaagagccattgaggccaagggaacagcgcaatcagaagacctgaagcacaaaagagctccctgtgatcaaggaacaggcacaaggcccatatgtggctagagcccagttggcaaaagtggttcaagatcaggctgtagccagatcctgtaaggccttgttgccacactaaggactttgaacttcctcgtgaaaatgaagagaagtcgttgaatagcgcaggtctgacaagattttaagaagtttcctttagttgctgtgtgggcagtgaatgggggcgtaaggagagcctaaaggagagactgcttgaagggttattgcaggagtcaaggtgatagctggtggcaggttaaactgggaaagaggggtagagatggtaggaggtggagagattaaggacaccatttagaattggaaacaacatggactggaaatgaagaataaaggaaagagtggtgtcaacggtacaatttaagtgtctggtgtaagcaactgggtagagagtggtgccagttactgaaggtggggacactgtaggagaaacccacttggggaccaatttttttttttttttttttttcagacagagtttcgctcttgttgcccaggctggagtgcaatggcgcaatctcggctcactgcaccctcgcctcccgggttcaagcgattttcctgcctcagtctcctgagtagctgggattacaggcatgcgccaccacgcccggctaatttttgtatttttagtagagacggggtttcttcatgttggtcaggctggtctccaactcccgacctcaggtgatctgtctgccttggcctcccaaagtgctgagattacaggcatgagccactgcgcccggccggggacctattaagtatgaaaaagtgtgagcaggccgggtgcggtgtctcaggcctgtaatcctagcattttgggaggccgaggcgggcagaccacttggggtcagaagttggagaccagcctggccaacatagagaaaacccgtctctactaaaaatacaaaaattagccggggcgcatgccggtaatcccatctactcaggaggctgaggcaggagaatcgcttgaacccgggaagcggaggttgcggtgagccaagatcgcgccactgcacctgagcctgggcgacagagcgagactccctctcaaaaacaaaaaaaccccccaaatgagtaaagagtaatgtggatattatattataaacgaacaaacaaaaaaggacttcgtattctttttgcatagggaaggggaagaaatgtggagtggaagaggatggtacagaaaaggtgtaaaaagaaaggctgtgggaggagtagggtaggagggcttctgaactggggttagtgtcacactgtgtaactgataatttaaactgctgaaaatgagaccacacttaaagatacaggtccctttaaaaggaaggcggatgttaaaagcaatttgcattttacctaaaatgggctgcttctccctgtaccctctccaaatacagccagactttctgtagaaacattttaatcatgggcacccttcccccgaaaaatccactcactaccagtacacacgaccttctgagtttaatggacctacggaggcccatccctgggctctctgggctaggttaatcccaggttaggccccaagctcagaggtagcaacgttcccagctcaacgacgcaggaagaccacgcctctaaatgttctgcaacctcgtccatttcagaattttccggggttctgggtaaactggcctcaccaaggattctgccccgtcttgttgctcccgtttttaaacacagaccggtgtgtgggagaggccattatttttccggaacactgtgctcctggagcagatagggacacgcagagtggctttaccgcagcgccagcttcagccttacccggctcctcctccaggccaccgcctcctcctcgcgcccaacccgccttccctgctcacccccggcccgctcctcccctttgctctcagcgcggactcggccactcactaccggcgccgtgttccacccgcccaccgcatggccccgtccctatgtcgctggtctcgcccccttccaggagggcccaatgagcgttcacatgcgccacaaggccccgccccgcaccgcgcagccccgcccacaggctgagttaaccaattcgcggccccgggccccgccccgcccgcaggccccgccccggcgcccggccccacgcgcccgcctccctccggggcgttgccgccgccgcgcctcagcagcccgcgcggagccagatgccgccccctccgccggtccctcccccggcggcctggcgcctccctccctccccaccgcggtgactctcggagcgggaggcggaggctgaggcggccgctcctgctgctgctactgccgccgccgcagcggctgctcgggctgagcacgccccggaacaggccgccgcgcgctgcgcgccggacccgctgcccctgccggcccggccgggtcgggcggcccaggtaagcgccgaggccgggccgcgcctgcaccgcccgggcccgcgccgcgccgcgccggggcttgggggagcggccagccctttgtctgccggggaggggccgcggagagcgcccccgaccccgctcggacccctgactgccccagcggcgcggcgccctggtctgggcctggccgcctctcgccgcagaccacctcccgcctccctgactcttcgcccgggggtcgcctccacaggtgtccgcgccgcccaccttgttgctcacctcaccgcgtccgggtgcctgtcatcgcccgtccgccctcccgacctctgggcccctgcctcttccctcacctgcgcccactctgagactcttactctccatatttccccaaactaaacgctgggccgcccttcctccctctgtagtttgattgaactgtcgtctcccgattccacccctccccggtgagccttcctggaaggtacctggtgggggcacatatctcacctggatggcgggcgtgtatgcacgaacctgcaaaattaaccacctggagccccaaactgcacctctcacctccttttcatcaccccaccccaaccaccttcctttttttggaacctggtaaccgagacactcaggtctggacacccagcctctgctaggccctccatccctccctctgccttgtgagctgaacttgtctgagcagtgcctgttgtcaggttagcccctgggaaggcggcgggggccgtgttggccgcaaatcaagagttttatgaataatgagacgtgtggcttgcaccacctcctgtctgaggatctcagtatgctccagctgtgaattattttgtctcctgtcactcacagaactgagaggaacatgtctggccaactgctgggtaaattgaggtacagggtgtgtgggtaagggacctg

SEQ ID NO: 4604 - DNA, 6000 bp, Homo sapiens
cgttccttgctcctgctctccaggaatgagcaggaacccctctaggacctgcccctgcagagtcatcaaccacggagacagcactccacactccctgaagacttccgggaaacagcccactgccttttgatgttgtgcttctgttattcctgggtgttgagagaagggacaggagcagatcacattcccgagtagttcattgtaaaatgtgctttttctatagcttggggatgttccctacagtcttaaagccctggccagctttctccggcacactcattcattcagcaaatcttacgaagtacctgctctgtgccagctcctactagacactgagatacccaggagagcgagctccaggccttgtccctgtagtcagtgccatggggaatgggaaagcaccatgcaatgcatactaggagatgggaacacagagctggtgttcccaacccaaccaagggagcagctcacacaggggaagcttcctggtggaagtgaatttaagcagaggcctgaagaatgaatcggagtgagacaggaaagtggaggtggaaagggattctcagaggcaagacagtgcatgggtgcactggagaaatttgtcagaaaacaagtgcttttcctggaggtctgagaatcagcaaggcgaaactgctgctctgaaggtcaacgctgtaagtcgatgttggatacctgctctacattcagccatgtggagggtacagaggaataccagcgggctctttgcaatcagaatgcttgacgagcaccatccaactttggagcccagagaacgaggttatctggggaacctctgccactgaaggcagcttcgttgtgaacacctccagcagccaagacctttctacctctcaaggcagccacaccatcatagcgagagtgatttccttaaattgaaaaaatggcctctctaatatgtctccccctgaccaccctagttttccttttagaggtagttatacaaaaaaggtctagagccttctccatgcaatagcccctcaaatatttgaagacggtgctcatgtttcacctccactccaactcgaatctctcctgttcattcttttgtttgtttgtttgtttggaggcagagtcttgctctgtcacccaggccagagtgcagtggctcagtctcggctcactgcaacctccgcctcccagattcaagcaattctcctgcctcagcctcccgagtaactgagattataggcattcgccaccatgcccagccttttttgttttgttttgtttttttgtttttttagtagagacggggttttgccatgtggcccaggctggtctcgaactcctgacctcaggcaatgcgcccacctcggcctcccaaagttctaggattacaggcatgagccaccgagcctggcctgtttgtttttgagatggagtctcactcattctgtcgcccaggctggagtgcagtggcacgatcttggctcactgcaacctccgccgggagtctagggaccctagactccctgcttctcctgcctcattcttccagattcttcctcattcttcctgattctccctcattcttcctgattctcctgcctcagcctcccgagaagatgggactacaggtgtgcatcatcatgcctggctaatttttgtatttttagtagagacaaggtttcaccatgttggccaggctggtctcgaactcttggcctcaagtgatcagcccatctcagcctcccaaagtactggaattacaggcatgagccatggcgcctggcctcctttccattcttgaacatgtaacacagctgaagtatcatagtggacaatgccaaaatgcaggccagaccacatattctggaaggactttgtttttaagttcgtttgttttttgagacaaggtgtcactctgttgcccaggctgagtgctgtggtgcagtcatggctcaccgcagccttgatctcctgggctcaagcaattccctgcctcaggctcccaagtagctgggactacaggcatgtgccaccacacctggctaattttttattatttatagagacagtgtctcactatgttgcccaggctggctttaaactcctggactcaagcgatactccctccttggccttccaaaatgccgggattacaggcatgagccacggtgcctggcctctggaaggactttcaaagtgagatgttatgggctggagttatcaagaagggccatatcgcagaagaaaactgtcttggtgagattcgaggaaaagggaattggctaagggagtggaaatggcattccaggaggaggatagagccccaacaaaggcttgtctttaatgccgatttgttatgtttagtaaccttgctttcccttaatataaattagtgtatttcctatattaactttaggaaatgcagataagcaaagggaagaaaagaaaaatcacctacaattccactaccacccagagataacgcccctagtgttttcatctatatccatgaagacacgcagtttgctctgcgtgtgcaggtgtgcgttttagccagggtggtactgtacataggttatgttatgcctcttttcacttgaaaaaatatgatgagtctttaccaggtcacgaaacatttttctccagcattattttggaagctgcatttgtcttgctttgggtggacataccattattcttttaaccaaacctctattgtcagacatggaggttgttttcatttttttctccttttttttttttttttttttttttttgagacggagtctcgctctgtcgcccaggcaggagtgcaatggtgcggtctcggttcactgcaacttccacatcctgggctcaagcaattctcctgcttcagcctcccgagcagctgggattacaggtgcccgccaccatgtccggctaatttttgtatttttagtagagacagggtttcgccatgctgcccaggctggtctcgaactcctgatctcaggtgatctgcccaccttggcctcccaaagtgcgagattacaggcatgagccaccacgccccacctatttttttcttaaactgttagaaatgaagtctgggtgttcccacattccttagcaatccaggtgtcttccttcccgttaattcctacataaccacaggccctcgaaactacaggatgcccttttcctccatcaagttccttcttccagtgcttctgagaggccccaaggaacactttcgtgttccacagacctgttggggctgcgtcttgtcctctcggccagccacttgggaccaaagcctgctcttctccctaagcgtcccttgtaacctgtttttctcgctgtagcttccccacactgccttgtcatcaaagtcatcaaaaaccctctatccatcatggttcattcagtagcacagaaacctctccagtctttcagaccaagggactttaatgtaaaggagctcgtcacccagaggatgaaggagctgggacactaatcaggacagacagttcagagatttccccaaagcaggaagctgtgccatcccaccaactgaaaggaaagatgaggggagaaggtgttgccagagccaggagctggcctccaaacaggaacaagaaagacataaggggttgcctggctgatggactgtccagagggagccagaactgcagagggatatggccattgctggggaagccactcaaacagaaaacgaggggagaaatgctctgatctctgcctccccagtcttcccccaggggctaaacctatcagaaagcagttgataaaggagtctagaaaatgtagtttcctgcagtttcaggaaatgactggcatgggccctaccttaattcctccaaagcacagcttagatttggctgttttgtcaaacaaactttagcaatcagggctgataacaattacaattcaggaaagaaaaacttaaacaccgatctcagcatatcacagcccattacacccaacccgttggcaggatccctgctaaaatttcgcttgcctttgtgtgcttggggccaggcaaactctccccaggggcaggaccctccaatcgtgtccaccctgaccagagtccaggccccagggcccttctaccttctccaggccctgcaggaaggagaaaaccatttcctaaacacctgtcccttcattcacacgaagctcatgtgcagatcctgccctacgtggcaaaatgatgggagagcagcctgaatcttcatcgtcccgaaccaaagccccattcatgaagttcagccccatctctagcacagcagaaagaatcactgaagtttgagttccattttttttctaaacttttgcagatcctagacccaaaggctcaaggtaagagcggctgggcttcctcacccccaacggcctctctaggggagagctgttcccaagcccaccccaagcgtggggacctgccttgatatggaggatcaaggaggagcatcgggtgccctcaatctcctcctgccagaaaagcaaaggagtcacagcttttcctttgctgcaagaaacattctgggaccttttttttccccctctgttgtccagttattttcatcagggtaaatcccctaggaatagaattattaaagcaaaagatatgtatgtggtgtaggcttttgatccacagtgccaaattgctttttgataaggctgcatatcgtggattattcttgccttttctgcccctcagctccttgataaaccacttgggatgaatcagccaccggaccagataaacaagccagcctgttactattgctgttttctgcaagtcggaagggaactcccttagatcccgcccagaacctggaattccagagcacacagggccaggacacctttgtacccctgctccccaccggcacaggtcccacccacccccttctccccgccccatgcccgggtggagccagctgccagggcgccaagactcccagccctctctctgtgcacggcagagtagaggccaagggagggctctgtgccagccccgatgaggacgctgctgaccatcttgactgtgggatccctggctggtgagtgcccatctaccctgtggtcagacctcccttatcccaggggccaacgatcagggtcatctccccagcaccctccccagcccgagcatagccagtttcagtttctcccctgctagggctgagcagggtgccgggtgttcacggagaagcaaatgcccagcttagtttgctgggggcatgagagggtgcctcagaccctgggttcttccagggacccaaaggaccctcgggtcttgagggatatagccagctgtctgaactgggggtgctggatcgctgcacctcagtgaatggagaattggcctggaggaggcagacatccttcggtccctcaaacggtgtcggcacagtttgtaccatccttcctctgcctctcacttggcactggcctgacaggggaggaggaggaaggaccgggggaaacgaagcttgagttcactattgcctccctccatgcccctgcagggcctctttggccccttttgttatcatagatctgaaagagcattttctcctagagtggccaggtctgctacattaataggtcttaagacacaggactcatttggaaacaggtcttaagggcatagtgttcaaagccaataaagtgagcggagtggggggctcatcattatggagaacgttacatgagaccctagactctctctctgctctcctggtgcattgcatgaaattcagggaacttccttaggaagtcaaagcatagtcctgattgaggatggcgagcaggtatggcctcggccaggccctccttgctcaagtgcaggacgaggcccacgaaaaggcagagcttcccaccttctctgccactgtcccgccagggctgcctgcgtctccagggcttccagctctgtgggaccccctccagtctgcttcccagcatcaagctgggcgttccaggaagatgtga

SEQ ID NO: 4605 - DNA, 6000 bp, Homo sapiens
cagccttccgagtagctgggattacaggcatgcgccaccacgcccggctaattttgtatttttggtagagacgaggtttctccatgctggtgaggctggtctcaaactcccgacatcaggtgatccacccgcctcagcctcccaaagtgttgggattacaggcatgagccaccgcgcccagcccaacaactatattttcaaaacatcatttctaagttctcttcactttcaagatgtaatttatcataactagaagacttaataatttaagcagctagaatggtgtttttcaaagtgggatccaaggaccagctgcatgaaaaatcacctgaagtgcttatgaaaatacagcgttgagtcccaggcaccaccccagaccaactgaattaagagttgatgggctccagactgggtgctgtggctcacacctgtagtcccagctactcaggaggctgaggcacaagaattgcttgaacctgagaggtggaggttgcagtgagccaagatcacgccactgcactccagcctgggcgacagagcaagactccatctcaaaaaaaaaaaaaaaaaaaagagttgatgggctccagaatctacattctaacaaggtctccaagtgattcttccacattaacatttgagaatccctgaattagttctcagagcatccacactcacatggagcttcaagtcctcatatgaatcctccttgagtctgaagttcattactctcagagtagtctggcaaggaagacaaagtagagtttcggggtcagggacctggattcaaatctgattctatcatttgctatataggtgaccttggacaagttacttaatttttccaagcctcggtttctttattgatagtatgtggataagaatatcttcatagggatgtcgttgcaattaaacaggagaggaaggctatcattctttggaatatttattgaggtctacataccatttataccaagatgaataaaacattaccaggcactgtgctgcataccatgtataccaggaagaatgaagcatggtccatctcattaatttgttgctttgtctttttgtgcctgtccctttgtgattaaggtctgatttgttcagccttttctaacccttgtgctgtcttttgttaacacattcccacaaaataatgtggattatttcccctcttgaactggctaaaatcttcttaccactatacatcaaagtcctgagcctctagcatggcctcaagctgcatcttctccagccttatctctcaccaatccccacgcagttaaaagcatgtattccagtgttagagcacttaggatcaaatgcttgctctgctgattattaactatatagttttggcagagacttacactctctatgcctcagttagctcatctgtgaaacacagataataaaagtgcttattttcagataatttttgagtatcagatgatactcagtaagcattcagtaagtgctagctattctcattgtcaaactgcatccacacaaggagttgcttcctcttagttctctgaaggctccactgggctccttctcacctgaagatcttcactattccctttgcctgcaatgctctctgcctcttcttttagaaaacttctacctattcttcaggcttcagcttaaatgtcattcttctgagtcttcctattcacaaccccttgcctccccatttcttaacaaggtaggttgagaaccactgttaaacaccctaattcactcctttacagcacttattatcctaattcaatccttgtttactccataaagatagagagcatgtctgtcttacacggctctgtatccaccctgatacttagcacaattctgactcctaccagcactcgtaaaatatttcaagtgtgtgatgaatgaatgatttcctaaatctgactatacccaatctttctctcttgggatcctaacagcctctaaaagtcaataactttattacacccaggggcagaactcttcaatctctttaccttctgataaaattttcagaaatgcaaatcagggagttaaaaaatgcttaacttaggctgggcacggtggctcacgcctgtaatcccagcactttgggaagccgaggcaggcggatcacgaggacaggagattgagactatctggctaacacggtgaaaccccgtctttactaaaaacacaaaaagttagcagggcatggtagcaggcgcctgtagtcccagctacttgggaggctgaggcaggagaatggcgtgaacccgggaggcggaggttgcagtgagccaagatcgcaccactgcactccagcctgggcgacagagcgagacttcgtctcaaaaaaaaaaaaaaaaaagcttaacttttggctgagactcccaggattgtgtgtcttgacttgaaattactttagatctgtactgctctatatggtaaagactactatatggggctactgagcacttacaatgttgctagaccaagatgggatgtgctatcagtgtaaaatacaacactagattttaaagacttggtaccaaaaaaaatgttaaatatctcacgatgttttgtattttattacattttgaaaattttgggagttttgggttaaatatataattacattttatttcatttgtttcattttttttttttttttttttttttttttttttttttttttttttgagacggagtctcgctctgtcgcccaggctggactgcagtggcacaatctcagctcactgcaagctccgcctcccgggttcacgccattctcctgcctcagcctcccgagtagctgggactacaggcgcccgccaccacgcccagctaattttttgtattttttttagtagagacagggtttcaccgttttagccaggatggtctcgatctcctgacctcgtgatccgcccgcctcggcctcccaaagtgctgggattacaggcgtgagccaccgcgcccggccttgtttcatttttttatgtggctatcagaaaatttaatattacacatgtggcttgctttagatttctacaggacggtgttgtcctagactatctgcctaaaaggtatgttgcatttccccacaacatccctccacctcctttcactttaatctataatgaaacatcctctaaactgtttcatagtttttcttgtgttaatatttctgattgatcttgattgatatttctgatgcatgagctattctaccacctctgtgaacatgactattttaaataaggcatagtttcctaccaccatattcaatgttgggtcttaccacaccaaatcccagtgaactggagatttaccattctgtggctactttattacttataccatgaacaatatggttaagaacacaaggactggagcctggccatctgttttggagtcctgactctaatacttaatagctgtgtaactttgttacttttttttttttttgagacggagtttcactcttgttgcccaggctgaagtgcaatggcatgatctcagctcatcgcaacctccacctcccgggttcaagcgattctcctgcctcagcctcccgagtagctgagattacaggcctgcgccaccatgcttggctaattttgcattttcagtacagacaggctttctccatgttggtcaggctggtctcgaactcctcacctcaggtgatctgcccacctcggcctcccagtgttgggattacaggtgtaagccactgcgcccggcttactttgttactcttaatatctctgtgcctcagttcctaaactaaaaaaaggagatgatacagtgtccacttcatagggctgaggattaactgatattggtaaagagcttagaatggtactgagcatgcagtatgtatgcagtaatgaatactatttctatcattatacacatctctcacccttcccacctactgatatgttggcacctttcctggtggtggtgttttatccgaatctgagattttaagctcagatcttctaactccaaactgctagttcctggatgagtggcatttgagtaaggtactaaatctttctcatttttcagttttctcctctgtgagaatgccaccttccttgcacaagtctgaatgacacaacatatataaggttccttgcatgttccttagcatttaacgaatatatcatatcacctttctggtttattacatgtgattctcacaacacactataagacagatattttataaagaaggaaacaggatccgggaagactcgcctgaggttgcacagattagctacatgacagcgccaatattggaacgaggtctcagtccgactcaaatgtttttttcatgaaattaaagctgcttttctaaaagcatgagccctagaactaaataaattcatgctgtttatggtattccaatgcctaaagaaatgcaaaaaccagcaaagtaaatctactgccgtgttgcccattgaaactgcaacagaaagtcaaaatacaagttttgttaacaccgctataagtcttagagacgacgacgcgggtgacatgtcagtaaacaaaacaaagcgaacagttactcctttagctccccgaggaaactgcggaccgcgtcccatacacagtccgcaggggtaccatagtcgggccttccgggctgggctggtccctgccgaggctacgcagcccggccacccccagacctagaggaggccaacgccacgcctgcccgccggaccctccccctcggatctcggggcccagtgctgcgcccgcccgcccctcacctccggctccgggcgctccgaggccatcacacagccctcccgcgccggcccgggccagtgagggtgttccactcttgacccctgacctcgctacctcggcacccagcaggaaccggaagttggtgggagggccgagttccagttttctgattggtggacgaagccttctcgtaggcgtttgctgactggaaaaccggaagtgaaatcgtggcagccgcctcggccgccgcaatgcaggtgagagttgcgttgggcgtactagcggctggcaagcttcgggtacagggaccgagagtgggctggctaaggagaatgaagagttgggactgagaagagagggcagaacccacggctgataagggaatgtgggctggggggcgaggctaattggagcgggagcggcggcgattagaggtgggggtggagcttgcctgacaggagacagtcgggctaaatccggagggaggaggcagcacctgtttgcttggcgtgggaaaggattaggttgtaatacggggaggctgagatgcagtccaaggaagacggctcaagaaggtggtgggttggctcaggccctgtcctaagctgctggatggaggctgttggttgccgatatagcaggggatctaattggaaagaagcccaagcagtgagggaattgtgggccgcgatggctgaaagctaagcagcttataatcagaggccatggtggaacccgggatcaagtttctgtcaggcaggtttgcaagacagttttgcatccctcttcccagcctgtgccctatagttgttaagggtgaagaaatggagtaaaacaggagaccaccgatgggaaggaaatgctttgcagacccccagcattttaatttgtttgtccagtgcttagaagcatgtgtggtttttgtttttcatttgtcacttagtttcttgcagctggtagtctcaataaatgttaatgggttgactgagcttgtgaaagaggcacgggaatattgacacagagatagatgattgcatattaattcagcaaggagaaggttgaaacaaaatgatgagagcagatggaaagctggagtcgttggttgggggagggaaaggggagagcaggactggtgttcagagaagtcttcatgagtaggcagatttcccagagactgacaagacagccaggctcacagatgctaggatggaggaagctggagtgcatgtgctacag

SEQ ID NO: 4606 - DNA, 6000 bp, Homo sapiens
aagatcagatgcagagaagtaggagtttgccactttctaatggaatcagctttcgacgaaactttttcaggcttagagttaattgtgaattgcgaaaactgagaagtaaaggaccacacatttaaagcaggtgcatgcaagtctggggcagccaaatgtcacctcttccaggaagcttctactcacctgcacatggttagagatcagcactgtttttggggctcccccaacacactttgtcaaattcttgattatagcgcttattgtgtctttaattatttattcctttgttggtccctcctctatgaattctggactcaatgttagggactcagtcttattcacttttgtatcttcagtgtttggaagcaccaacaaacatttgctaagtgagtgaatgggagaggaaggctgtgtggtgcagcgggaaaggcaatgaactggtagtcaggacatggggctctaatcctgactctgctactagtgactgcatgactttgaacaaatcccctcattgctctgggtctcaatttcctcatctgtaaaatgagaataaaaatacagccttccaccccagggttatggagattaaatgaggtaacagagcttcaccagctgcctgccctgtttgtgccctgtcctcctgaaacagcctggactattgttcctgccatttggatctaatttgtgctctctcccctggtgagagctgagctgaaatctgttgccttgttggaggggaagtttgcagcaatggcatacatattatccagttggcccctgtgttactacaagggcagacatcaaaagtgaggaagatgtcaagctagagagatttgcttcttttgttacccctaaacctaaatgaggacccaaagtgggaagagtgaggcagagcagatctacatcacatgctgaggtgtataagtgaggcctcaaacattgtcccctaagccctggaattcagcagcatctaggggaatgccactttaatgaagtctactcattcatataatgtcataatttctcagtgccttgggttaaatgattaactctatcatgggtattcaagtgctaagaaagatgaggaaaggtaaaaaattgcaaatgccaaatacaaggaataccatttggaaaaaatggaaaatcacgattttagacactgctgtctcaagagatgactattgattttcaggtgagatgtctttccagaagatccactaacatggttctttgtacattgtgaaggcaaacttttccatcaaaacttgatatatcttctacttacaagtcaagtgtctggggaggccctaaaaatctgcaactgataatttgtagggctttctgggagtcatatttgttaaatgagtttatttaattgcatggactgggccttatcacaagacaagtggtcaagggaaaatggtgagagaagaaaaagaaggtattgaggctggtagaatccctacccaaagtctaaagtcagttctggtgctaatgctagtgatcaaaaaaaaaaaaaaaaagtatatttccattttgcaaggctttttttttttttttttttgagactgagtctcgccctgttgtccaggctggagtgcaatggcgtgatgtcggctcactgcaacctctgcctcctgcattcaaatgattctcctgcctcagcctcccgagtagctgggattacaagcgcttgccaacatgcccagctaatttttttatttttagtatagacggagtttcaccacgtgggccaggctggtctcaaactcccgacctcgtgatctgcccacctcagcctcccaaagtgctgggattacaggcatgagccaccgtgcccggccccattttgcaaggcttttaaaaaaatattgtgcgctcagatggcacctttaatcacgaagaacttctggctgagttccagactgattctgctggcacagagagctctgagatcataccctatattcagagcacagaagaaatatttcatccatctctgaaataaagaggaagaaatgaagcatatttgaacagttgcagaaaaaaaccataccagggtgaaaagtgaagggcatcctagccatttggagttacagaaaagtactattaatcctaaatacttaagtggcatattttttcattctaagtgtttcactataaactaagcagcttgcataaatctatttcatagatatataaatgaaagcagatttcatgatttacctaagactactttaaattaaaaaaagaaagggagagggcaaaggaaaacaagcagctcccaaagtagcaggttgtgacccaggagcttgagtgcttagagctgaatttaatccacacccaggtcaaatataattctccaacttggaagtggtccaggacacccgagctaacattttttacctttgccaaagagcctggggcagtttggtgacaagcaatcacaacctcacttctatttctcaactgaaagaaagaccagaatcatctcacaggtgctttcccccatggcagggcactggtttaagctcaaggactaagaaagtttgcttccccttgattcatcattgcctcttgcatcacttattctctggagatatattcaaaggtctatttaagttggagagttgggtcatacaattttaggtggaaagactgaatcacagctttactccatgtgtcagccttgaccacttgattatatactgtgcttggacgtcacttcatctctcaaagccttagctgtgggaaaagcctgggtgattgctctgtgtattagaaactgaaaccccaccactaaatgctgaaaagtggtccaggcaaaaggtgctgtggaaatctgaaagccattatcttttccacacttcctctctcttcaccctcattttgtttgggaatgcacatgaacacccgtgaacaaaaataaaccaacccacccttgactgattgttctgtcttttgagttatcaaacttgagtgcttctggctcccagatatgctgaagtagagactgctgggaaggcagccacaaattagagttgatcttccagtatcttctacctgtaaggaatggttcaggaaattataattaatgagtcctgccccaaagttgaaatcatatttggatttcagaaataataagaaagcatataagaatcctggtgtcttttcttagctcaaccatgtccatccatactttctggcccttttaaaccagttactctatacccagtccatatacattttgactgtctgccctcaggaactgtctcaactcagggcatctttaaggaaggcagaaccaccttaggaggtagagggtgaaacgtggcaactcttccataggcgaatcaatatagcagacatgctcaaggtaggaggttttgctagggcttaaatcaggctgtcaactcaaacacaatgggctttgttactcctgtgtaaagaggaaatggagcagtttttggcctcctcagactgtattgtagggtatacaggatggcaattccaggcacaatcttcaggagacacaaatctgcttttagctattcagtgttccccagcaagttaattagctgtttctgaaatgcatggaaatattcagcattttcatagtgaagccaatctcccagatttaagctttgggggtgggaatgagtatgtgaggaagagggtctgtcagggaaacagaatagagcccttttggtgagagattccaacacctgtgacttatcttagaaattacacatgcactgtaattccaagactttttttttttttaattggtttgagcactcgagcaggagggcttgctgagacctctcactattttaggcgtggggagttacctctgggttcaaaagtctttgggtgggaagcacagaggaactgcgaaatgcctccctcagaaatgtccaattgctcaaggggagaagcagggagtggggtcaggtagcagccaggaaggttgcaggggccacgggcacatcctctccctgagtggtaaggtggcaagtgggtttggggaccattgctttgacaacttgtcaagggtgcggagagggctgtcccagcaaggtgaagaggtctgtaggaaaggagtctccccagagacctcctaaggaccagaagagcgcgcaccccgccaagtgacagaacgtgccccctctgtgtccgctcccttcccccgcggccaatcaccgggcagaggcgtctcacgccagcaggtcctccctggctcctctccttactcgtccgggcggaccaagcctcagcaggagccccgcctgtctccaggcagtttgagcccccgagcgctcgcccagcctgtcagtaaccgccgtttgcgttttcttcctttctttctttcttttttttcctcctcttttcttttccccttctgcctttgtcccgcttagtaactgggctctgaccaatcgccgccttaccggccggcgccggctgtctcctgattggcccgcttggggcgcgcagccgtctcccgctccttcgcaggagcaaggcagacaaaagacgcaggctccaggctccggcaaccggcctcagccaatcaccacccaccttgcctctcttccctcgccccactccctcctcgcctggctcgcgtgctcccggcactgactcctggagtgcggccagcgcccggatcgtaccattctgattgaggctgggggagagcgcggatggctgattggggagccgaagcctagagagcggtggggagacgtgaaagtcgagatggagagcagctttttgaacatgttctcaggcacttgacagaatcccggtacatcgaggcgggacggcgtggaaggggcggtggtgatgcctgctgtcccccctcccggcgcggttgggtggcgcctcagcgggtgggcagcatggggcggggagggtgtcccctccgcgccgttaaaatgaaactctagtggctggagtccgggcagagcttgagggcagttggtgcggtcgggttggttcttacaccccggcgggagcgcccagacaagccgagctgactggacttctccggccggccccattcccgaggctgcggcagcttcggttccgagaccgaccggagaggagcccgagtcccggcctctgggggattcgctctctgcagaccagtgggaccccgaaacttgaacgcaatctccagcccccttttttgccttcctttgtcacttgcccgggtttctcccaacgtgttcttttttttcctcttcattctccctccttcgaaggacacaaaagtggcttccgcggaaagatttggaggcggtgggagcttttctccccggagagcgactgtgtagaaaggatttttgggaagccgctttttaacacctctgctctccgtcccccaagcctctgtgtaatcctctgaggagaaaagcccatagcttgaaagttcgggggcattttgttgtgttctgtaggagagagggggaggaccctgttcgggtagtttggccggactggtactggccgttggaaaacccgaagtacatttccgtgtggaacttttgcagatatatatttttagatttttaaataccagataaaaaatatatgccttctatatatctcctggcgacctgcccctgacagcgcgatgtacaatacggtgtggagtatggaccgcgatgacgcagactggagggaggtgatgatgccctattcgacagaactgatattttatattgaaatggatcctccaggtacttgggagaaaaaaaaaaagaatctcgtgatgggtctgatttgtatttaccaagagcttgctgatgttttcagggcagaagtattcctgggtgcgctaggttcgggatgaggagatttgcagttacagctgcggtaaaactgcttctggtttacacgtttaaagtttgcagttaggaccctgatcctattgtcctgcgaaggtgggggtgggggctggaagtgggggtgggaggagagacccctttt

SEQ ID NO: 4607 - DNA, 6000 bp, Homo sapiens
ttacaaatctcttactgcttgttcttttcatagctcaatccctggcacagggatggttatttgcatagcacaattgttgttattgtgctgcctcacatattctttctgccctgggcaaacgcgaacaatgatggactatatttatgaaaccagcagcttagaagcacgagcttcagattaccatgagaattgtagtaagattttaaaatacagtttagcaccatctatatggaaagcccatctctcaaagtctcatgcaaataaactggccctttgtgtattcagagagttcctcagtttttttttccatagtttcaatcacttcacatttctcaactttctagatgctgacttcacagacacgcagtgttcatgaagcgttgatatgacaactgcctctaaaagctagaaaataagaaaataaaagtagttttgatttcctttaaggatgggttggggaggggggttggagttagagtaggatagaaagatgattggtgacaaagctgtttatgatttaaggtcttctctttaggctcatcctggatttagggctatcgtaaatccagagcctcatcttcagcttcccatgttcaagggcaaaattttaacaagtcttcctgggtggtgattaatgtctgcaggacaccagcaacacaccccaggaaaaagcgcatttgaatcagaagacccgtgtataattgtgtataattcccagctttgtcattatgaatttggacaaattcttcttctgttaaaaaaaaaagattaaaaataacccttgtagagctgttttgaggaataaatgaaataatgcacattaaagcagcaatttgtctgggtgcggtggctcacacctataatcccagcactttgggaggctgaggcaggaggatgacttgagcccaggagttgaagaccagcctaggcaacatagcaagacactgtctcaaataaaataaataaataaataaaacaaaaaaaagaaaacagcaattgttggttattagtattcagatttaagtcatcagatacaactttgtttacctagggaacatctactttttcaatgacagggatatgtcagttgttcaaagcacccttattcttatttatttatttatttttatttgattgattttaaaaaaatagagacgaggtctcactatgttgcccaggctggtcttgaactcctgggctcatgcaatcctcctgcctcggccttccagagtgctaaaattacaaatgtgagccacctggtctggtctggcagacccattcatgtaactaatatatctgtcaaaccaacttagttgttggagggttgcctgaagggtagagagttaaatggtgatcttgaagaatggtatcttatagctgctacttattgaacatctattccaggccagtctctctgataggccattatacatgagctctaatccttaaaccatccatacaaagtagatattattatcttcaatgtaatcatgaggaaaatgaggcttagtgacccagagacattaagttgtcctagaaaaaacagataaattcttcttgtctgctccatgcaactcattcttgttataatgaattagattataacatatattcgattggctacatttttcctctcctaaaatagatttgggatatgacccagtgctctgacgagatctgggccacacatttgcaaattgtcattggtttgtcattaaaacaaacaaacaaacaaacaaacaaaaacacctctctcagaagttctaggccttttttgggaatttggcccattattctcttccctatagacatgctcccatctcccattacatgtcattaatttaaaccagaacctacgaatgaagaaagaagccactacaaattactagtggtctggaaggggacgtggggcaattcccatataaagattttaagcaagtcttcccttgctagggcatctgattctttttattttttgttaaccaagacccaagcctgctgtcaatggctcttacttatagaagctatttataaaataaatttataaaatatttgttccttgattttcttatggggataaagtgaagatccaaataacaattatatatgagattgtattcagttcaattcaacaaacttttataatgtacttactgaacattagaagttgtgcttctaaacatttggccgggcacggtggctcacgcctgtaatcccagcactttgggaagccgaggcaggcagatcacttgaggtcaggagttcgagaccagcctggccaacacggtgaaaccctgtctctactagaaaaaaaaaaattagctggtgtggtggcgggtgcctgtaatcctagctactcaggaggctgaggcacaagaatcgcttgaacccaggaggtggaggttgcagtgagccgagattgcaccgttgcactccagcctgggtgacagagtgagaccttgtctcaaaaaaataaaaataaaataaaaacatttataaacggtgaaaagcaatactgtatacatacaaggtgttatttatttattagagatggggtctctctatgttgctcaggctgaattcgtgctctgtgcaactgcctcagtctcctgtgtagctgggactataggcatgtgccaccatgcctgggtaaggtgtgcttttgacttaatataaatcatataaaagttaaaacagtaataattccttacttttcctgtatgagaaactgaagctcaaagaggttaaatggtttgcctgcggtcacactctgattcttaatattctctttgctactctgcactgcctttccggaaactacatggcagggtttccaccttattcatctgagaggaatatcttacatctcatatggtttggaggagtccccttgaatagcaagtgaaattatactccccaaagcgatttgctccatgattttcagatttcataatttgtgtagctacaagtttaggcacttttgtatatgtcatctcattcatcctcacaacaaccctaagggcatacaactagtgaatgggagagccaggaatggaacctggatattcctaatgtctgagtcctatttatttcactatactatgctgctttgtctatcagttgtataaccctgggcaaatcacttagcctctgtgaccctgcattacctcatttgtaaagtgagtatgacgattacttccttttagagttgtgaagctcaaatgtgctaatataaagtagaaaacaccggtagaaacaccggttgtggttatggctgataagtgtaccaaagtgaagtaatgtaaaacagtatctcttattctctcttcagttaaagagattagcagcaaaaaagaagccaaggaagatgctcttgaataagtggttactcaccagacctatatggcttgctcttgttagctggcctttgccagaaggagtctgagtagaattaggagttccttgggaaatttctggaatggtttgcttgtggaggcaatagtctaaaaacttaggtggggctaactccatcctgggtcttgttcagttgtccctcctaccacggggactgctatgataatggtaatgggtgtaggcctgatagagttgtggtttgttgtaatgggaagccatcgtgactaagaaattaagaccaattcgggcaaatacatttattgaggcctctgtggtaggctaaactatgagggagataaagcagtgagtcagccccttgtcctcaaggattttacagtgcagtgaggtggagacaaaccctcaactaacgcttacagataaggcagagtataaaaacggtcacatcagaacaacttagaggtggggtgtggagttcctagaaggcttcttgaagtaggtggtatatactctgagactttgaagatgaatttcaagtaactgggtattccaactgaaggttggcagcatcagaaggtgtaggatgtgttatgtttaatataggcaggaacgaaggcctttactgagcatgcactgtaatgctagggtctgacgatatagaaatatattgaaaacagttcttgccattgaggagctcttaatctagagggatagataggtgtaaactgtcattagggtgatgacttcacaaggtagagaagaaaggttataaaggagagtgtgtaactctgacataaggaagagaaaaagatactttgcaaaggaggtgaaacttgaattatgtcctgagaaagaaggaggagtttgctaagtggatgatgggagaagctaggagtgctacaggcaccagcgttcccttgttaaacaatctaaatgtgacaggcaccaggcaaatacatttttgcttcccctttccaaatggattttggctgtgggagggaatgacttaatgtcttcttttccaatatactagcagatggttaaatatttacagttagacttggattctaattcagctatataattagctgtatgaccttagtaagacacttatttgtgtttcagttccttcattcatacaattcaaaaaataagagtctagtacagagcctggcatatataaagtgccattattattttctatcattatctcatttagtctttgtaagtaactgggcctctagttacaatttcccccatttttcagaagcaggagctcagcgtaggtaggtggcctgtctgaagttcacaggtcaatctgcagtcgcctccgcagcccgtccgctttaattttatgtccgcgccgggttttccaaggcggccccgggggcaggctctggtccggtggccgagactccggcgccagggtttgggcggcgccgcggccggctccggcgggcgggcaggcgggcggggccaggcggggcggggcgggcgtggggagggaagttgtggaagttaggggagacgcccgcccgcccgccccggcctcgcctgcggccgctccctccgcctcctccccgccccgagccccagtcagcccgtcttccttcccctcccttgcatgatggaaacaccatggctgcggcggcccagctctctctgacacaggtaacgccacacgcccgtccgccgggcttggccggccggtgccccctcccccaccgccctcagcttcgccgacttcttggcttgtgggccaagcaggcagcttcttggcttgtgggccgggcggccggtgtgtgtgagggaaagcgggtgcgactgcgggagggcgccctccggagccggagcccccctgcggccgccgcgacctcgcccagggtcgtcgggcgcctcctgccccgccccgcgcggccctcgccgccctccgcgccgctgccgagtggactgtgacccggccgcgctctgccggtgccgggccggctcccgcggggcagctttcacctacccaggaagtttcctcccacagggccgcacgcatcccaggtgagctcctgttgagctcgcgcgggccggccgcacccccgggccgcacgaggctcgcccgccaggccggctgcgcgccgcccccagtaggagttgccttccagagccggacgcgcaggccccccaagccagtctttcctctccagacctgcctttctcccagggtccgacggaagccctcccttcccagagtttaatgtagttagcctcgcctccaaagaagtctcatcctactcaactacccactctgccggccccttcctccgttcagcctctcccccctcctgatcaggtttccttctgggtcagacccccaatgcagccttttgccacccacgtctgcttccacttcaacttcccctcggggggctcacgcctgatcgctgtccaggtggatccctttaacgggtgtggtggctccgccagtcttggtgccaggaacggcctcccggggagcacttttcttggggggaatcctcagcaaaacctgttctcgagcttccctcttgcctcgttgcttcctgtcaaagtccagtccttgtgcttctcagaaaacctctaaacatcactcacactggg

SEQ ID NO: 4608 - DNA, 6000 bp, Homo sapiens
acgtatttttcatgcatatatacccatatgttaaaaatatacaaaccagttaccaaagaatacatgccatactcaggaaactgatcaactctggaaagggaggagaagaaatacaactggggaaaaaaacagaggccctcaattgtgctgtacttaacagaaaaaaatgtgaagcaaaactgattacatgttaacacttgttaactcggattcgtgattatttgttacattattcttcctacctttccgtatttcttttttttttttttttgagacggagtcttgctctgtcgcccaggctggagtgcagtggcgcgatttcagttcccgagttcatgccattctcctgccacagcctctcgagtagctgggactacaggtgcccgccaccatgcctggctaattttttgtatttttttagtccagacggggtttcaatgtgttagccaggatggtctcgatctcctgaccttgtgatccgcccacctcggccttccaaagtgctgggattacaggcgtgagccaccgtgcccagcccagcctcaatctgagctcagctcagagaggttaagtgacccagccaagatcactcagctagtggtgagaccatttggactatcagctccaaaacttgtgctcttgctagaagtttacccagccctggcccaggagtcctagtcaaggccaagggcccagcagggtggaggtggaggttgtttactacagcccaagccattagtgttcatgatataactatcccaacaactgccttccgctaggacaagaacaggcagtgaaagcccctgccatcagttctaactaaccagaaagagagcagacagtagagaaggaggggacaacgtgggccaagcatctgaacagtgcccttcaggagcaactgctgggacacgtgaggttggcagcctggggcctgtaccctaggcaagagagacagtgaggctgaaaataattgaggctgggctgggcacggtggctcacacctgtaatcccagcactttgggaggccgaggtgggcaaatcacgaggtcaggagatcgagaccatcctggctaacacagtgaaaccctgtctctactaaaaatacaaaaaattagccgggcgtggtggcaggcacctgtagtcccagctacttgggaagctgaggcaggagaatggcgtgaacccaggaggcagagatggcagtgagcggagatcgcgccactgcactccagcctgggcaacagagtaagactctgtctcaaaaaaaaaaaaaattgaggctgcacgtgccaatgtccctgaggccatctgctgctgtggaaggagtgctcgctgtactgggacactgaccacggtatggccttgcacaagtcccctcttctttccggactttagatcccccttctgtaaagtgaggccgttgttctctctgagcctgaggtccctttgactctgctgatcaaagttctgagtttccctgagggactctggcagccctgttttccactctttccaatttcctcctctaaccctcataatatgggcaccgccttaagctgctgctagaactctccatccaccactcaccattctccctgctttatttatttatttatttattttgagacagagtctcactctgtcacccaggctggagcgcagtggcacgatctcggcttactgcaacctctgccttccgttcgttcaagcgattctcccatttcagcctcccaagtagctgggattacaggcgtgggccaccgtgcctggctaatttttatatttttagtagagacagggtttcaccatgttggccaggctggtctcgaactcctgatatcaaccgatccacccactttggcctcccaaagtcctgggattacaggtgcaagccacagtgcccagcatctccctgctttagaatgagacacatctgaggttaagcaaaagaggactgcaaatcctaaaggcggcgagccactgatggtatttcacagttgtcaggctggaggaaatcaaaaagtctgatggtactaagtgttgacagagatgtgatcaacagaaattctcatccacaagggagggagtgtgaatcaactctgcttggaggcaaaactgacctgggttaaaatctctgctctgctgtttacccactgtgtggctttggcaagttacttaacctctctgaacccagtttctgcatctgtctagtgggtgtaataatattacctatctttcagagttgttgtgaggatcaagggagagggcgtgtgtaaggtggctggtgtagtgcctggagcatagtagctgctcaataaataatatctgcctcccttccatccatgccctccccttgagagtgagactgtgaattgcaggggatatgattccaggaagttcaaggattgaggcaccagggcctgtccttcatgtcaccaggccccctgctgcccttccctcaagggttcttggtgacagcctgagccctggagagacgcagtgctttcagcatagttgtatgtggctgtacctggactcagcagatgaaagggcatttcaaagccccggggagtctttttataaaggaacacttaagaatcacggagtcaaggaaggccagaggctgaagggcattaatatgtccaggaatggcaaatggtcattgtcaggcctctgagcccaagctaagccatcatatcccctgtgacctgcacgtatacatccagatgaccggttcctgccttaactgatgacactgtcttgtgaaattccttctcctggctcatcctggctcaaaagctcccctactgagcaccttgtgacccccactctgcccgccagagaacaacccccctttgactgtaattttcctttatctacccaaatcctataaaacggccccacccttatctcccttcgctgactcttttcggactcagcccacctgcacccaggtgaaataaacagctttattgctcacataaatcctgtttggtggtctcttcacacggatgcgagtgaaagccatcatgtctgatacccctctccactcttacacccatggcaggcatcactagtcaatcacagttctgacctcagaatccttctgaggcccatgttccagagagccttttgcaatcaattgcagctgacatgccagataaaatctagttagtgtctttagtagggaccatgggtgccctgcccatgctatcagcgctttccatttcaggacatattagcttagcgtgcagctgctaagttgccatcactgacatctccttgcctaaggcagcccagtggtacaaggaattaacaccctctggctagtctctttttttttgagacgaagtttcgctcttattgcccaggctggagtgcaatggcgcaatcttggctcactgcaacttctgcctcccaggttcaagcaattctcctgcctcagcctcctgagtagctgggatgacaggcgcctgccaccatgcccggctaattttttgtatttttagtaaagacggggtttcactatgttggccaggctggtcttgaactcctgatctcaggtgatccacctgcctcggcctcccaaagtgctgggattacaggcatgagccaccatgcctggcctcctctggccattctcaaccaagactggcaggagctggcagattattaccccagttcccctcaccttgagtgggataactctgaggggcatcttctcccctagcttccccgagtgccccagcagggctaaattccacttgcccacagcggaaacctgcttcataacacgactgttatcggatccttctcttccatgtctcatttccctcaccccccgaccagcatttcctgggatcactcccaattaactctacttgccctcaaatcttgtcttagagtctgattctggggaaccttaaactaaaacacccccttcatctagcttatatctttattttctggatgaaggaactgaggcgcagggaaggggagtgagtcacccgtcagagccagtggtagggccctaatgagagtcctgttctcccggcctagggctcagctcttcacaatgttacttgctgcctcccaagggctgcccctgtgtctgtgcctcctacttgcacccacgtggattcatcattttatttcccaatgcaaaagaaaaggctgattgcaggttggaaaatctatgggcatcagaggcaggtgcaagaactcctgagctcatttctggaggtagacacctctcctcccttggtccgggtccttggacctgtccctcaagattccagggccttggtttactcagcagtgggacaggctgctagggaaacccactcactggggacatagaaggggttgttcacgcaagcaaccagccccccgcctcttccctacctcagcaccacctcaggggcagtaaaaattcacattgccacgtttctaaatgaaacaatttaaaattatatttgctttataattttagtggaaaatgcatattctttcaatctaggtcacctatgtagttgaacagaagaacatcaatgagaaaatgacccctactttctagccaccgaaacgtcaattctgggagtttctgcctgcatcttcatacccctggaacctgagctcctccggttccatctctgatgtggaggaaaatgcactttctgaaaagtttctgggtttcactcctcccatgcactgtgagacttggggcagtttctccctctctgaacctctggctcttcatctgtggaatagggatgaggattccagcctcgcaatgttgctgtcagatggcagatgagggaatagcctggccggagaggggccctcctgcctttgcctctgcttggaaggcagctgacaggggcctgcccacagggagggtgtggcccgggcaaggcctcctgcttgtccctcctccaggttggccttggtgacaatgcagggaacccgtgctgagctctctgcacacagccccagtcgggcagcaggaaaccgaagacatgaacaaggtcttcccccaggtgagagctgtccccaggtgagagttgtctccaagtaagagctgtccccaagtgagagctgtccccaggtgagagctgtccccaggtaagagttgtctccaagtaagagctgtccccaggtaagagccgccctgaccaggctcctgatcttgggagagcaaaccttgggatgaggagtgggcagtagagagtgggcatacatgggagacacggaggaaaatcagcccccgtcctgccccggggctcactcccagggtgtaggggaccctaccaatgacccagcaatacagtccaggtggcaagtgctggtatggaaacagaggagccaggtggacaggagggaagagcggccagttttactggggaggagggtatcagggaaagcctcacccaggagtcgctgcccaagccggtttgaaggatgaatatttatcaggtggacagcagagaaaaaggctttccaggcagagggcacagtgcaggcaaaggtgtggacatatgaagcgggcatgatgcatctggggcgtgagatgctggggtgtgacggacccgtggttctacctaagactctctcagtgacccctctgaaaaccctgttgtctgcctccctgaggctggagctcacctcacctaagcccacccctcactctgttctcttgggcagggagagaatggctacactgctgctgaatccaaagcccaccctggaggggaaggtaaagaactggagggcctggggccagtgccctgtggggctcccttgaagctggcagttggcgatagagacatgaggagggttcaaggctcccactgtccctcagacctctgcctccatgttaacgttgtctgctcccagcttcctggccagccatgctgacagtcacttgcttaatagggttattcattctctccatgcacatgcattcattaagcacctactgtgtgctgcctacctcacagg

SEQ ID NO: 4609 - DNA, 6000 bp, Homo sapiens
atagaaaggaatggcttctgttgagataagcgtaggttaagtttggaaaagtcataaaaagatgaaagcttgctaatttcctctaaatatatcaggatatggtcatatgtagttccgctaccagagaagtcaacaaaagctttaacatgtttcctcagcaatgactaaatgtgtaaaatgtcatgcaagattttgatgtgtctgctggtccattattttaaggttcatgttttacaatgaacattacttattttgattattttccctctttctttgctcactgttgattcttgcattctattcaagttttttttttttgttttttttttttttgagacagggatctcactctgtttcttaggctggtgtactgtggcatgatcatggctcactgcagcctcaacctcccaggcttaagccatcctcccacctcagcctctcaagtagctgggactacagacatgcaccaccacacctggctaacttttatttttgtagagacaggatctcgctatgttgcccaggctggtcttgaactcttggactcaagtgatcctctcaccacagcctcccaaagtgctgggattacaggcatgagacacagtacctagcctccttagtaattctttaccaaaggtctttagtgacagtaaattttctagatcccatttgtctgaaatgtctttattttgcactcaacctttgttttttgtttttgtttttgttttttatagagatcagttttcattatgttgcccagattggagtgcagtggttattcacaggtgtgatcatcgcatactactgcctagaactcctgaactaaacaatcctcctgctccagcctcccaagttgctgagactacaggcacatgccaccacacccagcttagtttgcactcaatcttaaatgatcatttgacattacagaattctaaaagcccccaaatacaatattgaaaaccagatacaacccaaatgtctatcaacagctgaatggataaatccattgttatatagtcatacaatgaaatactcagcaataaaaaagaatcaactactggtatacacaataacatggatgaattacagaaacactatgctgagtgaaagaagctagacatgagtacatactgtattatttcttttttcttttttttttttttaagacgtggtctcgctctgtcacccaggctggagtgcagtggcatgatcatggctcactgcagcctcaacctcccaggctcaagtgatcctcccacctcagcctcccaagtagctgggactactggcgcatgccaccatgcctggctaatttttatatattttgtagagatggggttttgttatgttgcccaggctggtctcaaactcctgggctcaagtgatcctgcctcctcaacctcccaaagtgctgggattacaggtatgagcctctgtacctggcctgtattatttattttacttgaaattttaggagagatgaagttaatctataactactggttatctattgttgtatctggatgactttgaggcatccagatgcagcaatggataagtcaagactgcagtctcacctgaaggctggactgagggtctgtttccaagctcactcgtgtagttgttggcaggactcagtgcctcacacgttgtcagactgagttccttaattcttcactgggtgtaggccagaggcctccttcactcagttccttgccacagtgttctcttcaaaggacagcttataacgtacagctaggttcctacagagtgaatgattgagagagagcaagatagaagccagccttttgttaacctaatcctgaaagtgacatccatcatttttgtcatactcgtttcattagaactcactaagtccagcccacattcaaaggtttgaagaccagaaaatgggatcactggacatcttacaggtcaaacttaattttaatagtaatgttttacatgtaacaatgcagaatgaccatgaatagtatgcatttttagaaggctcatgcactaaaactctcatcttttggttaatgcctaaaattccagggagctttgacctttcagtttaaggatttaattagtaaaatatagattatttaaggtaaatttccttttgggcctgagtaatagtactggttaccgttaaaaaatgtgggggttggggcattgacccccctgcacagttgaaaatccacagataacttttgactaccccaaaacttaactactaatagcctactattgaccagaagccttgcagataactagttgattaatacatattttatatgttgtatatattatatattgcattcttacaataaacgagaaaagaaaattttaagagaatcataaggaagagaagtggaagtggatcatcataaaggtcttcatccttgtcttcatgttaagtaagctgaggaggaagaggaggggttggtctttctgtccaggggtggtggaggcagaagaaaatcactgcataagtgaaacttcccagttcaaacccgtgttgttcaagggtcaactgtattgtatatactatatatacctaaaattaaatatactgtatttgccctaaatccacttcagataaagaagataggcaaagaatatggcaaacctggtaagcccacgtaaaaacacttcttttttttttggcctatggtagatttgttgatagaccagctcaatcttctcatattataactatgtactgacaattttagtatcttacgtttgtttcttgaccttagattgtatatgagttggttttctcctttttttttttctttacttgaaagggccatgcttgcaagtgagtattagacattgcatgattttctaatattctctccagttttctacacctacctctgtcatcttaatttctattttcatgcatttgctcaaattaaagatgtggagattaaatgaatgaatacatgtaaagcacgtagattagtatccagcagatattaagtggccaatactattatgattgatgctgttgttctttgatgctttgatctccacaacctacatccaattggttcactttccttctacacgatttgtctcctcctcaaatctaacctttctcttctgttcatcttcttacatagtctcactgctacttggccctactaaaatttatttttgcttcttaccacatttgccacaaatgttgatataaaccatttccattcttctgagatgtatcacctacttacagaggttattatctacccaaaatcttctcttcttcactccacttgaacatacttgcattcacattctcctctctgtttcagatatcaactctttcctcctggctcaaaggaaggtgcattcttttctgactacacccacatctctgtttattatccagttcagttagcattaggctcggctgcaaatagaaaaatccttaattaacagtggcttttaacaaggtgtttccatcaggtgaaaaatctagaaggcggctcttgagggctcatagggcagctccacaagttgatttttccatctcactgctatgccatctctaaagcatgccttcatccttatggcacaaacttgccgcctgaaaaccagcgaacccaactttccaggaagtaaaatgcactttaaaagatcaggagggctgggcgaggtcgtttaggcctataatcccagcactgtaatcccagcactttgagaggccgaggcgggtgaatcacctgaaggcaggagttcaagaccagcctgcccaacatggtgaaaccccgtctctactaaaaatacaaaaaaaaaattagccaggaatggtggcgggcgcctgtaatctcagctactcaggaggctgaagcaggagaatcgcttgaacccgggaggcggaggttgcagtgacccaagattgcgccattgcactccaccctgggcgacagagcaagactccgtctccaaaaaaaaaagtcagggacggcctcctctcttttagatgccgtccctaaagacatgcacacaatttatacctaattggctaaaacgtagtcacatagccacatttggctgcaagagagactataaaataagctattttaagctgggaagcagtgtgtccatcgacacagtgttctgtgactttaaataaaaaattggttttctgtcatgaagtagagactaggtttggtgaggcactcattcatcctttctcacctccaacaataatttgcgtttacttattttttcaaccccttcccatcccctcaaacatagttctctaccttttatctcaaaagataaccaaagaaacctcttgattctggtcatactcttcctttcactgtgacaataacaacaacaacaacaacaacaaaaccttattcttctcctttacaatttctttaacgtttttttcttttctgctattcccaatccctaaacaccatctcacgtttagattatacagctttccacttcgtctcccagttcctgcgagcaccttatatcccttttaccccaaccaagtccttaaattttatttatagttagcgtcacaatacacgagtaaatattgtctttctttaaaaagcacaaatatctcaaacttctcccttggacataccaatggctacattaagctctttagaacgtagaaatgaaagaacgcctcccgggttcaaacgattctactaaacaaatgaaagaacgaatggcatgtaagtgcgtttttacaattcatgtgaacgggtacgctaagaccctctgtcactgcgggcttcgccgccccgatgaaggtctttcccagcaaaaatctggcttgccttctacagctctgaaatgcacacttaaacccaggccctttgtctctgaccgccctggcctgaactggctgggcggagattctcgcgaattctcggatctgcgcggaaaacgcgctcgaggcagttctctgacgcatttccggagcgccagggaagagggaagtcgtggtggtcgcgagggagccggaaagatggtggttaccagatctgcacgggctaaggccagcatccaagccgcgtcggctgaaagttccgggcaaaaggtaggaaatccagtcttccctacttctcgccgcttcgcagagccgcgctcaggcaggcggggcggcgcaagggtccggttaagggtgaggacctgccgacagagaggacccgagcttgccgcgcgcttgggtctcccaggccccgtgctaagcctgtcacggaaactgtttagccttcaccactgtctcttaaggcaatttttagtatggaagagaggttagataactttatttgggtcgttcaactccttaatgcagaagcacagttcgaacttttaaaccttactgttaacacggtaccaaggagggttaatttcggccaccatgcacaagccccatttaggggggctggaaaaaaagcttcgttttcacgtggggaggctggcagctgtccagcatcacctccttaaggcgtgaggagggctgtggtgtcgtcgcctggtgactcttagtggcgttagtcggctgtctcattctgactcagcgatgcagggaacggagcggcggcgattttttcctgtacgtaaaggtaagggcggcgactgattccatcagtgtgttcctaaacacatcggtgttcagagttaatattccctttctcccctcttctataggtgggtcagaatgttggtctacccattatatttgactttaaacagaaaaattttaatcgttctgcttctgaagttacatctaggaaggatgaggctagtgaagtaaatgcagggttggctccagtgtttaaattttgatttttttgtttgtttgtttttgattcggagtcttgctctgtcgcccaggctagagtgcagtggcgcagcctcggctcactgcaacttctgcctcccggattccaacaattcttctgcctcaggctcctgagtagttgggattacaggtgcgcaccaaca

SEQ ID NO: 4610 - DNA, 6000 bp, Homo sapiens
atcacctgaggtcaggagttcaagaccagcttggccaacatggtgaaaccccatctctactaataatacaaaaattagctgggcgtggtggcacatgcctgtcatcccagccactcaggaggctgacgcagaagaattgcttgaacccaggaggcggaggttgcagtgagccgagatagcaccattgcacaccagcctgggtgacaacagcaaaactctgtctccaaaaaaaaaaaaaaaacttcaattgcaagttattggttgacctttgcttcttgaggattttgaaaccaaaggcagagtatgcttccctgtgtagtgggaggttgactatgaagtctgcagcaggtgaactgaaggacttagtgaagtctcagaatgctgtagtgacaagcagtagattgaaagatgggtagggggacttttcctacccgggatgatgtgaaaacatgagaaaatcaaacaagcttcgttaaaggtattttataagcctcttctgtgttcatttataaaaggaaaaacaagcctactctagagataaaggaggtcatttatttctggccattgcagttcttcagagatggactctgaagctcagtattgacaccattcctttcataataatagccctgctgcttgggcagcagcattcaggaaagtaccctttgccaggttcctgtgcctccatgtaggaaggcccatctgctcctggcataatgaaagtgcctagctagagacaagaagcacagactgtgccagacaagagacttggagtaattgatataatgagtaaccaagtgagagtagatccctcaccaaagcgtaaccacattagctactttatcacaacagacttatttttaggtatactcaagaccatgttaagcactgtgggttatacaaacgcatagaatacactatcattgcctttgataaatctgaaaatacaggggacatcttttgaataaactcttaaataaacttataggagacaaggaaattgaataaatgaaaacttctatagctgaatatacagatttatattgaagagattcagactaagggaagatcatggcgaaacagagttaggggcaagatttttgaagaaaaattgagctttatggttttattttcattgtggtgaaacttaggggtaaaggtgagaagtagaaaaaagtggtagtagaacgaacgaggtctgtaggtgatgtgcttggataggttgggtggggatagttgacagggaggggcttggtgacaagctaaggaatctggacttgttcccgtagatcatcaataactattctgattctttagcattaaagtgcagttttaagaactttcatccagccttggttaacaggagatactagaatggaaacatatagataggaagatactctaagtttattgctataggaatccgggtgtgaaagtgggaatggggctaagtgggaatggaaaagacaggttgaatctaaaagacattgaggagaaatttccaataggccttggtgatcaaaagaatgcttacaaaggactgaatgtttcacagacagtatatatatcccatatcaaatcaatgaccctggaatgtagggaaaggcaagagtagtgaaactaaagctaaggttgggtaagtatcttctccagggtaaaacatgtctccccctcatctaaaagacagaaggatgttctgagaatcctgaatgtttttcctattgaatagtttatcttacccttgtagtcttccctgaaattctcctcaattaatgtttattgtaatctaattcctgacctctgtgatactgatatttccccttaaactagcatactcccctcttcttggaacaggtgacatggtgaccagcactcttctctgttgtgttcttccttctgaccaagcactacagccacatgaggcagcagtgagatgtggccttgtcactcctcttcaggtgcttatccacaatttacttcccacaatttacttgatggttctggcaaaatgtttgtgagtctttttttattgcatggaattgtgttcacttaggttttatgccagactggtttaaatgattcatcataaattctgaaactcttttaggtatttgccaacctttactgcatgtcttgtttcccctccccagctctttatcttcccgcaagatacaaatgagtcaacacaatcttcatcaaaaagcattgtgctctgtagaaggaagtgtgataaattaagtagtagcttatttttttaaaaaaaaaataatagctccagctacttggaagtctgaagtggaaggatcacttgagcccaggagttccagactagtctgggtaacatagcaagaccctgtctcaaaacaaaacaaacaaacaaacaaaaaaacccaaaacaaaaaaaataattaaagttttttgttttcttcttcagtttgttttttgcttgcttgagtggtctgctcaggaaatggccttgtagctaagtgggttttgggggtttggttatttcacaatgtctctataccttttgggtttacagtagaatagattgctgcttgcttttttaaaaaagtgtgaagttctgccaagacactatttacagattcttagattttgaggaaagggactatggaggcatctaagcaaaattttttttgttatctcctatttatttctgtcttctccctcattaagaagaaacaagaaagttagtaagagattgtgctgaaatataggcttgagaaaaatagatttaaattttattaggcaggtttgcctcatcaattaataaaaattaataaagttctagttttgtgtaattgaggacattctaagggtacagagaaattataaaactatattatcttctttgtccaaacatagaaaatcattttccttttaggattatgctttgctactctgcaattaagcaagttagtttggaatgtttttatttttattttctttcccaaagttacctaaggagtgttttaatttttatcagtaatcatgtctgtatctttagttctgagttgctttattaactggctaaggatgtttttgttttgttttgttttgtttttaccatattctggctttctcagtgttgtatgccaatctcctaagacaatgtttagaatttagtgggtactcaataaatttgttgaacaacttaatggatttttaaatgtttatttctaattttaaaaacggtatgataattttagaaagcaaactttatcataattctaaaattatgataattttagaaagcaaacttacacaattgattcttttttgcttcttttagtctttaactatgtacacacttttacatggttttagttattacaaacttgaaattttgtatttttataaatcaaagatttcccatattttatgttttaaaatagccaaagtaaacatcacgttacttagagcagcaagaaattctctcttaattctagatggggataatttaagaaatatactattcctaacaaatattgctgaagaatgagggtttattttaatttatgtatactgggattgagtttcttaatttgaaatattgtctttaagttgtctataaccaagatatctcgatgatctttcttttttttttgcagtacttagtaaagagcatgcagtatctttaatgttcagattaagcagtgttcagaatcatgatatcctgaaggaagtttgaataatgttgcaaaacagaaaggattgctaatatcttaaatagaggaagtcctaacaacacatttcccagttttcttcaggatcaagactaattttgttaacatttgttgaacttctgccttcaataaagatgatatactgatttttggatgttctcacactgaattaggcacttgggtagacttgtacccattgagaggttatgcaagctcaaatgtggaaagtttttctagaagagcctgcctttcagggccaaaatgccacaggcacagcataacttcctgaaacaaatttatttcctaagacattggttgcagagtagaaatgtgttctttagaaacagttcttcaggctttctgccctaaaagttacaatgttgtcagcaaggtggttgattttactttctttttgttccatcacagtttaccagcattacatatgcagggtattgagctaactgtctggtcaggtgctccttgtgggggccacttgctctagatcctatatagaccaacactcttagtctttatatccagaacccaagtgaagcttcaaaggttactgggagggttgaagaggtgctgaaatcaacacttcccttaatggaggtcagcacttccccagtcctgggagagacacagactgtcagaagcatctgactttgcttcattcaaaagggagtttgaggtatatatagcagacttaaaagttatgaataaaaataccttctgtgatgaacagaagtttctcattgatcacactgacaagaaacctttcgatgaacagtccgggtagaagacatgtcactcactctaaacagtgtctgtcttctttcctgggcctaactgaactttgcagagttcatttgggacataaggaaacagaaggtgtcaacttggcccttgtgctcactgggaaaatggggagagacagaactcattcaggagacctgtaattctgttctttctctgggaggcaagaagaaaggtgagttttgcatatgggtgatggaatggaataatctcagttaagcagaccacactttacgttctagttagcctcttgtttgttaaaaatttgaattgtaaccaggttcctttgctgagaaggaaggcactagggccctggagtgagatgatggctgtgttatgtgaccacagaaggtggttacgtactaatttcctctagggcttgtgatgaagtcagtaaaccacagccttcagcatgctctgctcaggcggcagcagtggctttttggaggtgtctcggccatgacacacatttgacatgccctccctcaacctacttatagactatttttcttgctctgcagcatggaccaaagagaaattctgcagaagttcctggatgaggcccaaagcaagaaaattactaaagaggagtttgccaatgaatttctggtgagtcctgtatgtgaccctctcagggtagttacatacactatttaactgactatgggggtccaattttccgagaccaaattgctcttgggataaagtaaatatgagaccttggcggggaagacagaaaaaaaaaagtttgacttctctgagtggtttgcatgtatttcaggtattctctcaaaattactggttttaatattttgtttgctagttctttggagtttggttaggaatcctacagaagacatatacaactccagatgtaaaaacactaatattaattgaacatccagatttccccaggtatctaagttgtggtttatgctttatattactaattttaattaatattaagaagaaagagaccaatgttaacttttcatgcaatattacatttttagcctcccctctgggattctatttggttgacaaaggtttttgaagagcaccaaaactacccactgccacagttttttttgttgttgttgtttgtttttttaagattcagaatcttactctgtcacccaggctggagtgcagcagtgcaaccacagctcactgtagccttgaactcctggcctcaagtgattctcttgcctcagcctcctgagtagctggggccacaggtgtgtatcgccatgcctggctaatttaaaaaaaaattgtttttttcttttttgtagatacgagccttgcttttttgcccaggcttgtctcgaactcctggcttcaagcaatcctcccatcttgcctcccaaagtgctgggattacaggcatgaaccactatgtctggccatcatttttcttttctttttcatatgaaaaatatattataacatgtgttttttcaataacagggcttcc

SEQ ID NO: 4611 - DNA, 6000 bp, Homo sapiens
ttcctactcatcagcagagtgatctttgctggtaagcaattggaagatggatgtactttgatgacagcattcaaaaggagtccactcttcttattgtgctgagactttgtggtggtgccaaggaagaagtattacaccactcccaagaagaatacgcataagagaaagaaggttaagctaacggtcctaaaatattacaaggtggacaagaatggcaaaactagttgcctttgttgtgagtgcccttcaggtgagtgtggtgctggagtttttatggccagccactttgaaagacattattgtggcaaatgttgtctgacttactgtttcaacaaaccagaagacgagatgggttaataaaaggcatgaactaaaaagcaaaaacaggctgagtgtggtggcttatggctataatccctgtgctttgggaggctgaggtgggagaatggcttaaggccaggagttcgaggttccagtgagcaatgatggtgccactgcactctagcctgggtgaaagagtgagactctatctctaaaacaaaaacaaaactccaaaccatgacatttagaagttaaagtaatatgttcatgttaatgaaaatattgctcagatgaaccatttgagaaacctacttaaatcctacttaaaataataaaaatggtttatgttagtattatctatatcataaagaagagattttcacttcaatccttattaaaaactgacagcatttcccccccttactggcctccatacttaactgtggagaaagcaccaatttatctgtttcttctcaaagattgtgctcactggatgatattttactacatttatggtttgtgctaatttgttcaatgtcgaatcaaaatcaggagaaattttttttttagaaatgaggccttgctatgtttcccaggttggcctcaaactcctgggctcaagtgatcgtccctcctcagcctctagattagctaggactacaggcatgcaccattgagcctggctgggagaaatatattttggctatgaactgttttctgaataaaatggaaagtgggctgggcatggcggctcatgcctgtaatcccagcactttggaaggccgaggtgggtggattgtctgagctcaggagttggagaccagcctgggcaacatggtgaaacctcatctctaataaaagcacaaaaaaattagcggggcagtggtgacgggcgcctgtaattccagctactgaggaggcagaggcaggagaatagcttgaacttgggaggcagaggttgcagtgagccatcatggcactgcactccagcctgagcaacagagtgagattctgtctaaaaaaaaaaaggaaataaaaaggaaagtggactgacatcttttttgtaggaacagtgttctttctgcatccaaagttataactccatcagtgtttttttgtttgtttgtttgtttgtgttttttttgcgacagagtcttgctctgttaccaaggctggagcgcagtggcatgatctcggctcactgcaacctccgcctcccaggttcaagtgattctcgtgcttcagcctcccgagtagctgggattacaggcatgtgtcaccatgccagactaattttcgtatttttagtagagatggggtttcgccatgttgaccaggctggtctcaaactcctgggtccaagtgatccgcctgtcttggcctcccaaagtgctgggattacagccgtgagccaccatgcctggcctgtaactccatcagttttgatcccaagatatctttttcagactgactcatacctcacaaaataattcttatctaaatgaaaaatgttttcttttgtatcttgaatttttaatgataaaccagacaggaagtttctgggcatttctccttatgtattgcctatatgctgtaagcggattcatattgtgtatatcagtggtttctacgcttaaaacaaacatctggtagcaggtacagggcagatattgccatttcatgttgtgtatcatgactccatgtgatatttgacaaagaattctgccaatagctttgttacacttttttttttttttttttttttttagattgagtctcgctctgtcacccaggctggagtgcagtggcccaatcgatcccagctcactgcaacctccaccttccaggttcaagcgactctcctgcctcagcctcctgagtagctaggactacaggcgtgtgccaacacgcccagctcatttttgtatttttagtagagatggggtttcaccatattggccaggctggtcttgaacttctgatctcagatgatcctcctgccttgacctcccaaagtgctggaattacaggcgtgagccactgcacccagccagctttgttgcactgtctccaaacagaatatgttattaactttgtagctagttgtgtaagcagctctataacaaaatgatttctaccaatttttttctacagaaatgtaacttgatctcttttaaccacaaaatgtatccacatcatacaggaaaacattttgcatttattctggaaaaatccattttacttggtaaagaagctacagcatttttttttttttttttttgagatggagtcttgctctgtcgcccaggctggagtgcaggggcacctcggttcactgcaacctctgcctcccaggttcaagcgattctcctgcctcagccaccggagtagctgggattacaggcacgcggcaccatgcccggctaatttttgtatttttagtaaagatggggtttcaccatgttggccaggctggtctcgaacacctgactttgtgatccgccctccttggcctcccaaagtgctgggattacagccaccccgcccagcccagccaatgtatttcttttgggtggatgatttttttctttttggtgacttataaatataacaacaaaatgaaagaaaaatgaaattttaacagatgtaaacaataatatgtaaattatgttaaaatacctttgcagtaaactaaataagtggatcaatgtaatctgcgcagtacatatacaacttctaagaatgcaaagctgttcaatagcataatgggatttttgttaaaattttaattaaatttgtattaaacattttgtgagcgatacatgaaaatggaagtactttgtagtgctaaaattgtagtgctaaaatagggggatgggtggaacaggtttccagtgtcagactcctttagtttgcctcccacattacttacctgctggatgtcccttgcttaccctctttgtttctgtttccttaattgcaaaatggaaatagcagtagaacctacctcatcgttgttgtgaggattaaatgagtaaatacatataaagcattttggacagtgcctacctcgaatagctcaatgcttcctattaccaggaaacaaaaattagccgggcgtggtggtgcgcgcctgtaatcccagctactcaggaggctgaggcaggataactgcttgaacccgggagggagaggttgcagtgagccaagatcgcaccactgcactccagcctgggtgatggagcaagactccgtctcagaaaaaaataaagaaaaaagaaaataaatctgcacagccatcatcttattgattccctattaaaaactcctcactggccaggtgtggtggctcacgcctgtaatcccaacagtttgtgagaccgaggcgggcagattgcctgatgtcaggagttcgagaccagcctggccaacgtcgtgaaactccatctctactaaaaatacaaaaaacattagccaggcgtgtggcgtgcgcctgtaatcccagctactcaggagactgaggcaggggaattgcttgaaccggggaggtggaggttgcagtgagccgagattgcgccactgcactccagcctgggcgacagagagagactctgtctcaaaaacagacaaacaaaactcctcactctgtccctgtcactgaccaaagaagttacccattctcaaattactttcttcatctattgcctccaattttggctggcaatatctcccataccaaaccgttaacacctggatccttttagactaccggttccatagcaggcattcaaaagttagtcatttaactttttcaccagggacaaaagtccttaaaagaggaaaaaaactggaaaggattacaaatcaccatgtgatgtttaggtgctctttagcacctaaagaggatttacaagatacattgtctgcacggcaaccactcagacgaatccaccaccaagcgaaggtttttagtaaaatatccttttttttttttttgagacggagtttcgctcttgttgcccagactggcgtgcagtggcgctatctcggctcactgcaacctctgcctcccaggttcaagcgattctcctgcctcagcctcccaagaagctgggattacaggcatgcgccaccacgcccggctaattttgtatttttagtagagacggggtttcgccatgttggccaggctggtttcgaacccctggccacaggtgatccggccgcctcggcctcccaaagtgctgggattacagacgcgagccaccgcgcccagcctaaaatacccattttaattgcatttcaatgacgttactcggtcattgacctcttacgcaaggagggcgagattagggagacagctggacttcttcctcgccctcccttcactggactggctggcgcagtgagtagccctgcccttggacgatttggcattttcattggtcaatttttcttaggaggctggccgtgtgttgactccgcctactatataggcggggtctccccgccgcaggggctgggatgctgggggctgctgaagccgccatcttggattccgcggtagcggaggcggcggtcaggcgccgcttctggggagtggcctttcttttcccctccctcccggttcggtggcggcggctcctcccactgggggggggggtggcgcggcggcggtggcatctgcggccatggcggcgactactgccaaccccggtgaggagacggaggactggggcgcctctaaaggggaggggccgaaggggctgacaactaaggagacccagggctgaggggacgcagctggagctgaaggcgccggggcggggcgggggccgcgagagacggtgggggagcggtgacctggggaggggcccgatcccggggacttgggtagactcgagtatacccaagggagcgagggggcaggtgggagttgaggggggctccctgtcctgacctccgttggagcggcagccagtgcggggctggcccgccctcactcctcggtcggcgtctggtctgtgatgtggtcctcttttaaccctctgcccgctggagccgcttgatgccgaaaactgtaggcagagtgtctcggtttactttaagagtagtttggattcataaaccctggaccacactgctctttagttgaggcgttgcttccaaacatttaaaggtttagattttaatttaaaaaataaaaaatggacattctttgatatatacgacgtttctttaggctgttacctcccacccgcaacccccgtccccgtctccgtccccggactatactttgaaacttagatcttgtgttaagagggcctgtaggtctttgcctgctgagggcaggggtttgtgtaatggttatggttccggacaggtctttagttccacagccccaggtttaaatcttgttaggcctacgtcgaggcaatttccaaactctttcagaaaagtttgattccacaccatttctcaatttcaaaaaataatcaaatatcaaaaaggtttggtctgttttgtctaagagatggagtagggtgtagtgcagttctagagagatcagatcttcaaattactagtcccagccctctttcctctatgttacagttattcctctttagaaggcatttcattttaggggtctagtttatcttggagaccttggttattctt

SEQ ID NO: 4612 - DNA, 6000 bp, Homo sapiens
gatttttttttttttaatcaaaagaattttttaaaaacagattcggtgaagtgagaaattttagagcatatcacaaatgttaagcttttttattttttttttttcttttttgagacagagtctcactccgtcacccaggctggagtgcagtgatgcaatctcagctcactgcaacctctgcctcctggttttaaataattctccctgcctcagcctcctgagtagctgggattacaggcacccaccaccaggcctggctgttttgtattttttttttttttttttttttagtagagacagggtttcaccatgttggccaagctggtcttgaactcctgacctcaggtgatccacccacttcagcctcccaacgtgctgggattacaggcgtgagccaccgtacgcagccgcaaatgttatgcttttacatttaatgtggggggagagaatggcattcagttttacaatttgacaactaaggagactgaggagaaaaaagacaaatcagggggaggaaaacataacttagtcaaaatatttatttaaaaaatatttttggccgggtgtggtggctcatgcctgtaatcccagcactttgggaggacgagacgggtggatcacttgaggtcaggagtttgagaccagcctggccaacatggtgaaacactgtctctacgaaaataacaaaaattagctgggtgtggtggtgggtgcctgtaatcccagctacttaggaagctaaggcaggagaatggctccaacccgggaggcggaggttgcagtgagctgagatggcaccactgcactccagcctggacaacagagtgagactctgtctcaattaaaaaaaaaaaaaagaaaaagaaaaaaatatatatataaaatatatatatatatatatatgaactaaatcatttttgaaaaataactatattttccgaaacaagaaaaaaaatcaatgagacaattggcattgtttttaaagggggaaatttctttaatgtcagactgggttctcatatctgcttctgcattcaatctttgtgtgtgtgtgtgtgtatgtgtgtgtgtgtgtgtgtctcactctgtcacccaggctggagtgcagtggcatgattgcagctcactgcaacctctacctcccaggttcaagcaattctcctgcctaagccttcccacaggtgcatactaccacgtctcgctaatttttgtgattttggtagagacacagtggctcacacctataatcccagcgttttgggaggccaaggtgggcagatcacctgaggttgggagttcgagaccagcctgggcaacatggtgaaaccccatctctactaaaaatacaaaaattagctgggcgtggtggcgtgcacctgtaatcccagctacttgggaggctgaagcacgacaatcgcttgaattcgggaggcagagtttgcagtgagctgagatcacgccactgcactccagcctgggcaaaaaagcaagaccctgtctcaaaaaaaacaaaaacaaaaaacagaagatgataaaaaaaaaaaaaagaaaccctcccgaaaacggcagaaagacagtcataaagggatgcaaagaaatttatacatatgggccaggcacagtggctcacgcctgtaatcccagcactttaggaggccgaggcgggcggatcacgagttcaagagatcaagaccatcctggccaacatggtgaaaccccgtctctactaaaaatacaaaaattagctgggcatggtgacgcatgcctgtaatcccagctactcgggaggctgaggcagaagaatcgcttgaatccaggaggtggaggagggtcccttgagccaagattgcaccattgcactccagcctgggcgacagagggagactctgtctcaaaaagaaaaaaaaaagaaagaaagaaatttatacatatgaacccttagagctataaataggaaacttaaaatcttctacttatgtttgtgtgtgtgtgtatttttagtagggtggtctataactgactagctataaaaagttcctgcttcaaatttgaagagatgtttctgaaattttttctgtcattggaaaataagaaaacttcctactataaaaaaggttgtcacatgtctttctacaatgtttcaaaaggctagtcttgtggctgtttggaaggttatcccttgaggggatacatgacattttaaactctaggctaaagcagggtcatcgcctcatgatatttgcgggacagctgattggaagctggccaagagctggtgggcctaacatgtggactggtgattctccccaatccagaccagtggtgagaattttttttttttttttgagatggagtctcgctctgttgcccaggctggagtgcaatggcgcaatctcggctcactgcaacctctgcctctcaggttcaagtgattccctgcctcaccctccctagtagctgggattataggcacccaccaccatgcccagctaatttttgtatttttagtagagacagggtttcaccaagtcggtcaggctggtctcaaactcctgacctcgactgatccacccacctcggactcccaaagtgctgggattacaggcgtgagccaccacgccaagccgatttttttttttgagacagggtctcactccgttgtccaggctggagtgcagtggcatgatcttggctcactgcagcctctgtctcccaggctcaagtgatcctcctacctcagcctcctaagtagctgggactacaggtgcatgccaccatgccagctaggctaatttttgtatttttgaagagacgtggtttcaccatgttgcccaggctggtctcaaacccctgagctcaagcaatctgcccacctcagcctcccaaagtgctgggattacaggtgtgagccactgtgcccagctgacaaatttaaactatctttggcactcttgtccccattctttgttcatctttcatactgtactcctgctttaacctagcttgtctgcttgccctctcctcatgatatgagcaaattcccatttatattcttcaacatacaatttttttgctttcagaatgctcgcttgtcttttattttgctgggttatatccaatatctattctaagacctgactcacaatatttctaagaagccttccattcattcattcaccatatactggtgtgtgtgtgtgtgtgtgtgtgtgtgtgtgtgtgtgtatgtgtgtgtgtccatacacatataggccttccaaattaacttaaactccactatgtcccttcagcaattaggttaggtaccccatttgttctactgttgtatatactgcatgttttacacaggcattttcaagctattacactttattctgccttccaattaaacattgtagcagtgactctttcatcatctatcctgtatgattgtcccaataattaataataaagtactatagtagcaacttgtactctcttgatcctaacaaaaccctgtaatgggctaatattacttcatccatatgtcttctttgtagacatagaaactgaggtttaaagaggttacattagttattccaaatcaaacggcttgtaagtggcagggaagatggcattcaagacccgggctcaaataactagcctcaatgtattaagtaaggcactaatgaggggcattgcatattaagtaaagccctaggaaaggcattgagatagaggttctgaggacaaagagggctctaaatcaacaatcttaaccgaaaaatacacaaaaaacttgctgggcgaggtcgggcctataatcccagcactttggtacctgaggccggcagattgcttgaggctaacagttcgagacaagcttgggcaacatagcaagaccctgtctttacaaaacaaacaaacaaacgaaaaatacacaaaagcaacaccagaggcccatttgcatggcgtgtttttgtttatttgtttggcctaatatggtttcgttttgtttggaagaagggattgtgccctccaagcctttgtcgtttcactcacctctcccaacctggccctgtccagcccctccctggagggctgggcatatggatgctggaggtcacaggctgcccaggcaggttggtgacctcggaggcagaaccacggcctcgagtcgggcctctaacggcgaaaagactgacgcggttggaccgcgccattcccgaaatgttaaggagcttaaactccgcatcgtcctccaagataagtaggaaaagggcagtcagaaagaacgtcttccccgtccgccgtcttcctgcgcgcccttctaggaacccagcgtccatcccacggcctgatttactaagggagtcttgtagcatacgggagggggaaaagtcattgattgcaattacggtaatttggttagttactcaaacggtcgtttacatataacttgcatgttaatatacttctggaagtatgcatatgtccatacttctttaacagggcacccacggccgcctgctcaccctacttatgcagcaaattttacttctctctcggcttctttagcctcgcaaacgctatcgcttaggtccgcttcttaaatattggcccctcctcccacccgtaagctcctcccttcgccctctctccctcgagagcttccaaacatcttttccccgcccccttttctatttctgaacaggcatgttccaggcagctcacccgactccttagattactatggaatcggtagggtcctgaccgctggggaagcaggaaagcgtatcctgggaagaaaggcttggcttggactccggagaagaatactacatcgagacctgctggggaattttattttattttattatttttttggtcttggttgtactgagggaggaagaagaggttgtgtggcccggtcgaacttgtggcagcctgaaggccccctcaggcggcgccgcgggcagccccgcagccggggcctggtgcagcctccgcggccgctgtcagggaagcgcaggcggccaatggaacccgggagcggtcgctgctgctgaggcggcagtgtcggcagtccaaccgcgactgcccgcaccccctccgcgggggtcccccagaggtaagctactcctccttcatgagtcacctttgccctgttgggtgggggggggggtccctctcccaccctgtcccgcacagtcttccccacctgagttcgactacgaaactgccctcttggtgtcagctgcaccccgggttccttctccaccctttcctctcaggcctggggtcctcctccgctttttggcttcctcttctattagctcctccctctgcctcggggattcccccctccctcactcatccctgttgcctacgtctcgaataattcttttttttaagtcatgaaccctttccatatcagacgactcccataatgcccatccttgtccttcctcgtcgtctctgcccctgccccaaaccttttccatggactccacctttatctcttttcctagtttgcacttttcctcctatgtccctgtgcaactccagcactgggttcccatttccctgagctaaagattgcatccctgtcttcctgtgctgcttctgattccattacctcactgtcacccacctacccagccagctcctggcttccaagaattgcctgttcccttctccttaagggatctcgggcccttgtcatcaatccaaaagtaccatttacattcttactttgaacctagtcctcactcttctctgggatgcattatgatccctataactttctttagcttctctttctccctcctcaatcccccaactttctagaggtttctgtctgtaggggagagatttgacagtgcccttcccattcaggatttccaactttgacacctccctcgagtttcagggatttctctgatccttgtgacatttgttctgtttttcccgtgggcttcatgtgttctctgttacactctttatctccacataccactt

SEQ ID NO: 4613 - DNA, 6000 bp, Homo sapiens
cacacacacacacacacacacacacacggcttcattcagacagctctccagttccttctcccttccctgattgggtccgcaccacccagccctaggccagagaactcttgctccaggtgtccaccaggtggtggcattgaccaaacaatcctaagtgctaactactacacatggattataaccacatgaggaactgttccaacaattagtcaagccatttattcctcccagcaccttctattagggtgtaaatactattattatccaatgggatcttgggcctcgcatagctagtaaagggaagaactaggactcacatagctagtaaagggaagaattcagggagtctggctccagagtgtggactcttaatcacttcaagataataccccccactgccagctgctgcctcccaatcaagtcactctaaaaggggcctccttccctaagatggtagctctgcaaaggtttcgtaccctgccagtttaaaatcccatgtttgaattctgggaagtctacctatagatttaggtctacccctagtactggatttctatttcagcccccaaattctcccataacaacccttggtgagaaactggatttgatgcccatttgaaagtatctggaaagaaagttagaggccgtagaaccttcattcatgcattccttcaacaaatacttcgggaaggtccatcaggtggcaggcattggatacagcagtgattaaacagacatggggatcagaaaagtgataaaataagccattaaaatgtaaagaatgctacttggtgatatgttacagagaaaaataaagcaagaaagggaatagaaaagaggggtcagataaagagaagggaagattatagggacagaaagagggagggaggagaggaaactttttttttttaaccatagtactttggaccaggtcctgaactttatctgtgttatctcagttgatcatcacaaccactcagtagagtagatattagtattcctcttttttggggtggggggacggagtctcactctgttgcccaggctggagtgcggtggtgcgatctcgtctcactgcaatctccacctcccaggttcaagtgattctcctgcctcagcctcccgagtagctgccactacaggcgcgtgccaccacacccgctggttttttgtatttttagtagagacggggtttcaccgtgttagccaggatggtctcgatctcctgatttggtctcatgatctcggtctcggtctcatgatccacccacctcggcctcccaaagtgctgggattacaggcgtaagccaccgcgtcacaaccactcaggagagtaggtattattattcccactttacaaagaaagaaatggatcagatagataggttaagtaagcttgcctggggaacagccctggctggagggaaaggttctgacctgactccacccagacacccccactgccaccccaactgcttaggggaagctgtgaggaaatccaaggccactcctcccaggagcagttcactcagcattcacagccctgaggctctgtgatgggggccctagcattgctggaggaacatcctgggtagctaaagtacagaaacatgggagtgaggaggtcctaagaaaccctccagtgtgcagattgctctggccccaaagcacttctataaacactagtcagaggccaggtgtggtggctcatgactgtaatcctaacactttgataagtggataaatgtgggaggctgaggcgggcagattacctgagctcaggagtttgagaccagcctgggcaacatggtgaaaccccatctctacaaaaaatgcaaaaattagttgcatgtggtggcatgcacttgtagtcccaactacttggggggctgaagcaggaggacctcttgaacccaggaggtcaagcctgcagtaagctgagatcacgccactgcactccagcctgggtgacaaagtgagaccttgtctcaaaaacaaaacaaaacaaaaaaatccactagttaggacaggtattattgccccatttttactgatgtggtagctgagggctgagatttccctcagggcctacagctagtaaatggcagaccacattcttataagtgattctgccccagcatttaaacccttcttgccacctccaagcctgtgtgactataaatgttaattggtagaggagaggtacaagcagggtcactgtggaaagttcaaggccaggagctagggtcaaactcccactgttcctccacccacagtggcctttgtgacaagaagggggaggggtggggactgtgagatctggaggctaccgaaggttacagagcctgggctgtcctttttcaacggttgaggcacaacccatccctgagtcactccagtgggttgaggcgtccccaggcatggaaccccctagaacccaaagaaaagtggtccctaatcactggatcaggcatcccaaggagagggccctccaaggatggggctggggaagtgtgtgccaccgcagactacccaggctccacatattttccaccttgacccccaggccctccctgaaagggcagatttgtgctgagctttaagtggtttctgtggtttagggttggggaaggaaggaaagagatgctggggactgctccccagttccaagccaccaccaccacctcccatcccttccagagtgtttgcccccagcatggagatttccccaataaggggactgggcacgtggggatgaaatgattctctgatccctatcagccccttccttatataagattgtatttgaagaggaaataaccaccgccctgctttgaaaggacgattcttccagataaggggctgtgattgcagcaagagggagaaagtttagacaagagggggaacttcccataaggataaccaagggatcttcttgccctggggagaaaaaaaactcaaactatccatgcttagggcaggggagaggtagagaatgcctaggaagcatgtgacactcctaggcctagaggtcaggatactgtcttctaaatctccagtcacttcctccccaccctacatagtagcacaaagtggcacaactggggagtcagctgtgcctgcagtgtctggggatgctctgtgtccatccgcaagcattctacgtgacctccactctgtgcctgcaattggtgggttgtagaagaggtagtcacgaagggcccctgggagacccagagtcaagaggaagagaggcctaaaaaggagaaaagatagagaggggacagctggagaagagccacagacaggcaggagccagcaaagagagacagagagatgggggataactgaggagttctggggaggaggggagcagaacggcatctcccctgcactcccacgcccggcatgttgctggctcctcctgtcagctggagggtgctgggggggcgggggggaagggagctgcaaagcactttacctctcactccaaacctgcccaaggtgcagagcccccaaacagaccaacatcctgttctgtgcagagatgcatacatggatgcgtgggcccacatttaccaaaagaacacgggggataatcagagcctcagaggcataggcacatacccttagactcagtgcagaaggtccccaaaacttcccctcctctttctcactactcatccactgtcaatgaccctaggagttgaaaagtccttctccacttctacctttatctctcaatctgcagccatggggagactctgggagctacctaagaacagaggtgctgatggtagcagagtgtgaagctccagggttgggcaggagtggaggatggcgagacgagacggcagaagagggaagggacagctgcttgccctctccatgccaggtgccacgtgcaccaggtgggggggagtgggcgagtcacgaggctgtggcatggctgactcctgctctgctgtttaccagctgggaacgagagcaggaggaggtgccagggagcctcttgctgcagcctggcccctggccagttgcttgttgggtaaccaggagagtcaggcccagctaatcaaactctgggcccaggccatgcaggagaaaagcagcaccaggatccccagaagcctcgtcctcttggcccccttcagagccttcactgcaggcctcagtgtgggccactaggtctgggagcctctccttctcccaatgagtccagtgcagcatctctcctctcctcttccccaccatggcttctctgcctccaggcactcctccaggcctgccccttgccccaacagatgaggagcacgtagaagcatcagggggtcagggagtcctggcaagagcagcaagggttaggggcaggggccgagcaggcagaggcctcagggaactgaacagtcactgggaggagtctgactgcatcctagagaagagacacagtcccccaaacctgccctctccatctcccctatgcctgtcacctgtcttaggtagaaatcacaggattctaaagtcacaaagacttgggtccaaatcatagctcacccatttattgttcttgtgtgagtccttgggcaaaatcattaatatctctgagaatccctccactcactgatcaatctggaataataatgtttccctgtggtgggtgctgtgaatatttacacaaagtaaaagcatggatttacataaagtgtcctgcaaagggcccagcacacagtaagtgattaataaatgctagttcccttcctttctcctgtcctgtttctcctcaaggctccatgcactggtccactggtctctcctcatgtcccctcctggtgccaggacactctgccagccactccttttccctgcctgctggagggccaggtgctcccgccttccaccctccgccctcctccctcccctgggccctgctccctgccctcctgggcagccagggcagccaggacggcaccaagggagctgccccatggacagggccccacagagacagcaccgagcctcacggggtaagaggcccatggccctgcctgcaggtggaagagactgctggaggttcagaggagggcagaaatggcaagagactgggcaagaagtgaggaggggagggagggacaagagtgcagaggagaaagccctgggttggcagggagtgaaactggaggagaaacaggaggaggggctggggagatgacagaggagaagaaatcgcaaaaggagagaaacaggaaagaaagggagaagcgggagaaggaagaaacaggttggagggtagatggggagggaagagccaagtcaggggagccagatctagacccagcgaggggtcagaatgtggacaggccctcccaggtgtgggcttaccccccaggaggcacagggacactgcttccttgatctggccaggaccccagacagcagtggccgggaggctggctgctccaccttctgttcattcaccagtggagaaacctgtcctttaaggagtgacagacttggggagtgtggcagggggaaccacaccctgtcagctgcccatgaccacgtagcctggtcctttcctcgccactcacccagggatgtgggatttcatctctgcagagaatgtggggcactgggccatcagcagggaaggacagaatgtcaggccgtccttggccccacccatggtccaagtcaggaaccccctcagagcaggatcgcagggccacaggcttggtcagctgtgagcatggaggaggaaagtttgagggccagagccaccaagctccagggccacctggtggaggaagaactggctgcctgggtgagcaaggggagcacccccaccacaggactgctctgaggtgcaaggctagaggccaggagccggtgccacgtcagggaggaagctgggtggggccaggcaggagcaaggggaggtgggcggggctgggtggggccttgccacctcggggcagtcttttctcctccctcaccccagca

SEQ ID NO: 4614 - DNA, 6000 bp, Homo sapiens
accttacggggttgccaggagaatgaaatgattatgtatataaaacactcagcctcaggcttaatccatagtaaatacccaatagatggctgctgttctattctgtccttccctcctcctgcccaccacacatttacagccacagcttcactgtcctgtccctcaggatggctggctttgatggctcagcatgggatgaggaggaggaagagccacctgaccatcagtactataatgacttcccggggaaggaaccccccttggggggggtggtagacatgaggcttcgggaaggagccgctccaggggctgctcgacccactgcacccaatgcccagacccccagccacttgggagctacattggtaagttgcttggatggaggcgggctggggctagggtgggagtggttggttagggcttctggtctcaccttatttttatccctgcagcctgtaggacagcctgttgggggagatccagaagtccgcaaacagatgccacctccaccaccctgtccaggtatgaagggagccgagataggcagagctggggagtgttggaggcagggctgggatcactgtagagcctccctttcctcagcaggcagagagctttttgatgatccctcctatgtcaacgtccagaacctagacaaggcccggcaagcagtgggtggtgctgggccccccaatcctgctatcaatggcagtgcaccccgggacctgtttgacatgagtgagtgctcgtctctctcctctctgcatccccacctttctacttggttctggcccttctcctgcctatctgctctttccttcctgacttcccttccctgaagtctgggtcttgggtgtgtgttgtgcctgctacttcccctcaccctccctctatacttccagagcccttcgaagatgctcttcgcgtgcctccacctccccagtcggtgtccatggctgagcagctccgaggggagccctggttccatgggaagctgagccggcgggaggctgaggcactgctgcagctcaatggggacttcctggtacgggagagcacgaccacacctggccagtatgtgctcactggcttgcagagtgggcagcctaagcatttgctactggtggaccctgagggtgtggtgagtgtggcagaggtgtgggtgaggggtggcaaaaaggaaggtacagtaccctacagtgtatccctcttccttccctcattgctttgtagacattcccgctgggcagctgtctatgggcctctcttgctctttaaagtgtctggcatcttcctccagaggctcatcccttagcctgaactatgttctttatagtcctggcacagggccaggcgtggtggctcacacctgtaatcccagcgctttgggaggctgaggcaggtgaatcacctgaggtcaggagttcgagaccagcctgaccaatatggtgaaaccctgtctctactaaaaatacaaaaattagccgggtgtggtggcaggcacctgtagtcccagctactcaggaggctgaggcaggagaattgcttgaatctgggatgcagaggttgcaatgagctgagatcacaccactgcactccagcctgggtgacagagtgagactctgtctgaaaaaacaaaacaaaacaaatacagtcctggcccgtcctcaaatccccaagccttaagcttatcagagctagaaggcagtcatctcatctgtgcccctcttttgacaaataaggaaaccaccctgaagaggttgtgatgcccaatgtcagatggttagaggctagacactgcaagtttccttttgtaagaagatccaagggcttctccagctccccagactcaggactcagaccactgtgctttctcttatctgcactgcctcactgttcttcaaaactttccttgtttagccaggtgtggtggttcatgcctgtaatcccaacattttgcgaagctgaggtgggaggattgcttgaggccaggagttcaagaccagcctgggcaacatagcgagaccttgtctctagtcaggaatggtgacacatgcctgtagtcctacctacccaggaggctgaggcctgaggatcgcttgagcccaggagttcgaggttacagtgagccatgattgcgccactgtactctagcctgggtgacagagaccctgtctggaaacaaaaaaacttttgtttgttttctacagtaatctcagcttcctttctttttttttgagatagggttttgctttgtcactcaggctgcggtgtggtggcacacctggctaatttttgtattttttttttggtagagatggggtttcgccatgttgcccaagctgttcttgaactcccgggctcaagtgatccgcctccctcggcctcccagagtgctgggattacaggcacggaccaccatgcccagcctccacatctttttttgcactgtgtatactcttctgagacatgccaacttcctccaggtcaagaaaggggtatatagctctcagcttcactctttcagggctgatgtcgcctttgccttttctcacttcactgacctgtctattcctacaactgtctctttctagagaagcctcaatgatcaggattgacaggccacactctcccccaccatttttttctcctccttcaagcctcttgtctgtttcaccctcttccaccttggaggctgaggtcttatttgactcttcacctgaattgaccttcttccttcccaccctcccaggttcggactaaggatcaccgctttgaaagtgtcagtcaccttatcagctaccacatggacaatcacttgcccatcatctctgcgggcagcgaactgtgtctacagcaacctgtggagcggaaactgtgatctgccctagcgctctcttccagaagatgccctccaatcctttccaccctattccctaactctcgggacctcgtttgggagtgttctgtgggcttggccttgtgtcagagctgggagtagcatggactctgggtttcatatccagctgagtgagagggtttgagtcaaaagcctgggtgagaatcctgcctctccccaaacattaatcaccaaagtattaatgtacagagtggcccctcacctgggcctttcctgtgccaacctgatgccccttccccaagaaggtgagtgcttgtcatggaaaatgtcctgtggtgacaggcccagtggaacagtcacccttctgggcaagggggaacaaatcacacctctgggcttcagggtatcccagacccctctcaacacccgccccccccatgtttaaactttgtgcctttgaccatctcttaggtctaatgatattttatgcaaacagttcttggacccctgaattcaatgacagggatgccaacaccttcttggcttctgggacctgtgttcttgctgagcaccctctccggtttgggttgggataacagaggcaggagtggcagctgtcccctctccctggggatatgcaacccttagagattgccccagagccccactcccggccaggcgggagatggacccctcccttgctcagtgcctcctggccggggcccctcaccccaaggggtctgtatatacatttcataaggcctgccctcccatgttgcatgcctatgtactctacgccaaagtgcagcccttcctcctgaagcctctgccctgcctccctttctgggagggcggggtgggggtgactgaatttgggcctcttgtacagttaactctcccaggtggattttgtggaggtgagaaaaggggcattgagactataaagcagtagacaatccccacataccatctgtagagttggaactgcattcttttaaagttttatatgcatatattttagggctgtagacttactttcctattttcttttccattgcttattcttgagcacaaaatgataatcaattattacatttatacatcacctttttgacttttccaagcccttttacagctcttggcattttcctcgcctaggcctgtgaggtaactgggatcgcaccttttataccagagacctgaggcagatgaaatttatttccatctaggactagaaaaacttgggtctcttaccgcgagactgagaggcagaagtcagcccgaatgcctgtcagtttcatggaggggaaacgcaaaacctgcagttcctgagtaccttctacaggcccggcccagcctaggcccggggtggccacaccacagcaagccggccccccctcttttggccttgtggataagggagagttgaccgttttcatcctggcctccttttgctgtttggatgtttccacgggtctcacttataccaaagggaaaactcttcattaaagtccgtatttcttctacctctgcctcttaacccttctgggaagcctattgtgtacgccgcgggccctcagcggcagacggggaggcgggaggtcgcggccgcccagggaagctgggggtctgcagagtttgggtgcggcagagtggggcgtttcgcgccaccgtccccatggggatgtcgtgtccgcagagggggctggctccgggtgggtcgaggcgggagccgggcctgcccggcgccccagcaccggcccccgggctacctgggcctcccgggtgcgccttcggctcgcgcgcgcccctccgcggcggctccaccgcccgggatggtacggtccggcagccgggccgcgcgctgccgcccctcggtgagctggtgtgggccgccgctagcggagacgaccctttccactcgcgtggtgccgtggtaagcctcgtccctcgcccgccgcctgttttcaggcgtagcgtctcgtccggtccttgctccccctccccgcagcgctcagtggtggtggccgcgacgagttccggttccggttgctgccgccgctggcgggcggcgagtctggagagagcgcgcagtttgcgcggcggctcggcgcttccctgtcgtcgcactttgtggttgctgcagctcgggggcctgggctgcccctgacaccccttctgggcgatggtgcagcccaagggcgcctccatcccccgccgctgccgctaacccgggtcccccactccatggccgcctcggcgccgcccccaccggacaagctggagggaggtggcggccccgcaccgccccctgcgccgcccagcaccgggaggaagcagggcaaggccggtgagcgcgctgcgaggggcgggggctgaagaggcccaggacttgggaacctcagaggggagggatggtgggcggggggtgtttcacagtctgaaggcttgaagggaggctcaggtgaaaaggatgggtgggtgtaatcctccaggggttgggggcaggtgtcacacattgaggactctagggtttggagccacatggaattcagtactcacttggagcttgaggatatcgaaagatgggatatctttcatttaaaggaagacgtagctgagagtatgatcatcttcacaatctatttttcatattgcaccccttgttagcatttgttgaataaataagcaagtatgtattgacgttaaaggagttcctcagagcatggctgagagaaaagaggttggggaaacctcagggaaacttgtctgcgtcttccttttgccgctcttccaggtctgcaaatgaagagtccagaaaagaagcgaaggaagtcaaatactcaggtgaatggtggttggtggtgggtttggttcccagcagccccttggcggcacactgtctactctgccattccagtatctgtttgtatcttgtatcagctgcagggaggagagagaaaactgtctttcttgctttgcttcttgttctttcgctgaaccttataacaagtttaggggaaagtatcctctcctaagagatgattcgaccaaagttcttaccacgcagggttccagtctcctccatgtttcctgtcctggtttcctcctgatgataacgtaacacctaccacttactg

SEQ ID NO: 4615 - DNA, 6000 bp, Homo sapiens
ctagcccataaagcaaatttcaacatatttcaaaagactgaaatcacaaaatatgttctcagaccacagtggaattaaactagagattaatatcaacaaaaatgaaaatctctattaggaaaagaaacaatacacttcaaaacaacccattggccagaaggaacaccctaatggaaattaataatattcttaacaaaatgatcatagagatatgacatatcaaaacttacacattgcagtcacacttagacaaaactgtatagcatattggaaaataaaagattaaaaaatcaaagacctaagtatccctgtaagaagtttttaaaaagcaagttaacttttaaaaggtaaaatgaagtaaatattaaagaaaagaggagaaattaatgaaatagaaaatgaacatacaatacagaaaaatcaacaaagccaaaaggttctttgaaaaggctaattcaattgatgattccctctagagactgatcaagaataaaagaatgactaagagaagacagttatcaatattatgagtgaaaaaataaaaaacattactacagatctcaaatatattaaaaaataaatgaggacattgtaaataatgttgtgccaatagacttggaaatattgataagcaaattcctaaaaatatacaacatatcaaaactggcacaagaagaaataaagtatctgaataatctcatatcagttttaaaaatcaaatctgtaatttgccctcctccagagaaagttccaagcctaagtacttttttttaattattattatactttaagttttagggtacatgtgcacattgtgcgggttagttacatatgtatacatgtgccatgctggtgctctgcacccactaactcgtcatctagcattaggtatatctcccaatgctatccctcccccctccccccaccccacaacagtccccagagtgtgatgttccccttcctgtgtccatgtgttctcattgttcaattcccacctatgagtgagaatatgtggtgtttggttttttgttcttgccatagtttactgagaatgatgatttccaatttcatccgtgtccctacaaaggacatgaactcattttttatggctgcatagtattccatggtgtacacgtgccacattttcttaatccagtctatcattgttggacatttgggttggttccaagtctttgctattgtgaataatgccgcagtaaacatacgtgtgcatgtgcctttatagcagcatgatttatagtcctttgggtatatacccagtaatgggatggctgggtcaaatggtatttctagttccagattcctgaggaatcgccacactgacttccacaatggttgaactagtttacactcccaccaacagtgtaaaagtgttcctatttctccacatcctctccagcacgtgttgtttcctgactttttaatgattgccattctaactggtgtgagatgatatctcattgtggttttgatttgcatttctctgatggccagtgatggtgagcattttttcataagcctaagtaagtacctttaccagtaaaatcttccaaacatttaaggaagaaataacatcagtcgtacacaaactcttcacgaaaatagaaaaagaaggagcttgcttatgagaccaatataattttgttactaaaattcatcaagaaagaaaattggtccatcttcctcatgaacacaaatgctaaaaagcacagcaaatttataagtcaaattcaagaatatataaaaaagataacacatcatggccaagttggaatgcacagttgattttacatttataatcatccatgtaattcatcatattaacaataaaagtaaataatcatatgatcatattaatagaggcaataaaggtatttactgaaacagcatccattatttaggaaaaaaggaaaatttcttagcaaattagaaatataaggaaaggtatttaatctgatacatagtattcaccaaaaaaaattacagaaaatattatatttaatattgaaatattaagagctttttctgtgagactaagacaggacacctgatattaccacttctctttagtatcatgtttgagttcctagtcagtgcaataagtgagagaaaaggaagtttaagtattaaaaataatgaataaaactatcattatatgattgtgtttgcatgaaatctaaaataacctaaagataaactattaaaattaataagtaaattccgcaattttagtagatattaaaaggtcagtaaggccgggcatggtggctcacgcttgtaatcctagcacttttggaggccaaggcgggcagataacttgaggtcaggagtttgagaccagcctggccaacatggtgaaacctcatctctactaaaaatacaaaaattagctgggcatggtggcagacacctataatcccagctacttgggacgctaaggcaggagaatcgcttgaacctgggaggtggaggttgcaatgagccaagatcgcaccagtgcactccagcctgggggacaagagcaaaactctgtctcaaaaaaataaaaataatggtcagtaaaacaaaaaagtattatatttctatataccaatatacatttagaaaaaaatctaatgatgtcacttacaatatcataaaaaacatatcaataacctaaggataaacctaccaaaagatatactttccagaggcaaagctatagaaaattactgaaagaatgtcaagttaacctaaataaatgaggggatattgtatgtttatggattgggagactaaatcttttctaatttatacaaattaacttataaatccaatgcaatcccagttattaaaaatctactaggcttttggggagagaggggacaggaattgacaaggtgatttttaaatgtatagaaaaattcaaaaagccaaaaatagccataacaattttgaagaagaacagcattttatgacttaaactatcagttaataagagttattataaagccacaataattagaagagtgtggtattggcatgaggatagacaaaatagactaatggacaagaaaggagtttccaaaaatagacctacatggctttttgttttataacaaaggtgaaattgcactgtactgtggaaaaaatcaactttcaataaatagggcaggataaattatctgtatttaagttaaaagtgaatataaacactcaaactgtacacaaaaatcaattgcaatgctcttataaatataaaataaatggtaaaaaataaagtttctagaagataacctgggagagtatctttatgatcttggagtagactaactttcttagaagggatgcaaaaatctctaaccacaaaggagaagactgataaactggactatgtcaaagttagaatggttgttcatcaaaaggcactatcaatgagcaaagaagcaagccacagattgaaggaagacatttgcaatacatatatccaacaaaaggtttatattcagggtttaaaataactacaaaacaggaaaagaaagactgaaagttaagagaaaaatgaggaaatatttgaacagagattgcacataaaaaggatatctacatcaccaattagactatgaaaaaatgctcattctcaaattcaccagagacatacaaattaaaaccacattgagataattctagcagaacggccagattttactagatgacaataccaatatcagcaagaattttagaacaatgataactctcatacattggttggtgggtgtggtgggaattggcacaaccactttggaaaataatttggtaatacttcctaaactgaatatatgcataccttatgagccaggacttccactcccagatatatacccaacagaattatgtgcgcatatgccccaataaatgtatacaagaatgttcatagcagcactatttgttttagcaccaaaagtaggtaaagattctgtgttccctttgaagttctcctcttaatctctattcacccctgtaacccctgtatggttttcttgcctcagggtgcagtgggtcagatgtgacataatatacctaaggtgatgtgcatttgtagatataaaattaaatgcccccttaggaagaccaaggtatgggcccagagagaaagggtgagaaaatatttgaaagaaagaaactggcactcctcgtggcagctaatgtcttaggaacctctgttgaccagtataccaggatggaaacttgacttttagaaaatcataagagctatacattcacctggtaattttttaaaaaatcaaacggtacagaaatacataaaataaattgtgttcttcccacctattgctcctcaaacataatcaatatttttgtgtgtactttccaggaaaagaagaaagtatacttaaaagagttgatgtacacatatatcctattttttatatttacccaatgggataatactacaaaaccaatctatatctcacttttattctcttcacatcaaacaaggtggtcttcccttcttggcatgttcagatttaccttattctttaatgattgcttgtcaccatacggatgaatcagaatattcttaaacagtccccatatcatggttttttgttttgtttccagtgtttaggcaataatgaatgctacaataaacgttcttatagtactctcttcagatacttccttcagggtaatttcccaatagcaaaaatgtagggtcaagggtatttgattttttaaaaccttaacttttttttttctttgatcatcgggtaggaaactgtgattagcagctgaagacgggtactcccacttccttttttcaattcactaatgcattctgctctttttgagagcacagcttctcagatgtgctccttggagctggtgtgcagtgtcctgactgtaagatcaagtccaaacctgttttggaattgaggaaacttctcttttgatctcagcccttggtggtccaggtcttcatgctgctgtgggtgatattactggtcctgggtgagtaaaagggctcaccatgggccctgggtgggatcgggacagcttctctctccaccgcaggcctggtcctttcttggggctcagcccctgctgagagactctctcctacattaggagactgtatttttgaactttactctgtagctcagggctttctcttgaggctgaagaaaatggccacagctggaaggaattttcaatcttacagagtaggaaaccacaataaccacaacaattaaaatttcatttatttttttctttaaaaagtacttcttaaagtccagagaatgtttcatgtttgtttgttcatattgtcttactcatagaagagcccactctcctctctgcagaggagatgtatttattccttgtatgacaaggccagatcctggtccccagcataagaggcaaggtttctaacgggaaagacaggtctttctcttgtacataattgcaaaccactgcagcaattggctgattaagaacatggggtggaggaggtcgcagaggcgtaggtggacaaagcaaggataaatctaaagcatatgactttctctttgtccctgtgggtgtacgtaagtctctatcaactcatatgtgcgaactggttgatttttactaaaggttaaatattataattaaatatgtttatttatttgttcagcaaatgtgtttagtaatatctatgcacaggtgctgagcaattagagtccataggagacactacgtctatgttctggaaagtcatgacatagaagggctcccagcaaggccaatgtactttcaagcagctatgcaacaagctcccagttaaataattgtccaggcaaagttaccaatgaatgctgtaggcagataataaactgtattcaaaatagctagtaaagacttcatgaaacttagaggtgagtaggagctagaggagcagaaatggagcaggcgtgatataagaaaagaggacctcac

SEQ ID NO: 4616 - DNA, 6000 bp, Homo sapiens
aaaaaaaaagttataaattaatctaataagctaataagatgtgttttattctcctactttgacaaatataccttcataatgacctagaagtctgggttcaaatataacattttaagataatgggaattttatactagaacaaggtatgacaaggaaagcaggctctggtctcctgtttcaagcttacagcttcctacttttattcctgctcgcagctccatcccatagtacaatacattggaacgagccagcccgcacatccaagcttctgacacatccctcaagcagcactgccttggccaaccctcaggaaaaactgaccaaatatagctaaatgttaataactgataactctcagtgaagagcaggtaagtatttattgtactattcttgccatttttttgaaaggtttaaaattttttgaaataaaaatattggggaaatgaaagttttcttgttaacgtctccaagtaacaaaatggatttgccttcagctacatagcttgtaagtgatgaagcaaaaccatagccaggccttagagttcaaatctggtgtccatttcacaccctctactacataactgtggatctgtgaatctggaatagagggcactaacaacctgcgattctgttctcactttggacaagtttttgagcaaaaagatctgtatgttcatgaagatagaagagtctcgacttagaacaagaaatcatctcggaaacgtctctaaaacaaaaggagattatattttaccactgaaggctagaaatattattatctgtagtcatggaaaataaaatgcggcttctagatggcaccagcctacaaataaatgtaattgagcttcttcactgccttttctttgaagttcaaagttgattactccaagcggctgttcctccattactaacaaatggctatagaaatcattacgtatacagccactgatttgggagaagagtcttttaatagcaagaacaacaaatttatctttccagtatttttcccacccataaagcactgacaagaccacagactccctgtcacatagttaaaaatgtatgattctcccgtagtagtaaagaccatactcagcactcagatcttggtttctaaatatcagtctctactgaaaggaattggggctccttgaagaagtggctgattctagagttggggcaggaaaatgtaagatgagccaggagcatctcgtagtgccagacagtacagaaatgttccaacaaggaaaatgatgagagtttctcaaaggcacaaagaagaagctgacctgaaagagctcccaatcaccaaagctggatcaatttgagcaacaaaatatataaagcattatattgttaccaaagtttaaagtaaatatacaaatctatagtgatataaataaatgattgaatggatgaatacatgaataagtaaataagaacaaggagacaaatccccctacctcacctctcaccctgactgtgggctggacttgctcccaaacgaaagaatatagaaaaagacaaacagtaattttacatcgaagaaacctggcaaacactaccttaaccaagtgatcacaatttacattaccagtgataagtcatgttgagattccatacccccaatgtgatgagaaggacactctaccgctgtagtattctttgtgaaaactcataaccccagtttaattatgaccaaaacgtcagacaaacccagattgaaagacgccgcaaactacctagccagtactcctcaaaactgtcaaggtcatgaaaaacaaggaaacactgagaaactcacagatggagaagagacgtctgtgagcaaagatagctaaatgtaatgtagtatcttagaggggatactagaagaggaaaaaggtgtcaatggaaaactgaaacaagctggataaagcctgtaattaatagtaatgtagagacggagcaaagataactaaatgtaatgtagtatcttagaagggatactagaagaggaaaaaggtatcaatggaaaaactgaaaaaagctggataaagcctgtaattaatagtaatgtagagacggagcaaagataactaaatgtaatgtagtatcttagaagggatactagaagaggaaaaaggtatcaatggaaaaactgaaaaaagctggataaagcctgtaattaatagtaatgtagcaatcttggtttcttagttttgataaatgcacccccatgatgtgaaatgataacggtaggggaaattgaaacaggtgagggcttcctatatgggaactctttgtattatccttactattttatataaatctagaattaccccaaaatgaaaatttattttttaaactgtaaaggtttaaatgtttttcaaaaaaaaattagaaaagtttaaaaatttcagtttcttacattctcattgaaaacaattatttttgtcctttgttaatataaaatctaaaagttcctggttagtcaagcaattgcttaataaatcatggtatatgtacttcctggctgatgtttcaaagtactaaccacacttctggcaccaataactaaaatatttctgtcagtgacttaaataccacaacaaaaatagtacttgactgacgtaaacttaaacatttacacagtagttgtaaataaatatgatttttgtgtttggacatcttgtataacatcataaatgtgaaattttattttgctaattgaaatctattcattcagcaaaacttatggtagaaacaagaaaacaggcaatatgatttcaacttccctcaatccttagtcagtcaataaatattggagttctaaactcatgctaaatactattttccagtgttataaggaatacaaaaatgttggtaggatattatgtcaattataaagtgctttttagttcattatacttgttacttctagtattacagaatagttctcagcatagggactaagctgagagttctatgtcattaatgtattcatacaaacatcaataacaacatccacttcagctggacattatttttatctcctttttaccagtgtgaaagaggctaagtacttgaccagagtcacccaactagcaagaggtgaagtcaagatttcatccagatgtgtgggattctgcagatcaggttcttgactgccattttatacccttgctcctcctgggacaaatgaaggcagctgaaagatgacagcacggtcacacggcaaggagacaaaggacccatgtgccgccttgacagctctatgtctttatggttccttgtgtctatgtctactctggcccttaccacattgacttttttaaagtctttaagagagatgcactttattcacctttttattcttctaaggccatggacattgtctaaaatatagttgatgttcaatacaaaccctagttagaaaataaattattacagatatatagaaaaacattatattagaaaaatacagaccactcttaatccatcctatgtctattatctattcacagatatcttgatgtgatggtgatggtcacgataactgccttccatcttagtgcatgctcatctctcagtcctagaatgatattctttcagcttggatgttacttcctcagggaagcctcttatgcatccccagaactgggtcagatttccctcttagtggactctcagaaattacatacaattcacttctatgtaatttcctgttgacttgctgtcttctccaccagaatgaaagctttccaagtcttgattaacactgtacttccagcacctggcaccatacctgaagcaccatggtgtttctttttttttgccattaacattttatatatatatatatatatatatatatatatatatatatatatacacatacatatacacaagataatagcataaaaaagttttaaagagttatacataccaaaatattatacgtaccaaaaaacgtcactacggatttttccatttttttcttaattttttttttaagttctgggatacatgagcagagtgtgcaggtttgttatgggtagggagagcattaggtgtttctcaaaacaccaaacagcatgttgcccagtgtgaaagaatccaaatggcaaaaatcaaaatttaatagaattatttaaatacccactctgacttcctgacgtgaatcgcttctcaaggctaaagccatcatattttcagaactctctagcctcttgtctttcaaggaaatcacaacttcttctctctgccaccagataccaggcatatgtatttcaatcaatatatatttgccaagacattcctgtagcaaattttggattctaggacattaagtaaaaatgttatggcctattatctaggaagagcatgatggggctataatttactcctcagcttgccttctactcagatcaaaagttgtggtttccccctggactgatgagtcaggatattttcatatatatcagacaaggtgagagttgtcttgtgattgagatgtttcatcaggtctacagacggcctgctggaggtgttccagtagaggtatcagcggtcagaggaggccttttctgtgttgaatgagaaattcttcatctctggggatattcagggacatccttagattatgtggatttcaataggcctgcaatctcacctcatctctagtagcagagagaataggttgtgatttccttgaaagacagagcctagagagttctgaaactagagtagctttagccttgagaagtgattcaccccaggatgtcacagcagtacttaattctattaaattttgatttttgtggtctggattctctcacactggtccacattgctgtttggtgttttcagaaagattcctctacttccccctttcacttcattatctcaatcagctttatgcagagaagaagcttactgagctcactgctggtgctggtgtaggcaagtgctgctttggcaatctgggctgacctggcttgtctcctcagaactccttctccaatcctggagcaggcttccatgctgctgtgggcgtccttgctggcctttggtaagtgatggggaggagacctttgcttgctgcaaagctgagcctcaccatgagcaaaagccctcttttctgctgctgcaatcatggatttttactcccattttagaacagcagaaaatgaacaaaaaggaaagataatgatttactggtagaaggggaaaatgataataattgatttccaaagatgtatttctcatctatttttgctatgaattgcctatggaaaatcattttacccccaaatggacttattttgtttatgcaaaaagaaacctatggctaggttcagtccctacgtcacagagcatgaggacccagaggaaaagatggactgagttatttgtgaaggataaagtcctgattgtgaactcaggtagaaaggatcacctgctgagaatagttatttccttctctgtattctaagttcaaacctgttctgatgtttgcaaagagcatgagaagagaagagataagatgatttccctttgatttttttcttcctgcttttgtaccacttgtcagtgtttgtccaaatgaggcacggatttcctagttgctcaaactagggaattaaagaacagtcagtcttttgttcattaaatatttattaagcgtatttgtctagttcccacctgatccccagaccccaactaagggaagacctattagtgtgattggcacatgataggaactaaggagtgagtggatgggtatacttggcatgccacactgctgggcaccacagaggatgcagagacctgaaggacacagattctgccctcaagaggtgacattctcaatagaacctcaacgtacacatgcaagaacatctgactcgacaatatgagaaaaatattacacaaatagttacaggataatgtgtgaggatgtcagttaatttgtgctaagccctggctacatcccacttttctaagggcaccccatgt

SEQ ID NO: 4617 - DNA, 6000 bp, Homo sapiens
cagcttaagaagcttttgagctgagatgatggggttatctagatataggaccacgttatctgctaacaaacatagtgtgacttactctcttcctgtttgaatacctttatttctttctcttgcctgattgccctggccagaacttccaatcctatgttgaataggagtggtaagagagggtatccttgtcttgggccggttttcaaggggaatgcttccagcttttgctcattcagtatgatattggctgtgggtttcttatgccctaggatgcaaggttcaacatatgcaaatcaataaatgtgattcatcccataaacagaactaaagacaaaagccacatgattatctcaaatgcagaaaaggccttcaataaaattcaacatctcttcatgttaaaacctctcaataaactagacattgaaggaacctatgttaaaataacattttgtgtctttcttttccattgaatctattcaaagcatcttgattttcacttcctctttgagtgaagtgctcctgacacctcagctctgaattcagtgagggacctcttatgtgacacagcatctactctctcaagtgagcagaccaacctctgcttgatatggaattgtactggcctaagaagactgtctcctagggaatattttcaccttgtacttacatttagttcagttagaaaatataactgaccaggtgtgtttcctcacacctggagccccagcactttgggaggcagaggtgggtggattgtttgagtctaggagttcaggaccagtctggggagcacagccccatctgtatatgaaagaattaaaaaattaagccacctacaataactatgtaatcatgtcagtaattgtttaaatgttttccacccttgagccaagagaatgccacatgaattcaagagtaatccatccagtttgctgcttggacctgaaagcagggtgagatttggggtgactgagacatgggaagcttttctaggcttcattctagcaatttaaaactagattctcattggtgttttgtagcatacaaggaatcttggagccaaaaatattattccagtcaccagtgcctaaaaatgctttagagatttctatttttgcccctccctccccccaaaaaaaacaaaacaaaagactatctgcttcagctatgactacctagaaaatgtgactgtgcctactgtgggcctctgttgaaccatcttgcagcccccaaagttctgttgccaggcagcacttgtgtccttccaagcacttactgcccatacgtaagcccttgccttgtctgtccctgcttacaagggcttcgcagcaatcttgaaggccctcacaagtttcttgtgccttttgcttattgacattcatgggtacagtcctgcctctatagaaacaaccactgacctatgaacaaagccaccacaagtcgtgtcacaaaaccatatgccctaagactgcaagcatcttgcccaggctcagtagttaagtataaaaggtggctcagaataggcctctacaatctggaaaatgcccgtctctcttactaaacaaatcccaaggctgagaatgacaggatctcttcccaccaaaagcctctccttgtaaatatatagctctcatacatttgttcttttgtttttagttcttttacatctaaacccatgccccaattgtttgtgtctctgaaaatttgctctggaactttagactccctcactccctccccacttaaatctccacacaggggaaggcgtatacttgttcataaacccttctgccagtagagttgcatccagggggaagagcatggagttaagtttagcatggggccaggtgcggtggctcatgcctgtaatccctgcactttgggaggccgagtgggtggatcatgaggtcaggagatcgagaccatcctggccagcatggtgaaacccagtatctactaagaatacaaaaattagctgggcgtggtggcacgtgcctatagtcccagctactcgggaggctgaggcaccagaatcgcttgaatccaggatgcagagtttgcagtgagccgagattgtgccactgcactccagcctgggcaacaaagtgagactctttctcaaaaaattatagtaataataataataagtttatcatgactcaattattcttcccaaatttactgatcacataaggcacgtcacttcttccaggatggagtgagttaaggagcagaaggaggaacaggagtaggagttgcatgcacatggaagaaaatagatgtccccccaacacaaccattcattaatatattcaggcaaatgaaaagttattctgttcaattagatttggcgtatttagcaaataaaaatatgggactcctagttacatttgtatttcagataaacagtgactactttttaaatgcaattatatcctgatatggctccatgtctccacccaaatctcatcttgaactgtactcccataactcccatgtgttgtgggagggacccagtgagaaataattgaatcctggggacagttttctccatactgttcttctggtagtgagtaaatctcacgagatctgatggtttgataaggggaaacccatttcgcttggctctcattctctctttgcctgctgccattcatgtaagatgtgacttgctcctccttgccttctgccatgattgtgaggcctccccagccatgtggaactgtaagtccaataaacctctttattttgtaaattgcccagtcttgttacgtctttatcagcagcatgaaaacgaactcatacatatcccaagtattgtatggaacataattatagtaaaaattatttgttttttatttgaaatacaaatttaaatgagacccttgcattttatctggcaatcctctactgagtgttaggcactgtgctaggtgctagaataatgtgaatatgacatagttcctgtcttcagagagagacgtagaaaaatgtaacatttttggctacagatgagcaattaaattcaaaatactcttttctgagcatatctttccaaccacaggaaacaatacttcagagtcatcaacaacatcgtcacctttgagcatgaagtatatttgaggtttattcatattttgaattagtctgaaatgacacactgaatctcgaagctatccatatcccactgaaccttccttttgttgatgagcatgctgtcctcagagaaataaaaaataagccctaaccgctcccttccctaaagatacttagatcattgaggaataccatcaaagggacaggatgtttcagttcactgtgatcggttctggagtgaaggaaatccaagtgttattgatgcacatgagaggaacacccagcccaaatgtgggaggtcagagaatacctctcagtagatgtggcaccatactctacaattacaagtttacaaagaccctgtagtgtggattaactgggtatagtttaaataaataatttaatttaatttaaataaattgatataaccaatatatcttctccagaatattggagaaatctctaaccaggaatgactaagcacacattgaaacacatccaatcctcttctattgtcatcctgttccttactgtttgttggtcgttcatttggcaagtccttattgacaaattggtatgtgacaagtgctctgttaggcattgaaacaaaatgaagaacaaaccaggcttgttcccaaaccttgtaatactatctaatgagaaaaataggcattatacaatcacataaacatatagagaatgataaaatttggtgacttccatgggagaaagaacataataatatttgttaaaaaagaggaccctctttccattacctgccaaggttgggcaccctgaggatgggacatttgatctgagatcatctcccatttctaatgtaaaggtatctgaatgatgacaactttatcctggtaggtagattcccaagaatggcttacctctaagtctaaaacacgccttcctaacagaagttatatcaccttcaaaggggcaagaattgactcttgggaagatgaaaaaaactaattttttaatgtatcaaacacagctatacatgcagcacataaacacatacatagtatatttgtggtattaaattttcatggaaaaagggggtggctaaaaacaaaattgtctaaaaaagatccttaggggagcaataacgaaaaaatggttgagaaacactggttcagagtttttattcaatagtccctcaaataatacttactaaaggaatgctttcaagaaagaacagttagaggtgcgggggatataaggggtaagaaaaggggcccttaaatgttagtgggaaagaagacacgaaagcaaacaaggaaatagagaaaataattgcaaattgttataaacactgtgaaaaaaacacaaaggacctgaaacaaaataatggggtggaacctctttgattgcaaagccctttctgagaagggctttggctttaaaaacggtggtacgcttgctgatttatctcctaatttgcagatctgggtgagattacgggaagtccttgatctgtacatttgtattattttcctgttcagaagcctcataacaacttatgtgaaagtcaaaaaggcatatgcttgacaccttgactgtgtgattcacaccacgctcattaagcttgcctacattaggagctgcatgcagaaccaaaggctgtgtgaagacaaggtagtgaaggggtttcccatatgaaaaatacagaaagaattatttgaatactagcaaatacacaacttgatatttctagagaacccaggcacagtcttggagacattactcctgagagactgcagctgatggaagatgagccccaacttctaaaaatgtatcactaccgggattgagatacaaacagcatttaggaaggtagccacattcacattttcagagcccaaagcaaaatatgacactaagctcttcttcccttttctgattcttgcaggtctcatctgagtagcagcttcctgccctccttcttggagataagtcgggcttttggtgagacagactttcccaaccctctgcccggccggtgcccatgcttctgtggctgctgctgctgatcctgagtgagtagatgggctataatggggccacggcctcagttcctaaaggtgaccagggaaaaactcaaggagcttctatctctgcttctacttggggttcagagacagatagcaagggatgggaagtgagcagagctgggttccctggacaaccaagaggctccaaatgcaaccatcagagcaagccagatatcctgaccttggtttctcacccactgcttttctcacctcataggaaacttggatttttccttctgccaaaccacaactctatatcccaccctccctcttaagcctcagactaaataatttttcagatgagcagttacttctaaaaacctaggcacgtgaaggaaggtttactgagaaacatcactgttttctagaagttttaagccaaaatttaatcagagattgaaaaagtgaggggaacaataggagcccaaggaacgaaaggaggataaaccatttctgtaagtccttgtctgcctctgcactcagagaagagaaggagagaataaagtgtgccgtggccaagtaaataatagcagagatgaggtcaggccttggacataagccatcacgtttgtaaaatacattatatgacattttctttgttgtttaggggctctggatgatataaaaagggagcaaagaaatgataaggaaaaacaaaagaagtggttgtggttaggttgttagaaaatgtttcggagagtgtctgattgtcattttctgctccctcacagctcctggaagagaacaatcaggtaagtttctccttctctctgcccctctggtctctggatattggtcccctcagcccacacagcctgccctaacccttgcaggc

SEQ ID NO: 4618 - DNA, 6000 bp, Homo sapiens
ctccgcctagaaaaatagtaagttaaaagcaagactgcattcttggaagaattgcggagattagtgacacaattaaggatgcaggggtagtgattcctacaacaattctatttagctcacctatttggcctgtgcagaagacagatgggtcctggagaattccagtggattatcataagcttaaccatgaggagacatgaattgcagctgctgtaccagatgtggtttcattgcttaagcaaattaacacatcccctcatacctggtatatagctactgatctggaaaatgcccttttctccatctctgtcaataaagctcaccagaaacattttgctttcagctggaaggctagcactacactttcactgtcctaccttaggagcatttcagttttccagccctatatcatgacgtacttcacagagattttgagtgtctgtctcttccacaagatataacactggtccattacattgatgacattatgctgattgaatctagtgtgcgagaagtagcagctgctctagacttattggtaaggcatttttgtttcagaggatgggaaataaatcggaaaataatttaggggccctgtacctcagtgatactacatgaagaggtggttaaaatatccacaatctccattcctgctacactgccgtctctctcccagcctgcacctgtggcttcatggggagttccctccaatcagttgacagaggaggagaagactctctggcctgatttatagacggttctatgtaatatgcagtcaccacatgaaagtggacggctgcagcaccttcctgagacattcctagaagacagtggtgaaaaaaaatcttcagtcagcagaccttaaagcagtgcacctggttgtgcacttttgcttggaaggagagatgacctgaagtgcaattctatacagattcatggactgtgggcaatagtttggctggatggtcagagacttgaaagaaagatgactggaaaattggtgaataaggaaatttggggaaggggtatgtagatagacctctttgaatgagcaaaatgaatgtgaagatatttgggttccatgtaaatgctcaacaaagggtgacctcagcagaggaggactttaataatcaagtggataaaatgacccattctgtggaagtgggtcagcccacttccccagccacccgtgttgtggcccagtgggctcatgaacaaagtggccatggtggaaagatggagttaatgcaggggctcagcatcatgaacttgcactctccaagggcaacctggctacagctgccttggagtgcctaatatgccagcagtggagaccacgctgagtccctaatatgacactacttcccagagtaatcagccagctaccaggtggcaggttgattaaaaggggccacttccatcatggaagcggtagtgttttgtccttactggaatagacacttactctggatatagatttgtctttactacacacaatgttgtctctattaaagataataattaaaaaattagccaggtatgatagtgcgctcctgtagtcccagccactcagaaggctaaggcaggaggattgcttgagcttgggaggttgaggctgtagaaagacatgatcataccactgcactccagcctgggtcacaaagtgagaccttatctcaaaaaaaaaaaaaaaaaaaaaaagcattaaccatgcaagaaaaaaaagataaattgggcttcaccaaaattagataattctgatctcttttttgtttttgttttttgacaaaaattggacaagcagccttatgaataaataggaaaataacaggaagagacatttcaaggaagaaaatatacaaagggctaataaacacatgagaaatgtttagcttcattggccgccaagaaatgcaaattaaactcataagatatctctacacatgcattgaattggctttaaaaaaggagttggagaggatatggagaaactggaattcagactgctggtgggaatgtaaaatagtaaaaatcaagtagggaagtaatttaagtttcctgaaaacataagcatattctcattcaataattccaccctggaatagtcacccaaaattttgtacatgaatgtttatagcagctttattcatactacatggatgaatctcaaaaatattatgcaaaaggaaagaacttagaaacaaaagagtaaatattatatgtttcaatttgtaggaaattctagaaaaggcaaatcaaatctatagaaagcagatggagagttacctggttctgggaggtttggggtgactgggaaggcacacaaggaaacccattgagatgatggaaatgttctagatcatgacagtgattgcttttacatcagtgtgtatgtttgtcaaaaatcattgaatcatatacttatgatgggttcatttcaatgtatattaattataactcgataagctgatttttaagaaagagaactataaacaaaatattcagagtggtaattacttctggagagtacacgaggagtgggttagaaaaggcacactcaagtagatgtaatagtatcatgttatgttcaagttctttttttttttttttttttttttttttttttttgagacggagtctcgctctgtcacccaggctggagtgcagtggcgcgatctcggctcactgcaagctccgcctcccgggttcacgccattctcctgcctcagcctcccgcgcagctgggactacaggcgcccgccaccacgcccggctaattttttgtgttttttagtagagacggggtttcactgtgttagccaggatggtctcgatctcctgacctcgtgatccgcccgccttatgttcaagttcttaaaacagtctggggataggctcatggcttttcatttcatcgtagtatttcataatttatattcatgttacttttttgtatgcatgcatgaactatcacattataaaaataaaagtgtgagagagcttaacaaataaaatgttatagcctttatatctgtggaggaggaaacacattttaatctgaacatcttgtgaaggcactggagcaggacacacaggaagagatgtgatgagaatcaacctaagaccccaacaacagatgaatccataaagaaaatgtggtgtatatatacaacggaataccattcagccatacaaaatgaaatcctgtcatttgtgacaacatgatgaagctggaggacatcatgttaagtgaaccaagccagacacagaaagacaaataccacatgaacttacttatatgtggaatctgaaaaaaataagaagttgatattatggaagtatagcatagaatagcatctatcagagactgaggagggaatgaggagggaagagagggaaagattggtcaacaggtacaaggtgccaattcgataggaggaataaggtttggtgttttattgcacagtagggtaactatggttactagtaaggtattatatattacaaaatagctaggaaagaggcttttgaatgttctcaccacatagaaatgaaaactgcacgagacaatggatatgccaaccaccctgatttgatcatcactgtacaacatatatatgtattatattgcaatgtcaaactgtgccccataaatatgtacaattacaatgtgtcaattaaaacattaaaaaaaccaacagattaaaagaaaaagagagagatgaaacagcagagtgtatgcaaaaacagctttacaccctggatttaaagggctctacattctcattcaggagatttttttgcattggtcctgaaactttacactaaacaagcttatccccacacaggctttcctaagccaataaataaagctatggaatacctattcgttttcagcactttcgctgttagcctggttaccaacattgctcccttttccctctggttttgcgtatcactgaatagtttcttttctcagtcatactcattgagctggatacctggacttagacatcattgcctgacagcatctttcccctaataggttactttccacacattctagttattcttaatcctagacactcacggatttaagaaatgttgaaaattaagatagcttattctcctccaatccctaatctaggcttcacttgcctagaactggtatccctaatgtgctaaaggtagcaatgggagagattataggtgccctgattttgagggaaaagaggggcaattttacaaatgccagagttagtactaatggtgaacccttctcaagtgccctgaagctaatttgcatatacttcttttctgtatttcattttcaaatatcccccagattgtaatttgccgtgattttatttttcagtgatttcatgctcatttactggtacactgaaagtttgaatatcaaagcgtatatctgtatgaataggttgaccctgtacataagtcatcatatgcagcaagggtcagacactacacataaccggggtgacagccccatcagtccctgatttaatgacatgtttgcataatatgactatactagagaaagtttgcatagtgggactatattgctgagcaagaagaatgtgccaattagaaacaatccaggagacatccctatcaaaggtgaaaagtattgtagatgtatcaaagatgaatttcagcaggaccataacctgatgagactcatcaaagtaggaaactgcctttagaaaacttcctttgaaatacctgaattcttgaaaaagtccctcaaatattgatgtgtactatctgcagcttgtggaactgaatcaaactatatttaaaaaggagcatctttaattttctcagacttcatagaaaaggaaatggagactggtcactagagggttcttcttccttctacttctgctgaagggtaacttccgatatcaacttcctcaaacctctgatgagctgctgctgctcgactctgaggtgcattctttttttgatgagaggcatctctaggtaccatccctgacctggtcctcatgctgccgaggctgttgctgttgatctgtggtgagttgggcaactcagagcagggcatgggatgcaatcatgcttgggctctgcttcctgaagggctgtaaggacttcttaggactaaggttctgtcaggtaatgctcaggggtgctcagatctccacttccacggagggctcagagtcaggcaaaaagttgtagatatttcaaaaagccagagttttcaagaaaactatcatttcagtttttatctcataggaagtgttcactgtctgtcttcctttccatcaataattgtctttgttctcagtgttttcaacagctgccaaaagaaaaatctgtataataaataggcctctgaattccttgcccttcttactaccaacgttatttccttttatccctctctgactccccattcccacagtcaaaccttagaacttatcatcactcctttgttttcagcatacatcccccacccccactaagttgtgtttctagctcactttctcctgcactctatttccaacatgacttcaattaccccagggctacttttccattatcagtaactacacttcatgtgctcacttctcatggtgctcagctcagattctgcagctcaccaccacaacactccctcgagcacaccttcatctctcttcccccatagcactctcctggtttacacgcccttctgcatgcttcactcctggacataaacagctgaatgggatttttttttaaatgcacaaccctgatgacttatccccttttaagtgtaggacccccaaatctcaggtagccaacagcaatgccaggcaattatcctacatgttcacagtccatgttgctccattatcactattgcataccttatcctgtcacctcatacttctctgttcactctcattgtgtaatcttgcttcatatttcattgagaaaataaaagcagtcagaagaaaactctctcat

SEQ ID NO: 4619 - DNA, 6000 bp, Homo sapiens
gaagccagcttgtgggggcagctgcatgcgagccacacaatcacataagaggaagcacacacagtacgcaatgctgtgtagtcaagaaagactcacaatgtcctacagatacctgtggccatagtcccaggcacacaccatcactcactatcacacacgaacacagccaggctcctggtcacagctgtccactgtcatgcacaagcacacactgtcacttttaagcacttacatagctcacatggtcacacatcactatacaaaaccacacagaggcatacagccacagactcacactgtcatacacagacacacatagacacacttagtctttggcttctcaggctggagaggagtcccagaagccattgtaaccaccccgctgcctctggacaggaggacttcactcagcccagacagagcccacataggtgacatttaatcagccaggctcttctatcagagcatttaacaactctgtgtgtaccacatgccttcacacacacaaacacatccacactatcatataaatatataagcagacacgctacgtggtcatgtacatgaatatcctcacagtacacataagcagccacaaatactcataagcatacaatgtacatacgtgtacatattcatacatgcatacacataatcatatatacatacaagcatacataacagctacatatataacagctatatgtatagctgttatatgcctgtgacaattcatgcacacacacatacacacccactacgagcagccctcctttttatgaaagcactgctgacctctgggtgccgtggacagagaatatgaagggaagggctgacactgactcctcctgaagccctgcttctgctcctaccaccccatcttctctgccctccccctagcactgctgtctgctgtgcggatcaacggggatggacaggaggtcctgtacctggcagaaggtgataatgtgaggctgggctgcccctacgtcctggaccctgaggactatggtcccaatgggctggacatcgagtggatgcaggtcaactcagaccccgcccaccaccgagagaacgtggtgagtgctgggcacaggggtctccttcctctaggcttcatgatgtctacctgttggacagccaacatcccaaagggagaagactgaccttgaacctcccccaaggcctttcagggaatgaggcaatggggatgagagctctgcaattgtgaattaagctagccagtcagtctacctcctcccatcccattctaaaaggaagataagttgtagtctttgccttcaaaaagttcccagtctgaccatatatctttccaagtgcttgatctcacctgatctcaccagttctgtaagaggtcagtggctcaggcatcattattctcattttttcagctgagaaaagagtctcagagaagttcagtgaattgcccaaagcagccaatccacatggcccttcttggctctgcctgtttcaccacctgttttcctctcctcttcacagttccttagttaccaggacaagaggatcaaccatggcagccttccccatctgcagcagagggtccgctttgcagcctcagacccaagccagtacgatgcctccatcaacctcatgaacctgcaggtatctgatacagccacttatgagtgccgggtgaagaagaccaccatggccacccggaaggtcattgtcactgtccaaggtatggccagactcctctaagctcctctccccctggcttaagagccaagggcagcttggccactttgagcctggctctgtctcttggctgggccctggcttacaattgtctgcctccttgcagcacgacctgcagtgcccatgtgctggacagagggccacatgacatatggcaacgatgtggtgctgaagtgctatgccagtgggggctcccagcccctctcctacaagtgggccaagatcagtgggcaccattacccctatcgagctgggtcttacacctcccagcacagctaccactcagagctgtcctaccaggagtccttccacagctccataaaccaaggtgagagggccctggatgagggcagtcgggggtgagtggaagatcagggactctgggacctgttggggtttccttgggttatcagtgccatcaaatcaaacctggaatccctgtgggagaccctccctctgggcctgccccagcagctgctatttttttttttttttttgagacagagtttcgctcttgttgcccaagctggagggcaatggcatgatctcggctcactgcaacctctgcctcccgggttcaagcgattctcctgcctctgcctcccgagtagctgggattacaggcatgcaccaccgcacctggctaattttttgtatttttagtagaaacggggttttaccatgttagccaggctggtctcaaactcctgacctcaggcgatccgcccgccttggcctcccaaagcgctaggattacaggcgtgagccaccgtgcctggcccagcagctgctattgagagcagatgataaggcaaatgtggagagtcagtcaaaagtactatggcgaatttggagggagcctggtctcagacagagctgggcttgaatcctggctgggacactgactggctccaagtttaaggcaagtggcttaccctccctgtgccttaatttcttcatatatggaaagggaatactaacatatacctttcatgggcatgcaaggattaaatgggggaggtgtgtaaagctcctagtacatagagaagctgaaaatattcagtcaaacaaagaataatagagctaggagggaccttagagttcctcttcccctggcttctcctgtcctcactgtacaaaggaggagaccaaggctcagagagcgtacatatttccctaaggtcagagtgaattaatggtgtccctgtcttgctgctgggagagaggtcctttcttgcatctctttcacagcagggggaaggtgactcacctggagagtggagtgtgtgtgtgtgtgtgtgggtgtgggtgtacacacatgcataagccttcccttcttctagagtgggtgtcccatcccccaccccacagggactgaggttggggtgggagctctcagagaccaggcctctctccacttcactttcaggcctgaacaatggggacctggtgttgaaggatatctccagagcagatgatgggctgtatcagtgcacagtggccaacaacgtgggctacagtgtttgtgtggtggaggtgaaggtctcaggtaggtgcagcagtcttgagggctgggtggttgggagggttgaactggaggaggctgggctctggtttggagcctcagctgcttctgcctttccactgccatccatttgccagtgggggctcccagcccctttcctacaagtgggccaagatcagtgggtacgatcttgaccctattgagctgggtcaagctcgcccagcacagcttccactctgagctctagagcccagagcagctggaagccctgggagaagcatgctgacacgaggggttaacttgcatctccccatatcttccccactgggtgttccagggctaagagaccccctgggtccctctccctctttcccattaacccctgacctggcacctcctggtgctgttccctcaggcacctgccaggctgtgagaaagcctgacctgcctccacttctctccacagactcccggcgtataggcgtgatcatcggcatcgtcctgggctctctgctcgcgctgggctgcctggccgtaggcatctgggggctcgtctgctgctgctgcgggggctccggggctggcggcgcccgcggtgccttcggctacggcaacggcggcggggtcggcggaggggcctgcggcgacttggctagtgagatcaggtaaaacctgatgcatgctgcatgctgctgtgcggcagggaaccggcgccctgcccacctcactcctgcctgccaccggccggctgggccccccaccccaaccctgcccgccatcgccacggagtgctgggactgcggcatgtcgacctgccacccaactcatggctttcccctccccctgccaccccagtcttcacctctgctccctgccttccatttccctcctgcctacgcacctgtctgtcttgtctagactgtaagctcctggagggcagggcctatgttttttcacgtttcccctgtactgcgccggtaagaactctgacattattatttaagaagagctaataataagaatagtgctaataacttatattagaagcaaactagaaataaaaatagaacaagtctagtagtgctaatgattgcaatgcctcggggatggagggaaagatggagaagactgaggggcaggaggtgagaaagagagagattgctcgagcaaggtcaggattagctaaggaaagaagaagaggaaaagcaccttcttctgggcctgcgaaacatcagaaagggattgcaggggcctggagggggctgcctgcagggctctccagatacgcgtggacaagccctgtctggaggatggggatgctggctccgggaccgctgcagggtcgccgacccaggaagggtcacaaaggacagtaggtcgaggccgagggagagagacgagggcaggtggagggaggcgcgggagacaagaggttgccaagagcccccggctctgcccaggccgtgcccacgccccgctgcggagcagcccgctcacccgcccgcctgttgttttccacagagaggacgccgtggcgcccgggtgcaaggccagcgggcgcggcagccgcgtcacccacctcctggggtacccgacgcagaacgtcagccgctccctgcgccgcaagtacgcgcctcccccctgcggcggccccgaggacgtggccctggcgccctgcaccgccgccgccgcctgcgaagcgggcccctccccggtctacgtcaaggtcaagagcgcggagccggctgactgcgccgaggggccggtgcagtgcaagaacggcctcttggtgtgagcgcgcgcgccgggccgggctgcgccccagccaggaggagggcgcggggctctctgtctgcagctggggacacgtcggggctggggacgacctcgctcgccccaggctgccaggcggctgggggtgaaggcatttccctaaggaaatgcgtagggaggcagagcctcctccccaaaagtgggaaggggcgggcgagggcggaggaaggcgatcctgagccttctccgcacccccgggaccgaaggcttgggggagagggagggaggaggaggctgagtgtcctagagcggctgaggccggaggcctggtgtccccagcctaagcagagggccccgggggccgggtgggtgggggtctgtctggacgaattgttctgtgtgtgaggtctgagctctgaggcagcagtgttagcacaataaagaaacattgagacgtgagtccgaagtggctgtccgcgttccacggaggttgggcacggggtggcgaaccctgcccagggccggggagggttgcttctgtcgctcgcctcgaccacgccccctctcctccctcctgcttagatccctggcagtcagagctggaaggggccatccagggcaactcctctgaacaacatacaaagtgcagataaaaggaaaacaaagacaaaaagaattagctcagaatatctacgaccgtaaaataaactgaggaaccgacaaagtgcaatacacttgccatttctaaatattcaaagttttcacatgtcaagattttctattgagaataatgtgctctgaaggtctagggagtctttgtatgttgctgaaagctaaaaggaaaccagtccttggagcacagaaggcacaggcatccggtgagacagaaacaaggacatgtgaaaataagactacaacctcttatattaaaaaactaagtgccacagttctagggtgctggg

SEQ ID NO: 4620 - DNA, 6000 bp, Homo sapiens
gctgggactataggcacgcaccaccaagcccagctaattttttgagtttttagtagagacggggtttcaccatgttggccaggatggtctcgatctcttgacctcatgatccgcccacctcagcctcccaaagtgctgggattacaggtgtgagccaccatgcccaacccaacttataatttttaaactacagtgatgcaaaaatgatagcgtgttcggtaggacccatacttgaattttaaattttgatattttctagggctagcgactggtatattaaatgcattttcaacttatatgttcagtttgcaatgggcttatcaggacataaccccatcataaaagtcaaggagcatttgtatatttttctgtctttaagtttccatttttctcactgtgccttgagatctgtctctcactgtttcgacttttgtgtttttctctctgggttactgccctttttttcctgctgaccagagccagccatctgactttcctgcaaggagctttagaactttccagaagtggccagacttcttccctttggctgctttctagaactatagcaccagtttggggtccccgggcacagtcataaggtctcaatttttgatgaagacctgagtgagcttcaatacatagggccttttcagggagtagaatttccccacagtggggtcttagtgtcaaaataaagatatttgtcccttaacccatactgtggtcctggatttcatggtagtgtgttcatggaaacttgcgaagttcatgggttgagagcaaggaggatggggctctgcacacaactggacctaccgagaaacgggacctgaacatgtcttgcatttagctgcctcctcccctggatggcacactccagctttagggccctcgaggaacaagcaaattcagccccctgatctccaagggttgttaggcaaccaagaaatgtggttatcattaaaggatggggctgggggctgggtattggggaatcggtgggcctgcaggataggcaaagaacaacatagcacatggcaatgttttgatgtaattttctagaaaacaggaggccaccatcctaatattgagcatagtgaagttccatcaggaggggagtaaaggtgttttctaggggaagaaaagctgctggagcccctgtgttctgtatgggggtatgcccatacctcccgggatggagcaggggtgatcctagggaggagcaggaggagtgactttgaagccttggtcctggggggtgagatcaaggcccatattggtaatctttcaccacgtcatcagctccccaacacctttctgtacaaactgcggaaagtttgcaatgagcagatcaggaatagcttatcacagagacaaagctgtacagaaatggatcacaaatattttatccactctcatgcttccaactagttccactctgatttatttttcaccctcctctctccctaagcacaagggactctcccccagcctctgactcttctctgacctgggacttcactgcaggcagacaggatattactcaccaaggagctctctcatctactcctacccccaactcatcctcctgcaccccactctcactcccaccccttccaacctgggcccactccttccctcccccactcaatctgaccctcactctcactcttcttctcccccacaccaccccacccatccttgtccctctctgactcacctcaagtcccattgacacaaacaaaaatttcagcacaacccactccaaccggtttggctgaggcgtgcagcctgtcatggggacagagacaggtataagcggatgcttggatgcatgcagatcatgaagaacatccgctgctgtgcatacagagacagtcccacatatgtgcatagcatgtatgtgtacagagatacgtagggaacacatgatggtgggatatagcatgttacagttgtttctgtgtctgcctctcctgattgaaggctccttgagggcagggactatgtgttatgtgtctcggtctcctcccttgagcctgacacatagtggcactcatttaatgtctgttgaaggaatgcatgggtgcaggcgcgcacgcagcaatgtcactcagacaaacacacatgataaagacactatcatggcttgaattgttctcattcttagcgaccacaatgtgggtaggaggagggtaggagtgaggcatgtggggaatgggaattcaatatggaagggagaaccgaaccaggataccaggcattggtcttgaaaatcttcctcatccaatatttccttccagtctcaatcctagaatatgccttccccagccttcatcctaggagagggtaggaaaggcctaagtttgagggcatattctccaaaagcatggctcttgtgagacatacagggctgaggggaaggaggggacagagggacttgagataggtatttgtgaaatgaggagagagatccctaactctgtcaaaggcctggagtgggctgctggactctagtgctccctctcaggccctgtggtgcccttagcctacttcaaggctgcatcatacccatgaaaaaatgagtatagccataccctaactccacctctggacagttctgcctcctttccatgctccgtatggctagagttcagggtgagtgattaaggggcccaaccaggggttcagagacatcctgactggtagcactttcacggggtatactgtgaatggataggctgaaggagattggatatccatcttgtgaactaactgcttttccactcctgtgcctcagtttctcctgtggcttcctgtacctggaggggtgaatccgtgggaaggaaagcagctcctccgaaagcatgcgataggatccaaggtgtgataattataattataacacaggatgctccccctcccattcccgctggccctactccacccctgccacagaggatctcaaagcagcatctgggtggggctgttcccctggcacaggtggggacctgaaaaagagaaggggttggaggtggagagaaactggggaattctggcaaccggcctggcctttaagggcctctgacctgcaggaaatagcccctgaagaagaggtcactgccgtggtcatttggcatctagagccagagttggggtcatagtccagtgacaggagtaaagtccaggtcacaaccctagttcaggatagtaactcacagccagtcgggatctctgctttactgatccgacttcaccatccttttcatccggacaactcatttattcagaaattcatggcttcaccaaaatgtagtcagttcccatgaaatgctgtggcctgtcctagcatggaagactgagacaagattataaaacaagcccaactttcaaggagttcacaggctacaactcttgtcctgtcccgcaatttaatacatttactgaattcctggcacacagcaggcctcaatcgatgtttttttgacttgaagcttacaatttagttaaggagataagatgtgcacaaattatgagcacataagctataataaaaggactagcaaaggctgaggaagaatagaagaaagattaatttggggtgggaggagcagagaaggcttcacgaagatgtggcatttgaggtcagctttgaaagatgaataagagtttgacaggtagagttggtggggatggtggtggtagaaaatctacacagaacaactcttccttatggcttctttattcctcctttctgccttctccagatggaagggtcctatggcaaaactttaacctatatttttttcttctcccacgtctatctctgtatttacctggtttttgtattagccctagactgcaagtgatgttgtccctcccgttcactaaattttcagtgggctcagaatatgccctcttcctctggctatcccagggaggccaggaaggttttgtgtaatttggcggtcactttttatgcattcagaatggaaacacatggtctgacaaggatgtacttataggaatacagggctagagtacttgaaattaagattctccttgcaaagtccagacatgtggtcttgtccaatgaccttggagtaaactgggtaaaatggccatggagagggtagagaggaacctctctccattcaagttgtgctgctgcgcttttgggactcctggccaggtaacaaggtgttgaagctgagagagggccctgatagggaaaccaggaacccctacggctaattccttggccacttccttggcctcttatatatggaggtggagttagaggagttacgtaagttctttctcaggggtctttgaactacttccctacttcagggatagaggtgtctgagcaaaccatgagactaagttgtgtgtcctctggcaagtccctccccttctctgggccttggttttctcttctgaagaatgaagtatacagcgcagcactgacagactccttcctcctcagttctggccttctccgattctgtggctccaaagctgagaccctccaggagatccgggaacttgtcaaggcccccaggaggtaccaaggctagctggggtgtgggacgcttgggttcctttctacccacaagggccttgcccctttcatcctggcctggcctggtgccctgggcctcccttagtccccacccttgcctctcccttcatagccccttccacatactcgcaggtaaagcctggagctgaggatgggaccccaccgcccccacccaggtccttccctccttccctccctccctggcgcctattagctagcccaggccatgggggcggtggctgctgagtctccgtgccaggcccagcccccagagacgcacctgttctgacctgctgagcaggttcccaggtttctgccgtcgttgttggccacagcgtgggaagcagctctgggggagctcggagctcccgatcacggcttcttgggggtagctacggctgggtgtgtagaacggggccggggctggggctgggtcccctagtggagacccaagtgcgagaggcaagaactctgcagcttcctgccttctgggtcagttccttattcaagtctgcagccggctcccagggagatctcggtggaacttcagaaacgctgggcagtctgcctttcaaccatgcccctgtccctgggagccgagatgtgggggcctgaggcctggctgctgctgctgctactgctggcatcatttacaggtaggacttgcctgaaccatcaggacacttgcttctgagcccaacctggcactgacacacatgcacaaacacatagacacacacgcacgcacacacatatcctcctttctttgactctgaactgaggatccagtctctcctgcccccagcttccagcagtgcccccagaaaagccagtatagccctcccccttcttgtttcctcccagcccccaggccaggtcactatgtctgggatccctgacacctctgccaaagccttgcctaggcctgagctgtcttggggaatagacgtggtgacccagtgtagatgggcaggcaggtgggacttgtgaggatcctgttcaccccagggtttcctagaggtgccttggcctaccccctgggctctggaacggctgcctggaactggggctgactcagagctcagctggtttctgcagtcatcagggtgcaggaagcctgatgcccagagagtggatgggggatttctatttccttcttttctctccatgatgttctagagcaccaggactggggcacctgttggggactataggagagctgagaatgcccgtcactctgaccccttcctttccctgggcacaatattaggtgccagggtggtaataagggggtttagatggatgggggtctaaggaagggaaccttctagatagggtgtggtccccatttgttcatctcctgttcccccattttcttaactagatgccttgtattacttctcacctcctgtctg

SEQ ID NO: 4621 - DNA, 6000 bp, Homo sapiens
cactacctagttgtgagaccagatccaaaacccaatttgttagagtaactgtctttcattctctgatttcatagtcttaatctcaaattgcccatttgtaaaactggggtaacaaagcctgccctatttaagtctagtattggggatagcacatggaaacttaatgtactattatgtaggtaaggtattataaaaatataaaaatattaatacataatattagtatggagatatttgcatctaaattctatagctaaagtttattggccattgtcaaatgaatgagtttggtttttcatttgtatttgctgcaaaatactattttatatcaccacgggtcaaaagagaaaaaaagagcagacgtaaagctatatcctttgattaccagggtgaatattagatattattggccgaatttgtgtcaaacagccaaacatactagtcaaaatccatgctctttccacttattcaaaggcactaatggctttagtaaaagtagaacatattatttaagaggactagttaactagccttgacaagaagtaggccaagaattcttgtgaatgaattagctaattcctactgtagactttgagcatttggtctttcacttgacatcctaatgagaattcagtaacagctggagacacagttgtgactgaagtcagtggagctgtttgggaagggcttatgttagaaataccagccacttaggataacgttgttataccaataatggtcttagggaagacacaatggtgccaagaaaaaaaaaagtgggttaaaaagaaaaaaccacattcatatttgttgatctttaggcagagcttatggtttgttatggggtattaagccatatggaaggtatcataagaaaagcatactggggtaccgtttggtatattgtttttgatgtatttgactatgtcaagcatttttgatacagaaatatttgttgagcacctactgtgtgttttagcacttaggtgagaaaacaaagagacataatacattatcactatatttgaagagttaacaatcatgttatgaagataagacatattcaaaggaaagataaataaccattccttgccatttcactggggatgccacaaggccatacatactaagtgtcacctgaacacactggacaataagttttatcagacctaggttagggagacatctttttggataagtgttttcatggtgggaaatgagctggaacttgaatgataggtaagaattttagtgatgagaaaaagtaaatgggcatgaacaatgaactacgtgttagtccttttagtgttgttataaagaaatacctgaggctgggtaatttatagagagaaaaggtttaattggctgacagttctgcaagctgttaaaaaaaagcatggtgtcagtgtctgttcagctcctggtgaagcccatgaggctttcaatcatggtggaaggcaaagggagagctggtgtgtcacatggtgagagaggggtcaagagagtggagggggaggtcccaaactcttaaacaaccagatcccctgagagctaactgagcaagaactcacgcatcaccaaaaggatggcactaagacattcatgagggatccaccccatgatccaatacctcccactaggctccacctccaccattagggatcacatttcaacatgagatttggagaggaaaaacatccaaactatatcaaaccggaagttggaatgaacataccgtacccctacagtgggcaaaacagccagatcagaaggaactctcagagaaagggaggaaagaaaatcaggaaaatattaattctttgcatttgttttacaaagccattgtatagaacttcgcagtgtaaaaatgagcacgtgcccaactctcaacacatctgatccacaaaatcaaaactaaatccagaaaccttagtgaggctggcagcatggatgtttttcccagagagtgtgtatcccaagccttgtgattactgccccaaagcactttcctctacatagagctcacatgataggccgagacaccccacaaatggtgagccttttccatgccaggttaggatttggtttttcttctgtgaggaaaagaaatagacaatgtactgaacttagaaaaaggtgaagaaagagtctatctgttggtggcttaaccaacagatcatcttgacaatgaccttggacaagtctgtagactgtgatttttaaagaatggtttttgagtacttgagtacttggaaaaacccttgaaacatgggttcacacacacacaaaaaaacagtttaagtaactcatttccttctctgacatgcgtacaatagaaaactgtagattgtaagacacttgcttcagataccactatggagaaaatggacaattatggaatgggtgatgcattagtctgcgttcagttttaaagctgaagatgatattggaacccatgtagctctgctccatcattttacaaatgagaaaaaggagaggagccataaagtgacttgcttaaggttacatcctcttcctctttgacctcctcctcctccccatcatttgcctcaaattagattacatgtatcgagcatttagtatttatctggcgtatttcaagtgcttaacatgtattgactcatttaatcctcatggtaaccctataaggtaactgaggctcagggagatttactcatttgccagtatcatgaggctgtaagcagcggaacagggatttgtacccagcaatgttggcttgtgagttggtgagttggtgcttttactatacatatagcctttcaaggccatataactagtgagtagcagagcaaagtgtctaaggcactaatgaatggactttttagtgatataagatgttgtctttgctatgtctatgtcaacatttttatcaatgagtcgaataagatatgaaaaagcagttcatcagattttcagaagtcatgaaataagggtatgaataagaaatattttggacaacagaagcaggatcctaaaagatttgggatgatgaatgaagccaaaaagttttaacttcagaggaatataggaagcatttcatgtaggtcccaaaaccaattgcccaaggatgggatgaagaatatgcataagagaacacaacttaggggaggtaggggtggggagatttttatcgagttagttctacatgaattaacatgcagagctgcccacctaatgcaagtgagcaaatggtcctcctgtattctatattacttatgtccactggactctcatcccagcaacagtcaaggcagctctgggctctccaaagctctttacagtgaaggcctggatatttcttcctcctttgtgacatgcttttgctttgattccccattttggcctcctcctttgtcatcatgactttgttcctgactctggtcttttattctacgtttttgttttggcttctcctagcatttgaatcttgattttttactctgggaccctgatttgacttacctctctggctctctatgtcttatgctgcatcaggagaaaatctcttatcttttttccagcccaacagagctcagcccatgaaacggaccttcaatgggtatgttgacagcaccccatcaccgtgccaacacatataccatgaggaaaaggtttggaccatatctggagtattgcatccaagtctggccaacccccttcctcactgtgagggtatctatgtaaactgaagtacattattagaaaaaggataggttgggaatagacatgaacccttggtgatacatagaattactgaaagagccagagatgcctagggaaagggggattatgggcacagcagatcaatctcaggatttgcagaggatcccactgtgaaagacttttttgtctttcaggcttctcttgtgtggcccctgggagcagtctagcacctgtgggcagaagctgtagggaaaaggagcagattttatctctataagaaactttcttgtggtgaaaactatctagaaatggaatgagaaagtggtgagctccccattattggaggtgttcaagtataggctgagcggtgacttgtcacgaaaactgtatgacagacccaaacatcaacggggtgcttagattctttgatctcgggtcagttccacacaagacaggctctgtgttagtgaggacccagtggtgtttttgaacaggcggcaggataacaatggtatataaaataaatgcagagaaagacctccacatcaagccaacccctcctccctacctgtaagttttccacctgagtgagctctggctccagctgcacttgtcaaactcccattgttagagcacagataaatgcttccggccacccaagcaggagaggcccacctcaacttaagggctactctattttagttttccgtagctggagattgagtatcacgcttttctaatcttgtgcttctgaaagggccctgttctctcttgaaccccaccccctcctcctttcacagatcaaataccaagtacattggacagatagaagttcgaatgagaaaatgcattttaataaaatcccattgatttttgtggatgtaagtcaaggaacaggcacctaaagagtcttccatcccctgccgtctcccgcctctctcctgacctacaccgggcggtcatacatcgattggcttcctagataatagatcgtgccacccggtagggacctctggggacgcgccgggagctggaagagtcgcacgcagcagcccaaccctgagttaatcaaactagcaacaggatctcaagcagcagcgacggcggtggcaagagtagcggtgacggcggcggcggcggcggcggcagcattatgcgtgattactgacaggcaccagctgctgccgccacagccgtctcaaacgcactatgtggactctccgatctagaggcagattcctgactaatcccagagggctggcccagcctgtgctccccgggctgctaggaagcgatgaccactcttgttagcccaagttgaagaaagccgggctgtgcctgggagccgagagaggcggtaatatttagaagctgcacaggagaggaacatgaactgacgagtaaacatgtatggaaattattctcacttcatgaagtttcccgcaggctatggaggtaagtatctcccttgggcttcactgcgtggacctgtatgagagactgagaagaaattgggaaatacgaatgactggattagtattgaattaaaaggagaacatatatgtttatatgcatatatagtgtgtatatagcgtttcagcgtgtgtgtgcacgcgtgcatgagagaggagaggaggaaagaatggtctgtaggtgaggatacgtttgcatatcagaatgaggatacggggatattctaaggagagagtaaaccaacatgcttgagaatgtgtctgagacaaagatagaataagagcattgttataacccagtgtgtttgtgcgggtgtgaaaagtggaagagttaacggggaattactatgatgttcctattagccaacttgtaatgagaaaaaatgtgattaaaaaggttttgcctatcttgagggttcctgggatactttgtaacaagggcatgattgttttactcaaaagcagatttccctttaattggatttttaaaaagaaaacatagtgctttaatttgctactgtgttttccttcccctgttttctttcctttgatttgctaatagcctcttctctcctcccctgctgctgcccccaattctactgcaagagttgctgcaatcacttccactctgggggtagagatctggggatggggggttggggctcttagagaattggcaaactgaagattcaagtcaccgtgccaggcagggcagcccagtcacacttcacagaagcttccggagactaggtcctcaggctgccttaacgcccaagcacatctgtcccaaggatcccttgatttagtgacagaaacagtacag

SEQ ID NO: 4622 - DNA, 6000 bp, Homo sapiens
taataataaaataaatgcagaatcccaagcaccaccctagatttactaaatcagaagtgcattttaacaagatctccacatgattcatgagcacactgaagtttcagaagcactgttctgcaacactgccagcattatacactataggcagggaagagggcaagattgtctagaaccagggattctcaaacatgttcccttgggaatcagtattgagattcaagaaagtatgtttggttgttaaattcgataatggtgacttttcccaattcatagaaaaaaattgggttaatgggttgtatttttcatcttttcttccataatttgtcctctcttttggagctaaatattacctacctgctggtaactttagaagatgataatgagcaaacaagtagtaaagaaatacttatatttatcaatataatttttcaatataatataataaaactcaataatatgtaattctttatttttccttcaatttgtagatttttaaaattcttggatttgtgattctgattttatgttgcataacagaaaatagtcatactttctcttagtaaactgttcttaattcatatggaagaattaagtgttaatgttttatggtgttctaaaaaaatgatttccacctacatgaacaggaagatcaaggcttcagaatctctccagaaatcatcaaaccaagaggaacttgtatagaaaagtaaagttagaaagaatatttctcacctatctcgtttcctccaatgacaacattaatggataccaatataacctactgtttttttctgggtagtaaaagtatgagtggtttttactttctcttttgtgatttcctgaatgttaaaaaatgttggctgggcatgatagctcacgcctgtaatcccagtattttgggaagccaaggcaggtgtgtatcacttgagtccaggagttcgagatcagtctggacaacatggcaaaccccaaaaccctgcctctacttaatcaatcaatcaatctacagtgaacactcagtcactcaacaaatatctaacgagtacctactaagtgacaggcactattctaggtgctggagatacagcagtgaaacaaacagccagacaaaaatctcagttctgatgtcagtaacttgggtctttcttcttgggctgctcatattccttcatgatgacactttaagttttatctttggagggtaaacagctggtagccaaagatctaggaattgaatgaagagggtatccaatatccatacattcacttatctccctgtttatgcagagagctatttaaccctctctggagaataaatacttcagtcttgtttttcggagggtggggtggaagttgaagatgaggaagtgacctcaggatttaactgctcttaagcaactatacttccacaataggcagtggggggacctactgtcaccagtttctaagacttaggggattcttcaatataaggttggatctcaactttattactttgggtttaggattcaggtttcttagttaaaacttgcccatttgcttttcatcttccactttcttttttgctaccaactcctctcattatcctggctttgtgctttaaaaaatcccattactgtcattttaatggtgttctaggagggaacaaaagtagatctgtgtgttcatcttcattaattgtttaactctcgacactttcaggaaatacttttctttctttttgagacagagtctgactctgttgcccaggttggagtgcagtgtcatgatctcggctcactgcaacctccacctcctgggttcaagcaattctgctgcctcagcctccctagtagctaggactacgggtgcatgccaccacatccagctaatttttgtatttttagtagagacagggttttgccctgttggccaggctcgtctcagactcctgacctcagatgatccacccgcctcagcctcccaaagtgctgggattacaggcatgagccactgcacgtggccaggaaatacttttcttttgtttggtttttgtttttttgagacagagtctcactctgtcgccaggctggagtagagtggtgcaatctcagctcactgcaacctccgcctcccaagcctgagcgattctcctgcctcagcctcctgagtagctgggacaacaggcatgcgtcactacgtccagctaatttttgtatttttagtagagacgggatttcattatgttggccaggatggtctcgaactcttgacctcatgatccacccaccttggcctcccaaagtgctgggtttacaggtgtgagccactgtgcccagccaggaaatacttttctataccaacttaaaccctctcttcttaccgttcaaaactttattttctccatttgtcctttgaattagatatttgaagaaaatatgtattttaattggtaagttattatgatttacaaagggctcattgtcacttgcattttttaagattttaaatagcaaaaaattattgcctttctcaacagatcaaaaataggtatgagatatacttacacatattcaaaatgatgtacatagattagttcttgcagtattgtttttaatatcaaaagactgcaaaaaacctaaaggtccgccaatagaagacttgttaaataaaacatgccaatccatgtggtagtatgttacacagttaaaaagaatgaaacagacctttatgttttggtacagaagtctgcaaggccataatcaaatatgtattacgtatgctatcatttgtatttaaaatacatgcatacacatatataaatacatatataggatctatttatacatgatttatatctacaacagtggttgcctcctgggaggggaactaggtgactgggaggtgaacagaaaaactaagaaagacttagtttttccttatatatcctttgcaccatttgaattttataccacattcgtgtattacttattttgaaaataaatgcaaagtactaaggaatagtttttaaaagggtgggctttgtgatatttacctgaaataatgccctctctgattacttccacctatctaaattttgccccttcttcaagatagattccttttctggataactccagcttgagtgctcttatctgatctcctgtgctagaaattcgtgtgtgtggcaaatcattacacattgctttcttacagctcttctattttaaaaatagtatctactttgtattaaaattcccatttttaattttcatttctattttactgaacctttggggattgcatggggaatataatcttgcaaaagaagaatggctgatggaaaatacgtgaccaagtaaaaggcagaagggggagtgggtaaatgggaaggagcatgaggctccctccttgcagtcagccctcacagacatttatcaaatacagattcatttgaattagtgacccctttttataaaatgctaatgcccctggaaaggtaaggccttcacatcttacaacaattaatccaaatatcacgacatcatttggctaagaacacctgggtgttctgcgatgagaggtcaggagaagtaaaatttctgaagcaggactcacaaaaatttaaaaccaaaagggcttaaagatctgccattctaaacccttactttatagaagatgaaacggggtcttgcccgagatcacaatgcaaggtataggaagagtccagatccaaactcaaatctcctcttaatttcagtcaaggaactacatcatgtagcctatcagagaagaagtctggcctaggtaaaagacggtgtctttctatagcaagaaagatacagatgggctctgtgcctggtgaagaggggagagataattcaggaagcacaaaagaggtgacgtcaagttttgccccctttgtaattgtgtccaggagtctgtgactgtgtgtgtcaatgaaagtcctccatattagcagaaaccaagttaagataatcagaaatagtttggaaggctacaaacctcaacttccccttacccagtccggtctccctacttcaggaacccactgaagttcagcttacagctcttgttgatcctttcacacccttcctttccaagtctggagaaggaaagttggaaaaggggaacgcaatgcaaatataagagatttccctatttccagggtactttcagccgatttccagggtacttttagccgattccccagtatctactgtatccgaaacactagagagccacttagggtagccatggagatgactgtcttcagtcttgtttccttccttttctctactattaacatctttcgctacgatttcggtaaggcccccccacttctgctggcactcaggtcctgcagctcctccctctcctcagggacgctcatagagggattaggaacactttttaaaatgaagagagcgcgaaaacacaagaacgagtgagggttttctccaaaagggatcagtcccatccacagcctccccttctccagccttgaggttttggcgtttggtcccagcccggactgcaagtcccaggagaccccgcggcgagggtgtcctccagcgatccttccctcacgcttctggatagtggagagaaaggttccgatagcggcgcactgcggtttggtttgtttgcaacggcagtgacggaggttgggagccaggctgactgcaggcgggggcgtcaggaggcggattcctcctcccttcggcactggggggcggggaggagggaggccgggcctgcggccggggaccgagccgcaaagacagagcgggcagaggcgatggagggcgacggggtgccatggggcagcgagcccgtctcgggtcccggccccggcggcggcggaatgatccgcgagctgtgccggggcttcggccgctaccgccgctacctgggacggctgcgacagaacctgcgcgagacccagaagttcttccgcgacatcaagtgctcccacaaccacacttgtctctcctccctcacgggcggcggcggggccgagcgcggccctgcaggcgatgtcgccgaaaccgggctgcaggcgggtaaggagggcagcccggagggagagagggcaggagaggcaaatcggaggacggaccgcacccctgccctgcaaaacaagcccgagtcttctcgggcaggcggaaaggggcagtcgtgtcgtgtggccgggtccccgggcatgggccggccggatctgggataccttgggagggcatccttctgaggaggggaggaaggggcccgctgggggaccgggagccaggggcaaccgagggccggagttcccggagcgggaccccggggaccggggtgtgcgctgacggacctggggcgggccggcgttcggagagggtagcagttaatccgaggagtggggaaagttgctctgagttgggggcgggcgcgtgcgccgttgtgggtcagagccccagtttagagatggagcagaggcggcagcgagtcccgggagtccgaggaggccatgggactgtagtcgggtgtgtgggtttgatgatgtatgtgaaatgtgttcacaccaatcatgaggcagctctgtgaagaggggacattctctaaatagggttgggggtcgccagaggaaatcatatctgatgggtgccacggaattgccagagatgttgctcatgcttaaggtgaagaagagagggaagggatcattttggtcctgagccaatggagaactagctactcttgttctttcttgcatgattctttctaggatgtgccagaggcccccaaacacttaaaatcgtgcagtctttaatctttcctaacgtcttgcttccttttaaactgctgttggtggggaactggaggatttgttaactactgcgtctaattaggaaataactttagattggaagggagaagggactgacattccacgtagatagatatcttggggacaaaacagcaaagaagtctgtgggtttaatttagtgattctca

SEQ ID NO: 4623 - DNA, 6000 bp, Homo sapiens
acagtaaagaaccacacactcaaccaaagagtaaccccattttcagccactgtgtctgtctacctgctacaagcagattggcaaagcctcaggtacatggcatgcagccttgatttggtgaatgcattccttgctattcccttcagagaagagagttagaaaccatccgcatctatacaggcaaataacaatacatatttatagtttcgccccagggctatgttaacttccctgtcctctgtcataatatagtccaaaggaatcaacatcatctagatatcctaaaaaatgtcacattgaccccttatttgatgctttcatgctagtcaggctacatgaacaagaagtggctatattttggaggcctttgtaagacatgtggatcagaggatggaggcaaacctgtgaagattcagggacctgtcacatggtaatatttttaggagtccagtgataaagagcctgccaagaaatcccacccaaagtaaaagacaaggcattacaccttgcacctcctaccacagtgaaggaagcaacacatctgatagacctctttggttctggaggcagcatattccacagctggaaatactgctctggcccatacacctagcggcatgaaaggcttctacctttgagtggggcccagagcaggaaaagcctctgcagcaggtccaggcttagctgtaagcagccctgcactcactagtgttagaggcctaggtggtgggaaaagatgctgtgcagagcttatggcaagccctagtggaagaatcactacctagtcacgtggtcccctaagactcttttgcaaggccatggcatctgcaggggagcatcacgtgccttttgaaaaataactcctggtgtgatactgagtcctagttgagacacagtacctgaacacaggataccaaatgagtatgcatctggaactacccatcatgagctaagagttattacacccaccaagtcataaggtcaggcaattcatcatgacttataagtgctttagctgggatcaagcacaagaaactgagagtacagcaagctgcataagcaggcagcctggaccctcataataactaccactgttgcacaagtgcccctccccaggctcataagggccacagaagagcatacttgatagctaatggcagacaggtgaaaaacccaagcttggtttatagatgagttggtttggttcaactcgaaagtggatagcaggtgtactacaaggaatgatcttaaaagacagagtcaggagaaagtccatccaagggacagagcttggacagtgcacctggtcatctattttgtgtgaaaggaaaactggcctgatgttagaatacatacagagtgaaaggtgggggtagtggaacatggagggacaagggagcgggcaggaagtgtgaagatctttgtaacctgtgctaaagctcagcagagagaatccaccatggaagaaccactaactgccaagttgacagaatggattggctttctgacatcagccagcttcagccatcggccaccctggtactaatgcagtggacacattaaggaaggtgcattgtcagaaggatagaggctatgcatgggcccagcaagcagtataggctcccactaatcaacactgagttagttactgttgctatcaaacattcaacctaccagcaacagagatgaacactgagcccccgcaaatagcaccattctttgaggagacagagaccaatagcctccttagtggcaagttaacttttttggggcccctccatcctgcaaggaccagagattcattatcacaggagaatgtgtattcaaaatagcatcctaaccaaataatcttaaccagtaagaaacatattcatttccatttccagactcaagtcactccagaaagattatgctaagaggtgctgatcatgttttccaacagcaattcataccaacattctagaatgagctacagctaaagtcttaggctaatatgctcccatctatgaaataatctcctgggattctttactctgtgcttttgccaatagtctgtacatgaacttaaactgtctcagcactcaactaactgcctttggaatgcctcctgtgtttaggggttgaatattttgaactgcaagctttgctatcaggtaaatggtggttgaggttataaaagcttgctaaatgccattataaaatgattatttgtgctatacaaatactttcttccgttgtcatttggaggactgacaagtctaaagttcaccttcctttgtgagcttctaagtaagtaaccgaggacttgtacaaaggcagatgtttttaaataatgttttcttcaatacttggtattctacctgagctaggagggaaaatgtgcctttccagcagccaagaagggtagaaaaagcttacaaagtgggtacagcgagcagaaagctaccacaacatataaggaggataagtcttgactaccaaggaaagggacaggattgggtgagccacgtgggaacctaaagcacctctgtccactgctcttcattacacattagaaagcacattttggagaagaaagagatccatatggactgttttacagcacaagtagcttttctttcttgggttagctttctgtttactggtttttactctcatgtgtgtatgtttaacaaacaaagtcatttgcaaactgggggattggaggtgggagctggaggacagggaatggacaaagctcttcccagatttgatgtctggtcaaagcctgattccagagtctagggcctaaaatcaggttatagtgtcatatatatatgtaaagaagcccctggggctttgtgctggataagcaaattcaattgtacccccaagagaagcagccagtatggagttttctcctccataaagcttcagagaagggacttcatggctctgagaaagtgctctggaaactggaccagtgcattacaattaattgtactttactataatttttggtttctgtaatcaaaaagtcttcaaagtgttcagaagtaggtaaaacagaaaaatatgaccttaaggatgcaaatggcagcaacatttacaaaatagtgaaaatttgacaaatgtttacttaagaatataaatttaattcagaagtgtccctagacaaattgatgaattttttatctttcaaatgccaaaataatggaaaggaaaaggaagggagggagggagggagggaggggacacttgaatggaagaaaaccgtcgaaggcattttttttttgagagtttgatcatgataaaacacctgcttcctttgctacaagccaagctaataatattctcagctaatgtttaatgaaaattaactgcatgctaagaactttgaattatatggattatcacatttgatccacataataactttatgagataggtgctattttctcctgtttaacagattaggaaaactaggtttaaagagaaaaagtaacctgatccatgtcattttcccagtaaaaagtagaactgagatcttaactgagaggagtggggagtctgactccagaatctatgtgatcaaacatgacactatactgctccatgaggaggggaaggggagaatctggccaggcattagctacctctctaccacctacatgaaggtcactcatttctggaaaccagtctcggaaggcaaggccactgtatacagttcttcaggttgtgcactgctcaagagcaccattactaaggagataccattcacattgtagatgtattttaactaatatgagaggctatagatggaggtgaagatctggagctctagcactggaagctgctgaccaagtcgtgggagagcagcacacacagctgtgcacacagttaccagcacacactatgcacaattgtcctgtcatggccaaactccaagtaccccatagagttgtttctcttcctcttctgttgctttcagtgactcaatttctaccctcaatctgccttcaaatttggaaggggaaatgcatggagaatacatgctgccatctatggctacagcaaattacacaacaatataccaactgaatttattcttaaggaagagttgccctttctaattggtcagaggtgccgtattatcatatctatcaggggtcctagtgaaggtccctaattgcagcttgcagcaccccccatccccttgtgcccattcattgttgagtgcttcagctgtacaagccattttaatgtcagtttgagaccaacagagactggaagatcacatcttttacaaggaaaagaaaaacccataaactattttccaaagggaaatattggggtatttttcaactgtgtcatctatttgggtaagccacacttctcagtgtcctctttccatgaagatcatctcatttactgtattatgctttgtcagggacgtgaattagtaaccaccagatcatgcaactctgaagtcagtgacccaagctgcccaaagttcttctctatgagagttggaggggccaggtcagctggagggcaccagctgccagccaaatggcaggggaattcctctcctgaattttgaattttccctgccctcctgcccaagttgttgcatcacttgtccgggagatgcctgaatgggctggtaagctggggcaccctaaatagtctgagacccctgaaggggacacaagaggaggaaggatatggatcagtgttttcttttttgaagctactgttaccactcctggaaaagttcttcaggaataagtgacagtaagaatgacaagggattaggactggcttcctcttataaataataaaatccaaagagaagtgacttgaggtgagtggcagagctacgccttgcaccccgaccttccgttgctagctccagctgctttccaaaataccaccttgacttctcagtctccaggtttaaaggagagcaactagaagtcgtccaaacacctgcatctcataaggagaagaaaagtccacctggatcttgtttctggactgagatggatggagaggccacagtgaagcctggagaacaaaaggtgaaatgatgctttctcctggaggttgggatcttgcctctgaatgtggggggtgaactgcagccatagctgtcacacatgctcctcagtgcccttcccagagcaggtgggctccttcccaggaggccaggtaagggttctagagtccagaacataggggctccctctcagctccctattattctgctcacacccaccagagtgcatggttccttagaagtcctgggtaatttagaaccaaaaaaacgttagaaagagaagaaacacggagaacatgcagtcaaagctcttcttttgtagaggagaggaacagaacattggccaagttattgcagcagcctgaggctgctgcagcccctcctgagtcctggttctgtgctctctcctctatactacactgactccttcccttcttatctgctgcccaggggatgtggggaggggataggagtgaactggggctcggagggccagtaggcatctgggaagtcatgcagcaagcagcctgtgctgaagctgaggtgaggtgcatgcccttcccagcaggatgagagggacaagagagtcccctcatatggtctcatcccctaaaacgcagtgtgcagtaacagaagcctgtggccccaggctactgaattatggccccctgtctcctggagaaaggatttctgaaggtcattggcagagagggtgacttggagacattccgttgagtattatcctcccagcctccaatcaaagctgataactccctggaaacattttatctcatactcctgcttcctcattgccccacggagccggcttttctccctgaagcccagagattgctgcaccggtgacttcagaggaactggatggtatgatgcagagactttggccccaacatgtgctgcatcagcacttagtgctttagaaaaattcacccgggggagtc

SEQ ID NO: 4624 - DNA, 6000 bp, Homo sapiens
tttctataggaatattttaagcttgattatcataatattacagctgcctcaaaaggtctaaaatgggacattgaccttgaatgttttctgcatttagctcatggtgcttaacattcaggaaagaatataactgcaacttatttattaatgtataatctcaaaacgttaactattgctctgtaaatacatgccatgcagattatagaaagcttgtaggatactgtaaaatgcatttggtatcttaccagggtaagtatgatggaaatacaacctaactaaggtcagttttcccattggagctactgtagtttataatttaatttttactgacatttcaccatgtgtattattagtttgacaaaacgaaggtgaaataatcctgaattaattaaacagaaactgaattgcctctattagtttctgtctttctctgattctttttttttccccctccaactttcacaaacagtgggaaaagagtttagtgtgttatgtcggtgagacagttgctccccagagaatgggcttttttttatatataggctccataatttgggaatgggatggatttataggacaagaggtttgtcaaaaggaagggtttttattagtgcttctgtggaagcgatcactttcagcagaaatgattgcttcttgccaatcgagacaataatttaaatatcaaagcctgtgccctagaaatgaaaggcaacagaaaatgaggaatgatgaattgatagagggctggtggtaatatagtgtaaagtagtcatcctgacttcgaaagaagtctgcgtgttctcagtgggaaaggtgtgttcttaagcaggtttatagcacaaaagaaaccccaattttcagatgaggaaatgagggacagataagtgaggcaacctacccatggccacacagctcatgaggagtagaagggagcctggtgccttgcttctcattttaggttcttttcccaaggttgtcttttggagttaaagatagtagtttgtaattgtcttggtttgctttttgcaggatggtatattatactatatatgatacatttaaaacagcagggaaaatagttcaaaaagttaaacagcttttcaaagattttataatcctgaggaaagattactaggcaatttgaaaatctaaatttgttatgccttgtttagttttacatatttagtaaatgatgaatgtgtaatataaaataaaaacctgcttcaaaaatgacagtgataaacttgaacattttaatgaaggttagtcctgttaattttcagaaaagaaagataggagctaaaaatagctattaatatgcaataacagcaagactaagcatttctcatcaccttctagcaacataagaattcctagttagaatgttgcaagaaatgattctgacttaaatgtaataaaatgtctggtgtatatgactagaggaatcttcctgttgtttccacttgagctttgcttgttttcattctgttctttgaaatagaaatgaagtatattctctgcttggtgactgtgcattagttggggactgagaatgaatttgtttggatatttatgactgcattgtttaaggaagaagagattgaaactatgcatacaccaagagcctgatgcataatagactgatattaactaatttattaatattctttgtgaagcaatcatgagagatccttttgtttggttcagtttttcttgatttgggtagactccttgtggtaagattgtgaagtgtatagactgggaatatatgtgtatcctaggctgtttatctgtttgtttgtttatttgtttttccagattttttttgtaattgagattcttgaaggtttaagctcagtattactcatggcacatttatttcccatgattatccattgttttctcctgcaaggtgagaaaaatctgggaccagggaagtttcttgagatgactgagctgtgtatttgtaaaatattctggaagctgtctcacaagtttagtgaagaggatttttaaaaattttaaattggttaaactggattcaagacagtaagtacagtctttaggtccttgacttgtacaggtgatactttgatcccaaggggaaaatatccaagtctacaaacctagtacacatctggtcactcagaaagcagcgagttcagtgaacactgcaccttgcgtagatgaaatatggttagtgaaaaatcagtggggatgacactatgtatgtttgtacatgtatctctgtgagcacagaacaatgacttacgcatgagtctaaatatctttaaaaatatacaccagtgaagtcaaatggatcataatgagggcaaataagtacccaaagggaaataagaaaatgatgggaaattaaagatcacttgtacgacatttggtgacttgagatccaccggtaaatacactacaaatcttgtctttaaaaagccatttcaaaggagtaataaagaggttctgtcacagcataatgtaaagaaactgaacacagtacaggattctgcaccggtgcaaaatcggaatgcattctttgagtacattaagatgcattgagtacattaaataatttatattttttaaagaaatatccatagccaaaccaagaaggaaagtttctttcttttttgtgtgtgtgtgtatcttttttaaagtatgtgcaattgaatctattaattaccctgagaattttagtttattcagaaatcacgatagtaatcatatgaatcaaaggatgtttttctgtctttgtaatgcagtattagcttccatatttctttgagtgtattttagaaaaatcatgtttcttttgcaaaatgcctgttttatttattttttaattgtaaaatgattacgtgtcttattttagattgaatagacaattttttttttctctcagtgtctgcagaatgcttggattttcttctacatctcaaagctcttttaattcactgctcacaaccaaatttacatcttaattgcagagttcacatttaacaatatagacagcataatgctactggtaattaagcttttactacctgcttttatacagtattctgaggcacagtttttgctatgtgagttctgatctagaaactttgtatgcatttagaacacaaataaaaggaattaggcctatatcttagatatagctaaatacaaggcagtgaaattgctttcttctgtggggggaccaaatcatgtctgtcatttttatattctgaattttaatgtggctgctctattttagtgttttggttttttaaagacctagaaaatttgagagggttaagggagttgagtcctaatttagtgaatttaacatacgatgaatatctgaactaatttattttgatctcaaagattatactatttctatcatgtaggacttaagatgtaaaaggttgataagcagtagagctgaattatatcaaaattgtgggtttttcactctccataaggtagcagttatctctttgccataaatagctggtatctattccaatgtacatttgctagtataaaaaaatcctgtagattaaaataggacctaagcaaactctttgttatatggaaattaaagacacggtgtacacaattgaaggaggaaaaaacacacttgtcctcttatatcctccttttatttttatttttttgaacacttttgattgagaattcttagttttgtaaattattatctgtttgaaactagttcttatagtgaccagactgtgtgatggtttataaaatgtttctgggttgatttttttaaagcatatagggtgccttatgtatagaaacaaatgtgtacactgtgttttatttgaaagcaggatgttttgggtaaaatcatatataaaattatatgcctcctagtttggaagcttgtattgaaatatatacatataattaagaatacttttagtgcactgtttagtaatgctctccctacaaaaaaaaaaaaaaatgctgtctttattttgtcaaaatgcatcgagagagatttaattcgctatttacccccacagccctcagactccccacccctaaaactgaagaagccaatttgtcctgcggctgtttaccgttgttttgaaaagctatgcgttgtatctatatgtaaagagacagtcgcaggtatagaaaggtttacacatataatttacttaggcattctttcaaattgtattgtcactatctcctcttctgtagttgtgtaaaactgcattccacctcagagatgacgatcccagttcacatgctcaaacaatttagaagaatgcctttattattattatttttaatgcccagcatacatcaggaaaacaggaaaagacatgattaggaatacatgagaaagtacagcaccaaataagccgcggcccccggtgtaataaaaacacagacaacggcaggacaaacttaattctctaccttccgcagaatcctttcccaaattaactgagagtctgcgtgagttctccttttcaaggcaaaagagatcttaggttagaaatcaaaggcaaatccctccagtgcttagagagttaagttagttatgtttcttttgtagcttcccagaagaaaaaaaaaagaaagagagagaagggaggaaaaaaaatcaaacccgagagtgtgtattgggagcgtttcaatcgctcccttctccgctccctttttctctgcccactctcagtttccagcccccttcggctctctgcaccctgcctacctgcctggctcctctcgctccgtgcagcctcccgtcgcctccctcctgattgggcagaggccccccaatcggctgcgcggctgggccggtgggactgcatatgtaaagccctacttcatattaataagctccaatcggggctttaagtccttgattaggagagtgtgagagctttggtcccaactggctgtgcctataggcttgtcactaggagaacatttgtgttaattgcactgtgctctgtcaaggaaactttgatttatagctggggtgcacaaataatggttgccggtcgcacatggattcggtagaactttgccttcctgaatctttttccctgcactacgaggaagagtaggtaccttttttctttcctttttaaactcgtcgtgggggtgcgggggtgggggcggacagactatatctttacacactgattcaggtaatgccctgggtattttgtgtgcacgactgcttgtttgtgtctgtcttgtgtcttttgtgttgagggtgatctcctaattcagtaagtcgagaattgttctctgactacaatgttacctttgaggcaaagctcagtgactgtcagtaaaacagctgtgtgacagtcacttcttattcaggtgctaagaataggcacttggcacaaatgcttagtgaactgttaaaatgcatcttttactaggacccattttcccaaggaaagatgttttaaaatacaatattcaaaatgatttatactattgagggcctcttatgtatttgcagtttgacagatattttcagctccttgtcatttcttaccgcgcagagttagaggcaaaattgcacatttactaattctccttcagagaacaatttaaaagctagccctatgcaattctgagctagaataatgttatttgcatggttagcgttaagtcagcacttaactgacaaatcagtccattaagtaacatgagattttcacacattataaatatttaaggggggaaaaaaaactaaagaagaaacagtagtgactttaaaattttccccttaaatactgctcagagtgtggatttgtctcgtttgttgtgtccagaaaatatagaaaagtactttcgttcttacaagcagtttaattagtatttatggatatctttatgcacatggaaatatatatttagattactaaaggggggggagtgagtagggggtacgagaagtaagttaggcatttttgtgtaaatgagtaggtgataaactta

SEQ ID NO: 4625 - DNA, 6000 bp, Homo sapiens
tttattaccaagttataagagttttaaatgtgtttaaatgttttggatacaagtgctttatcagatataagatttgcaaatattttctcccattctaagggttgtcttttcactttcttgatagtgccctttgaaacacacaaatttttaattttgatgaggtccaatttatactttctttggttgattgtgcttttgtgtcatagctgagaaactgttgcttaatctaaggtcatgaagatttacacctatgttttcttttaggaatttttatggtttagcttttacatttaggtctttggttcattatgagtttcacatttgtattgtatatgattttttaaaaagctttgttatagttttcattagagtagtgtaacatactaaactccactaaacttggatgttatacataatatctagcacatgtagagaattttatcttttattatctcaattttatggacatgcatcctcacattgtgatctaggtagggcagtgtagttatattcactccccaaatgggaaagacgaaggcagaaaggttcaatgacttgtccgagatcatggtgctcactagaggtaaagcaaggcttagaacccatgtcttctgctctcactcctcacgcctgtttccactgctctgaacatgttcagggagatgattctgaagggaattaccaggatggccactgggcacatttttgagaatatttatgttgtaaaagagggattctcatcaaggaaggataccaacagtcactggagatcttggtaggcacttaatttacaatatgtaatttaatcttcatgataacccttcaagaaagggagaagaaaactaaaaactactactgagagtaatttgttcaagaatacacacaagggaagtaggtgaactgcaatttgaacctagatcctggggccatcagtactcctggtgtacttggatgctggaagaggaaatgctgagtgtggagtcctaccagcaacataacttaaaaatatatatatttataggctggagagcctttttacctcattatggctgagatactcaagcaaggcaaactgaattgtctttgttttttcattactaactcaaattcccaactttatcaaaagtatttataaaaacattcacacacatactatacacacacacgctttttttttttttttttttttttttgagacggagtctcaccctgtcacccaggctggagtgcagtggtgtgatctcagctcactgcagtcttcacctcctaggttcaagcaattctcctgcctcagccttccaagtagcttgaattacaggcacaagccaccacgcctggctagttttgtatttttagtagagactgggtttcaccatgttggtcaggctggtctcaaacccctgatctcaggtgctcaggcgatccacctgcctcagcctcccaaagtgctgggattacaggtgtgagccactgcaccaggcccccaacacacacattttatctttagtcattgcaactgttttcacaaaaataatccaacccaataattgataaataggccacaggactagaaatggtcaaacctggtatttctaaaacgtggccatgtttatttttcttatggtatttttaaaattttttagaatttttgtgggtacatagtaggtggatatatttatgatggtacatgagatgtttcttatggtgtatttttatttaggtttttcatgacttaatgaccttatccacaccgtggtttgttttttttaaaaagcaaacaccacacacagtcatgtcattttaaattggaataagtgattgcaggaaacttaatacccctgtgttgcatgttgctatggtttgaatgatggtattccctccaaaattcagttgtaacataatccccaatgcaacagtattaagtggtgtggcctctgggaggtgattaagtcatgagggttctgctctcgtgaatggggttagcacccttatgaaagggctcaagactgaaggaggtgttctcttgcctttctgtcccttctaccatgtgaggacacagcatgcatcccctccagaggatggagcaacgagccaccatcttggaaacagagagctgccctcaccagacaccaacattggcaccttgatcttggacttcccagcgtttgaaactgtgagaaataaattcttgttgtcggctgggcacggtggctcatgcctgtaatcccagcactttgggaggctgaggcaggtagatcacttgagatcaggagttcaagaccagcctggccaaactggtgaaaccctgtctctactaagaacacaaaaattagccaggagtggtggcaggcacctgtaatcccagctactctggaggcagaggcaggagaatcgcttgaacccaggaggcagaggttgcagtgagccgagatcacaccattgtactccagcgtgggtgacaagagcaaaactccatctcaaaaaaaaaaaaaaaaattcttgttgtctataaattacccagtctcagatgttttgttatagcagcacaaatggacaaagacatacgtgtaatcctcccatcacagagggagtcactgaggcaccgaaaagtgggctagattcctgattctagcacttgcttgccattgtctttggacaaattaccaggttgttgggagaatcaagtaagccaatcattgtaaaacctgtcataaatattcaataacgaaacttattgaagagttaggtgtgccttggcttcgatcacacagctaagcgctagatctggggctaggatacagcttcaggctttggatttatgagaagagtcaaagtttttgtttaaaatgcagattatcaggcaagggcctaaaaacattgatttaaacagtagttgtgttgttgcgtgtacatgaaaactgcctcagaataaaaccaggtttgccttggtctaatgacaccttgactatcatgacattcacaaagcttttgcttctcccactctggtaacctctcatgtttttttaatttctattcttccattcttaaagggctgaccttttcttgatctcatctccaaattgatactgaagtgcaagctgctgaagcaccccctaggtgctgacaacaaggaccagtgttttaatcttcttagggagcagatcagagtgtgtttagaaggcaaaggagaggttaagctagctctgaaggaaggattactttgtaaaattgaactttcaccctccctgctcactccctgctctccctcctaccttagcatggcagcacccagttacccaaggcacagagctggcatcagcaatgagacttccttctcctcacacccagtgactcacccaatcctttattttccacgtcttgaaaggtggagtgcatgctgccacctctctctaatactgcctatgctgtggtaatggtggtaatagtggctagctgatgggtgctagcagctagtataaggtccttacatctatcaaatcgtttagccctcaaaataaccctgttatttgcattttacagataagaaactgaggcacagagaattcggttaagaaaccaacgtgcctgagattatacaactagcagcccatctggattcttcccatcgaggccctggggctccagagcccacccgctgcacctctctagctaccagtgcaggcatctctcttctgtcctttgcatgccccaaataagcttcttcctgactggtttctaggctctcatcttgtcccccaccaatccatttcccatatttttgttctaaaacacaaatagaaacgtgcccctcttacacccgacttttccactgctccagtggactaagcaagttcaactccttagcctgggcgggcctctgtgtaccactctgtcaccttagtctaccgccttttaactttgtagttcctggaattcacccacgttgtcttttgactgcttaacggtctcattcctccaacccccataaattcctggagaaaaggattggagctcaatgacattcgttaaatgaatttttgaaaagcaacagtgttttattactggaaagtgttacagacagatattgtgaaatttttccttgggcttctttcaatttcgttcaattctcgtccagtattctcataacatttggatcaggtactttatcaccttgtagtgtcactgttcctttctgtatcctctcgaagcctcctgttactcgttttctaattctcttccagcccactgcacgatctagtgtcgaatggatgaaacagctgagcagaacagttctttagctgtcggcctaaatgaccaacttcatgacctctcaaggtctcgctccccggctgcacgcagctcagcttccaacattcgggaaaggcgtgcccggatcgcgaggggccgctgggaccgagtcccggacgtcgcgacgcgcagggggctgctgcggccggcggtctcgggaaaagtgaggggacggaggcgcccaagcaacgtgggtttcgggaactgtgagtatttcactttgcgtagagccccctcgggcaatgcgacccagaaccgagggcttctttccccccgccggggcctccctcccgttctccactcggaacaaacagcctgcagttcccgcagctgcagcgcgggccgcggaacatgcgccgggagcggggcccgggcgggactccggagctggtactgctccccccgcgctccggcgccgggcctcgccgtgcggcctccttcctcccttcctcccgcccggctcggccggaggcggcggcggaggggcgaggcgcggccccccttcggcggcacctcctccccgggcaggcgcgggcggagccgggcccgcctcagccagccgcggcgggagcagcgcagcgcggcgccgcgggcagcgagctccgcattcgaacctccctcgcaaagacagtctccgccccacaatgcaccgcggcgggcagcctttgaaaaagcggcgcggctcgttcaagatggcggagctcgaccagttgcctgacgagagtgagtagcacctcaaagcaccccccccttttcccgcctgctgcttgcccagcggttgcaccggccgggacggacggccgtgccctccgctgggcaggtgggctgactgccagccccactgtggtcccctagtcctcccactccggtgttgccgccgcgtcgccgcctttgttatggtgtctgtgtgttggtttctggggttgtgtgagcgccagggccggaaaccgagagcccgggagtccagcctgtgccaggcggaggcggtggctgctcccctggcgccactccggcccccagccgaggtggagggaagagcggcccctgggcgcgggggctgtcctcgccgcctgcaccactcgcccggcgccgagagacgcccgccggggttatgtaactcgcctgtcccggggccgggggagggctcgggctgggcacggggtggtccacggccccttcttcttgccccagcctctgatcttgtcctgtcacagctcctgcctctacgggcacttgtgatcttcactgtcctccccacccccccaccggtgtgtccacccctggaagtgtttccgtgtcagagggttggccccttcccctgggaccacaggtggctgtggacctttcctgagatcatccagcccggatactcagtgttcaggtagaccccgtcccgcagactttattctatatgtgtcttaagagccataaaggtacctttatgcatggatgtgaccaacacagcgtacgtgtaccctgcctgacacccaccctagggcattgcctcccctaaccatgtttactcaccctgacatctaagacatgtatgctcacttgtgttgagtaagtaaaagcaccaattccatagtttaagggcaatggaacttaattttgtaatttacaatattgcataaattatatgaaaagacaaatatgttatttaattacaaaaaaaagtcctgaatccacttt

SEQ ID NO: 4626 - DNA, 6000 bp, Homo sapiens
ccgtccaggaagcagagcttgtcccaggtggggggcccccaattcagtacaagctacaagctacaccccttcccccacccatgcacccttctctgtctctcctattccaatttgctaaatgagtctcctagaagccagctgttggccgggaagcagggaggacggggcacggatgtcggctgggatgcagcgaggacggggcacagagggacatgcagagtccggactctgggcacttgggcctcagctttcagagccctcgggaggatccggctggagacacagagtcccccctggtctgtgggggtccatatccaggtggggagacccccatctggctgcaccaggaccactgtgtgtgcccgcatgtgcccagcagggggtgtcctggctccagccttgtgtccgggtccccacctcacccctgtgtcacaatgggcgagtgaagcacttagccaggggcctttcctgaacccccaacgggggcagggcagggcagggcctcctttgtggcttctggctcagagatctgtagctagcctggggtgagaggggcaccacaggcccagtcctttttattattattttttttgacacggagtctcgctttgtcgcccaggctggagtgcagtggcgcgatctctgctcactgcaagctccacctcccgggttcacgccattctcctgcctcagcctcccgagtagctgggactacaggcgcccgccaccacgcccggctaatttttttttgtattttcagtagaggcggggtttcaccgtgttagccaggatggtctcgatctcctgacctcgtgatccgcccatctcggcctcccaaagtgctgggattacaggcgtgagccaccgcacccgtgcttttttttttttttttgagatagagtctcactctgtcgctcaggctggagtgcagtggcgccatctcggttcactgcaacctccacctcccgggttcaagcaattctcctgcctcagcctcccaagtagttgggattaatggtgcccgccacctcacccagctaacttttttttgtgtttttagtagagacagcgtttcactgtattggccaggctagtctcgaattcctgacctcatgatccgcccgcttcagccttccaaagtgctagggttacaagtgtgagcccccgcacccggcctaatttttgtatttttagtagagatggggtttcatcatgttggccaggctggtcttgaactcctggcctcaagtggtccgcctgcctcgggctcccaaaatgctgggattacaggtgtgaaccactgggcctgactgacccagtcctttttttaaaaaaattacttacttttcccagggtcatactctcagctaggctggagtgcagtggcacaatcaccgctcaccgcagcctccacctcccacactcaagtgatcctcccgcctcagcctcccgaggagctgggattacaggtgcgtgtcaccacacctggctaattttgtatttgttttgttttgtgtttctttgagatggagtttcgctctgtcgcccaggctggagtgcagtggtgtgatctcggctcactgcaagctccacctcctgagttcaagcgattctcctgcctcagcctcctgactggctgggattacaggtgcgtgtcacccggctaattttttagtagaggcagtttcaccatgttggtcaggctggtcccgaactcctgaccttgtgatccactccccccttggctgcccaaagtgctgggatcacaagcgtgagttaccgtgccctgtctgtatttatagtagagacagagtttcaccatgttggccaggctggtctcgaactactgacctcaagtgatccgcccacctcggcctcccaaagtgctgggattacaggcctgagccaccacgcccggcccgtcgactaattttttttttttgaaacagtctcgctctgtcacccaggctggagtgcagttgcactgtgtccagaattggtgggttcttggtctcactgacttcaagaatgaagccacggaccctcgcggtgagtgttacagctcttaagtcggcgcgtcttcagttcgttccttctgatgttcggatatgttcggagtttcttccttctggtgggttcgtggtctcgctggctcaggagtgaagctgcagaccttggcggcgagtgttacagctcttaaggcagcgcgtctggattttttgttcctcccggtgggctcgtggtctcgctggtttcaggagtgaagctgcagaccttggcggtgagtgttacagctcataaaagcagtgtgaacccaaaaagtgagcagtagcaagatttattgcaaagagcgaaagaacaaagcctccactgtgtggaaggggacctgaccgggttgccactgctagcaccggcagcctgcttttattctcttatctggccccacccacatcctgctgatgggtagagcctagtggtctgttttgacagggcgctgattggtgcatttacaatccctgagctagacacaaaggttctccacgtccccaccagattagttagatacagagtatccacacaaaggttctccaaggccccaccagagtagctagatacagagtccactggcacattcacaaaccctgagctagacacagggcgctgattggtgtatttacaaaccttgagctagatacagagtgccgattggtgtatttacaatccctgagctagacataaatgttctccaaggtctcaccagagtagctagatacagagtgtccactggcgcattcacaaaccctgagctagacacagggtgctgattggtgtatttacaaaccttgagctagatacagagtgccgattggtgtatttacaatccctgagctagacataaaggttctccaaggccccaccagagtagctagatacagagtgtctgtctattggtgcattcacagactctgagctagacacagggtgctgattggtgtatttacaatccctgagctagacataaaggttctccacgtctccaccactcaggagcccagctggcttcacccagtggatcccgcactggggctgcaagtggagctgcctgccagtcctgcgctgtgcacccgcactcctcagcccttgggtggtcatgggactaggcacggtggagcagggggcagcgctcatcggggaggcttgggccgcacaggagcccacggagggggtgggaggctcaggcatggtgggctgcaggtccccagctctgccccgccggaaggcagctaaggcctggcgagtaatcgagtgcagcgccagtgggctggcactgctgggggacccactacaccctccgcagccgctggcccgggtgctaagcccctcattgctccgggccggcagggccggccggctgctccaagtgcggggcccaccaagcccacgcccactcggaactccagctggcccgcaagagccgcgcgcagccccggttcccgctcatgcctctccctccacacctccctgcaagctgagggagccggctcccgccttggccagcccagaaaggggctcccacagtgcagcggtgggctgaagggctcctcaagtgccaccaaagtgggagcccaggcagaggaggcgtgaagaccgagagagggctgtgaggactgccagcacgctgtcacctctcagcaccatctcagctcactgcaacctccgcctcctgggttcaagcgattctcctgcctcagcctcccaagtagctaggactacaggcgcctgccaccacaccggccaatttttgtatttttagtagagacggggtttcaccatgttggccaggctggtctcgaactcctgacctcccgtgatccacctgcctcagcctcccaaagtgctgggattacaggcgtgagccactgcgcccggcccatccagctaatttttaatttttttgagagatggggtcttgctattttgcccaggctagtctcgaacacccggtgtcaagagatcttgctgcctccgcctcccagagtgctgggatgacaggcgtgagtcaccacgcccagcctagacacagttctgaagggacaaagggggcctccgctccctcctttcaatcttcagctaggccaggctcccacttgggtcctccagccctcagtttccccctgcacccagccaggccaagctgcagaggcgcccggcccagagctgggaaggggcgtggcgggacccgcgcttgcagccgcgggacggaagggggcgcgaacctccccgcggcggggcctgggggggcggggccgggaggggcggggccgcgccccgtgctggccaatcagcgcccgccccggcaccgggacccgcctccgcgccgcagctcccggggggtccggcccggccgagcctcggtgtccggccccgcgggggaggggcgcggcctgcggagcgggatcggggccgggtctggggcccctcccggcggccttcgagccctgccgcccggctccgcgccgcccggagcccctcggcagtcccgtcacgtctcctccagattaggcattaactcgggtgcagccgcacttccggggggccgcggcgggggaggggcgcctgcgggatccagacccgccccccactctcctctccccgccccctcccgggccgcccctttcccgccccacggccgcgccgggcgctgcgtcccggggctttgttcgcggcggcgcgggtcgccggcctccgggcgggccgggggagggaggagggagggggcgggagggggaaggaaggaggagggggaggaggagggcgcggggagggggtaggggggcggggaggagagagggggaggggcgccgccctggccccgcccccccccgcccgcccgcccgcgctccgccgcctccggagctgcgtcccgtcctgtccagtcccgtccccggcgcggcccgcgcgctcctccgccgcctctcgcctgcgccatggccggccggtcccacccgggcccgctgcggccgctgctgccgctccttgtggtggccgcgtgcgtcctgcccggagccggcgggacatgcccggagcgcgcgctggagcggcgcgaggaggaggcgaacgtggtgctcaccgggacggtggaggagatcctcaacgtggacccggtgcagcacacgtactcctgcaaggtgcgcccacccggaccccggcctcccctcgcgacgcctgccgccccgccgggacccccgccccaggccgtgggaaccagccccggtcgctccgcagcccccgctccggctcccttggcgaccgccaagccccgggagggggggtcgccgggtcccgggaaactcgcgggcgccggggaaagttgctgcgccgccgccgtcctccgcccgccgccgcctccctcctcgcggagacaagtgcacctcgcccacggactgcggctgccgcgcgccctccctaccggccgagaaggagaggggcctggggagggggggcctttgcccgggcggggagcgggggctgggcctgggatccgcttgttcccctccccagaggcctttcccggggcgagaggggttggtcaggagagaaaaaggggcgcacagcctgagctcccaaccccgggagccaggtggggggtgccgcagtggtgcggggggggggcgtgcaggagcagagaggtgggcggggccgtcaccgggcctcgtgtgcttgggggcagggccggtgccccatcgcgctcctgcgggaaccggggctccccaccccggggaggggaagtttccctggtttctccttcaggtgcttctgggagcccccggggtaggtacgctgggacccccaccatcttctcctagtaggggctcgggggacccagagccggcgcccgtgtacccccaaaaccatctcctgggaccagaaatccactcatttccctccacggaggtggagaaggtggcagcttctttcagactggccggtgcgggctac

SEQ ID NO: 4627 - DNA, 6000 bp, Homo sapiens
aggctgaggcaggagaatcccttgaacctgggaggtggaggttgcagtgagccaagatcatgccactacactctagcctgggcaacagagtgagactccctctgagaaaaaagaagggtggcaggactgacgctccaagctcctgggcgtatttttccaggaatgaggcagaatgggagctaattcactctcattctccaatctggtccctcatgggatcaacactaactttaaaacctcccagcacagagcaaggcatacaacttacatccaataaatgcttgctgaatgaatgaggccgttgatcctctggctggggacaggggcatcctgagatgaggatggagcagagaagctggacctgtcggtttggactctttgtcagggtgttgaccaaacacagcaagccctgtggtggggaacaggagggtgagatgtatccctgactattggaagtctctgatctgttatttgagacagaaaggtgaccttttctagaatatttatatagagtcttaaaatttgaactgaagccactgaatacaggtctttctccctctctaagtttaaaaaaaaagatcacagagcaaacttatataaaatgattatttgttaacactgttaccatctggaatgatctcatttattgtttactattggtctctcccactgaaatggaaattctctaaggcccagagcctggtccatgttgtttatcactctccagcatgcagaacagcactgttccatatttattcattaggttcctaaatttttaataaaaataaatactgaagggccaaataataaatacttggagggggtttcactttgattgtttaatggagttttactacattaatactattaaaattaattaattatattataatgtatattcaagatgtcccatggatagaaataaactgaaatactgttaaaagcaactggtgaagatttaagataggcaccaatatcacagtctgctgttacttcactgtgtttttgaagaactttgcaatagttattgtcccaaacccaatatcatctctttattatttttttctcaaagtcataggaactctttccaagcctgtttatcatctaatgtctcatttaaatctccccaaaactttgctcttagtcttttcctttattcgtgattaacaaagtctgatagagctatagtgcaatatcatgctttgccagcaggcgtcgctgtctgacaagatgtgatccagtgtgagcactacagtaatttatgaccaaatgatctacaaaatgaatcaatgtactaaattagggaatattatgagatcaaaattctgcgagaagtcagctgtgatggctcatgcctataatcccagtacttcgggaggccacggcaagaagatcacttgagcccagaagttcaagaccagcctgggcaacatggtaagaccctgcctctattttttttttttaattaacatataaacactctacttctgttttgcatcatgagataagtacacatcttatgctaaggatgcataatagatgtagattttattaatatgcttcagtgttcttcatgttctggtggatcttgctacaattctgtgttgtggataccaagcttttctttaaaaaaaaaacctattatcttgaaaattctcaaaatccttgatttcattctagcacaattaattgtgttcagttaatgttggttgaatgattgcaccacctccccagtttctggggaaatgtgtagagcagttctacagatgagaacaggaaatctcagaaaggttaagtaacttgctcaaggtcacacagctgatgaatagcagagctgggggttgcattgggtttgtctattaccaaatcctttgcacatttgctccaatcagcaaaagggattcagagaagatggcagcctttaacacttgtgagggcagcaggattctgtgctaagagctcaaggctcagaaccatcatcagaaaaagcagctgatgctaattcaccatctatcaagtttctcttcaccatttcccggagacagattaaagacatgagcaaattgtgctgatgcaagtgataaaatgtgtgtgggggtggggtggagttggggagggggttggggatgacaccactgggagcccagagccacctccctcccgactcacccctgcagtacacagatctttgtataagtcctgagtcacccttcaaatttttggatagtatctatcagcttatgtcacaatgttgcaagattatgtatctttttttaacaaacaatagtatcagcatgctagggtgattctgagcccttctgacacataaactggcttccaggattgctcaacattgccccatgctgcagcagtcactgccggctgaccagccttccatcatccggccaacctgcccagcgtcctggaggagagaaggcccactccccaggggttcttctgggaaatttaggtcagcagggtctaattattcaactggatcaagagctgagatttccagattaacgccgaaggggggtggggtgggggtgctgaagacttttcatcaggaactgtctttcagggccttaaacatcaaagctgggtctctagctccaaagtgccccagtctgccctggaagcttcccagatgttaagaggtgaggcttggtggagttcctcttagcaaagctgacaacaccatggccccaggccacgtggccgtagcaccagccccatgagatgccagtgtctggtagatgccacacacacagtgaataatccaccaaacagggctactctcccaaggagaaatgaacccatcagaggcagctgtgattttcagcaatgactgacgtgggctgcaccccatgggcctgtcccagaggctctcaccagtctcccaagtaaacaacagttctcaaactgcagagtggctggagggggtcatatgctcttttaaaattattattaccttttttttctttttttttgagatggagtctcgctctgttgcccaggctggagtgcagtggtgcgatgtcggctcactgcaacctctgcctcctgggttcaagagattctcctgcctcagcctcccgagtagctgggatcgcaggcacgtaccaccacacccagctaatttttgcattttcagtagagatggagtgttgccatgttggccaggctggtcctgaacttctttttttttttttttttttttttttgtgagacggagtctcgctctgtcacctgggctggagtgcagtggcgcaatctcggctcactgcaatctctgcctcccgggttcacaccattctcctgcctcagcctcccaagtagctgggacttacagatgcccgccaccacgcctggctaattttttatatttgtagtagtgacgggtttcatcgtgttagccaggatggtctccatctcctgacctcgtgatccgcccgcctcgacctcccaaagtgctgggattacaggtgtgagccaccaagcccagcctggtcctgaacttctgacctcaggtgatccacctgcctcagcctcccaaagcgctgggattacaggtgtgagccatcatgcccggccaattattattattattatttaatttttgtgcagagtctgtgtcttgctctgttgcccgggctgctcttgaactcctgggcttaagtgatctgcctgcctcagccacccaaagtgtggggattaagggcgtgagagccaccacctccagcctcaagtgatcttttaaatgggaagcacccctaagctgctggccatggctgcccacctgactagtctgggttcaacattcctaaaccgctggcacctggaaagtcagaatgcccactcaggcccgcccagcccagggcagttggttgagtctccgtaatcctattctgagttcaaacaaagctaaaccaaactgattttcagcaccgtaaaatgagagacatcaaactttgtaatctcacagttcaattgggttccaagctctggacagctggcctcgggccaggcactgtttcctcgcctttacagtgagtgtgtcattagtcccaccctcactgtactgggttatggtaaagacacagtaactacggaagccccgctatttgtttcggctcccccagaaaggctaactcctcaccgttttcaatggacactacacagcgaggggtggggaatgccaggagattttgctctcaaaacagcaaagtctttaaaatcttcccagtcccaagtgactgctctgttcggggaagggggaggaaaattccttgaacgagctagagccacaggacaagtccccagaggctgggacctgttcagggagcagccctgcggatgccaggtgcccgcgccctcagggtctcgaggtccgaggcccccgtccccgtgggcaccgaaacgcgagcggccgaaacagcgctgcaggaggctccctggacccccggcggctgcccactcgtccccgctgggcacttcagaggaggccggcgaggccttgctcggggttcctgggacaaccccactctccgcgaagatttctccttctcgtaagacccccgcccccactccagcctcccacggctgcaacccaggccctgcgccacgcgtttcccaaagacgcctccggagggacccgagcttcgggccggcaacaccagggcggcggctcgggagagggctgcggactaagggggcggagggggcggccgaaccagcgccgggctgacgcgccccgcgccccgcgccccgcgcccccggccttccctgcagtgctgagtggtccgtgcgcccgaggtcgggggcggggcggggcggggcggggcagggacggccccgcccaccggcgcttttctcttttttttcactttaaagccgtcggttgctttttctcctccgcacagaagtcgcgctcgggcagcctgcgcgctcgcagcaggaaccaggctccaggcgccggcgccggggccggggccgcggggaggaggcgacttcgctccctgcggcgggcgcggcccgggcgcccgagcctcctcggccttggagagcagcggcggcggcggcaccccgggcgcggtaggcggcgcggggcacctgggaccccgatgggtgggcgaccggcccgggagggggaggcgcggggggccgggcgagggcggacgcggggatcgcgccgctgggggaccgagtgggtggcgcggggccgggcgcgggggagcgggtggagtacgggatggggactcggggcgcggcccctcccgcggtggctccgggggcgcctccctcgccgcggctcctgggagaggggcccaggcccgccccgcgctgccgccgctgcagggcagggggtcccggggcgaggcgcggcgggggtctcggggcgcggggaccgtcgcaacgagttgcggtcccgaggaggggctggggcgctccggggccgccgacccgtcccccctttagcccggggaaagcgggaccccgctcggctgagttagtttcgcttttcccgccagtccgagtcgggattggcggcgcggcccggtcccccgtcggggcgcccccaccctcccgcagcgcctcccccagggagcctgccggggacacccgagcgccgccctccccgccgccccggagccgccgcggcttctcccagcagcggagggagagccggagggttgtcaggaaatcgattaaatcagaaaaacaagggcggcctgggcccgcgggaggaaccgcggatgggtcaccgtccccgggcgtgtactgggctcggtggcgtccaggttccggtgaggacgggacggccccgagaggagggtgcgggtctgcaggaagagcgggtgtctctgagagtgcatctgcgtgtgtgtttgtgcatgtccttgtgaatatgtgcctgcgtatgagtgtgtctgtgtgttcatgtgggtgtgtgtgtgagtgtgtctctaagtgcatctgtgtatttatgtgcctctgagt

SEQ ID NO: 4628 - DNA, 6000 bp, Homo sapiens
ctgcctcccaggctcacgccattctcctgcctcagccttctgagtagctgggactacaggcgcccgccaccacacctggagaattttttttatttttagtggagacagggtttcaccgtgttagccaggatgatctcgatctcctgacctcgtgatccgcccgcctcggcctctcatagtactgggattacaggcgtgagccactgtgcccagcccaaaattagttttttattagtgatagtttaggaatttttttccttcagttttgtaattcattgttggtaagattatttaactcaatgattgttgttaaatttggagcaactgctataaaatatcttactcatgtgagctgtgtatttggaaggattttccacacactatttctgacttcgtgcatttcaaattttatttcttttacaatgcccttgtactcctggggctgggcatcatatattctctgagtcagcaccttcagatcacaacactcagggagacagaacaatggcattaggaatattcctgaatgccatctggggcacctaggagtaatataactatacccgcaaggggccagaatcccataaatatactcacccccagccctaaacccaaatcagcctctccctagccagatttcaaaacacctgtggccacctgatatgaagcgaggtgtgatgaaggagaggttgggagtggaaagagaaaaaagtctgaactaactgtggttaaaatatcttatgtttgcaaaatttttattttaatttatttatttttacttttttgagacagtctcactctgtcgcccaggctggagtgcaatggcacaacctcagctcactgcaacctccgcctcctggattcaagcaattctcctgcctcagcttcccaggtagctgggaatccaggcacataccaccacacctgctaatttttgtatttttagtagagatggggttttaccatgttggccaggctggcctcaaactcctgacctcaggtggtctgcctgtcttggcctcccaaagtgctgggtttacagggtgttacaggggttacaggggtgagccactgcacatggcctatttttatttttttaattttttatttaattaattaattgtttttgagacagagtctcgctatatcacccaggtgggagtgcaatggctcagtctcagtttactgcaacctccgcctcccgggttcaagcaattctgctgcctcagcctcccgagtatctgggattacaggcgcccaccaccacgcccggctaatttttgtatttttagtagagatgaggtttcaccatattggtcaggctggtcttgaactcctgacctcaggcaatccacctgcctcggcttcccaaagttctgggattacaggcgtgagccaccgcgcctggccacgcccagctaatttttgtatttttagtagagataggttttcaccagtttggccaggctggttttgaattcctgatctcaggtgatccactcaccttggcctcccaaagtcctgggattacaggcgtaagccaccactcccaaccctatttgtattttttaaaaattttatttggcttgaggcacagtatcaagaggtcctgagaacatgtacccctcatgtttgcaaaattttaaaaaattatggcaagaaaatacataacagagcttactatcttaaccatttttttctgagatggatcggctctgttgcctaggctggagtgcagtgtcatgatcatagctcactgtaacctcaagcttctgggctcaagtgatccttctgccttagcctcctgagtagctgtagtatagctaagagtgtaggcaccacctaattttttaattttaactttaattttttgtagagacagggtttcgctatgttgccaggttggtcttttttgtttttgtttttgaggcggagtctcactctgtcgcccaggctggagtgcagtggctcgatctcggctcactgcaacttctgcctcctgggttcaagagattctcctgcctcagcctgccgagtagctgggattacaggtgtgtgccaccacgcctggctaattttttgtatttttttgtagagattgggcttcaccatgttggccaggctgctgtcgaactcctgacctcaggcaaagtgctgggattacaggcccaggttggtcttgaactcctggtttcaagcgatcctctcacctcaggctcccaaagtgttgagattaaaggtgtgagccttgcacctggccagtcttagccattctaagtgtacagttcagtagtgttaagtattttcacagtactgtgcaacagatctctaaaacattttcatcttgcaaaactgaaagtttataaccattcttacttttgcaaattttatgaagacatataatcccggccgggcgcggtggctcactccggtaatcccagcactctgggacgccgaggtgggcggatcacctgaggtcaggagttcgagaccagcctgaccaacatggtgaaacccccatctctactaaaaataaaaaattagctgggtgtggtggcacacacctgtagttccagctactcgggaagctgaggcaggagaatctcttgaacccgggaagcagaggttgcagtgagctgatatcatgccactgcactccagcctgggaggttgcagttagctgagatcatgccactgcactccagcctgggcaacagagtgagactccatctcaaaaaaaaaaaaaaacaaacaaaaggtcgggcgcggtggctcacgcctgtaatcctagcactttgggaggctgaggtgggtggatcacaaggtcaggagatcaagaccagtctggctaacacggtgaaaccccatctgtactaaaaatacaaaaaattagccgggcgtgatggcgggtgcctgtaatcccagctacttgggaggctgaggcaggagaatggcgtgaacccgggaggcggagcttgcaacaaaccaagattgcgccactgcactgcagcctgggcgacagagcaagactcagtctcaaaacaaaaacaaaaacaaaaacaaaacaaaacaaaaaccatataatcccatgcaggtgatgagttctgaagtttaagcttcagtgggcttcatgataaattcattcttgctgagggaagatttgagtctttttggagttccccaaggtacagatttggacatcatacactgtaggaaatcaaggttgcatcaaatgaccgctccaggagggagagctgttagggaataataggtccagaggtgtttgttttgggtttttttttttttttattttatcgcccaggttggagtgcagtggtgcaatctcggctcactgcaatctccgcctcccgggttcaagcgattattgtgcctcagcctctgtgccacaacgcccggctaatatttgtatttatagtagagatggggtttcaccatgctggccaggctgctctcgaattcccaacctcaggtgatcgcctgccttggcctcccaacgtgatgggattacaggtgtgagccactgtgcccggccaggtccagaggtcttaaccttctcatggattcctgggattttgaggtggtgtctcaggcactgccaatttgggctgcttagctcctcccctcccccacacttgaaacatctgcttaaataataacgatgacattaatgatcatcattcaagctgaaatacattggttactttactacatgatagacactattccaagtaccccacttgtattaagttacttaattctttttttttttttttttttgagatgaagtctcactctgttgctcaagctggagtgcagtggcacaatctcagctcactgcaacctccacctcccggattcaagcgattctcctgcctcagcctcctgagtagctgggactacaggaatgcaccaccatgcccggctaattttttttgtatttttagtagagatggggtttcactatgttggccaggctggccttgaactcctgaccttgtgatccacccacctctgcctcccaaagtgctgggattacaggcatgagccaccaagccaggccaagttacttaattcttacaatgcaactatgtggttggaattaatcattatcccattttccagagaaggatgccagggcttgaaaagcttcagttttatagataaaggttccttgtaacataccttttgaaaaaaaattgttctactaataacacgttttgaaaaagtctgaattagtccagggtatttattttacacatgggaaagtaaaatccagaaaaaggggtcatttgttcaatgccacacacttattctttcattatttcctgggcgcctgccttgtgccagtgactgtgctatgacataagggttcagaggtaaacaagatactcatggaatataattttagtggaggccagtggacaatatatacaagaagaaatgaataggcaaaataattccagacagtgctgggatgatacatttgagatgtgattgagtgacaaagagagagagtgttaatttagttggagaggtggtcaggagagtgtggtctgtggaggtaacatgtgagccacaacctgatgacctgaagaagtcagccgtgcactgctatggggggacaacactccagacagagggatctatgagtgcaaaggccctgaggcaggaatggcttgttagtaatacagcagactcctggtccagtgctccttctctgcctgctgctctctaggccctcagagaggctcctttggtgtcctggacctccctcaagctcagtccctaaggggccagctgatctaggaaggtagcagatctggcttcctgtgggtcctcctcccagaagccctatggctgaaccggatctgagtttcctggttcctgtctggcagaaggggagcagatctcctccctgcctcctctccccaggctctagcccttgctccaaatctccatggcaacccctggacacagttctgaaccaaatgaagaggatctggaaggcaaagcactaagatcatagtgaagacttgcctcccccttctccttgtgtcccaccagcctccctgctggcctgaccaggccccatactccagtctccccagagaccccaagctgaagattctgtgggtctgccccattgctgggcacagcagagcctggatggaggcttgttgtcttctgcagttgccccaaaggttgctcttgctgggggcagccgccctgactgcaactgctttggagacaggtaagtatcagggggcttggttggggcacccagaagacttgggcccccaccatccttagagactatgtttccccagtcagcactcatcctgctgggctgagaccttttgagctgggggaggctgggaaactgtgtctggtcttgcttggcatccccaaatccaacccaaagccttctggaaggcttggatctgccagtcacctagaagcaggagtctgggagtgggcaggacagccctcagggcctgctttgcaaaactctgtaggcttcggattcagagaagctgcatttacacactctgccacttcttatgtttgtacctttgagatcattgtttcaactctctgaatttctttggcagtaaaatgaaaataataggcccttgccccttaagggactatgattattggcatataagatgagataagtcatgcaaggcacttcataatacctggcacataaaaggtgccaaattcccggctgggcgcagtggctcacgcctgtaatcccagcactctgtgatgccgaggcgggcggatcatgaggtcacgagatcaagaccatcctggccaacatggtgaaaccacatctctactaaaaatacaaaaattagctgggcatggtggcatgtgcctgtaatcccagctacttgggaggctgaggcaggagaatcgcttgaaccagggagtcggaggctgcagtgagccgagattgcgccactgcactcc

SEQ ID NO: 4629 - DNA, 6000 bp, Homo sapiens
tctacaaaaaatttaaaaattagccaggaacctgtagttccagctactcgggaggctgaggtgggagaatcacctgagcccaggaggtcaaggctgcagtgagctgtgttcctgccactgtactccagcctgggtgacagtaagaccttgtaaaaaaaaaaaaaaaaagctaaatttaatttaaatttaacagtcttaatatttcatttgcaggttggccgggcacggtggctcacacctgtaatcccagcactttgggaggccgaggcgggcggatcatgaagtcaggagatcgagaccatcctagctaacacggtgaaaccccgtctctactaaaaacacaaaaaatttgccgggcgtggtggcgggagcctgtagtctcagttactcaggaggctgagacaggagaatggcatgaacccgggaggcagaggttgcagtgagccgagatcgcgccactgcactccagcctgggtgacagagcgagactccatctcaaaaaaaataaataaataaaaataaaaaaaataaaaaataaaaaattcatttgcaggaacattttgttgtctttaatgccttaacagctcctgaaaaaaatcatgtcaaatgatcaatccatgttattttttcatgcacatcaaagtcacacatttattaaatcagcaataaattacatttcattgtgaattcatattgactttatacgtctgtagtagactttaaacagtcctgctatcaaaggcattagcccttgccgttatttaaaatgtatcctggccaggcactgtggctcacgcttgtaatccccacattttgggatgttggggtgggcggatcacctgaggttaggcatgcaagcccagcctggccataatagtgaaatcctgtctctactaaaaatacaaaaattagctgggtgtggtggcaggtgcctgtaatcccagctactcgggaggatgaggcaggagaattgcttgaacccaagaggtggaagtttgcagtaagccgagattgtgccattgcactcccgcctgggtggcagagcaagactctgtctcaaaaataaatagataaaatatatcctgagggaagaagggaagtagaaaaaatatatacatatatatcttgaaggataaggacaaaatattgactccgcttaaatatctcaaaaagaaaataaatgaaataaaattaagtaaacaaggaagctattgcatttaaactaaattagttgaccatgttaaagaagcctcagtgctgtgtaacaatagatgcttataaaataatccaccagaccacacagtgcatatgaaagtgataactctaattatatgattgtaactaagttgcaattttttttttatactgaggtgggtcacatctggactaaccctgtcccttttcagtcattaagtcagtgtacttgatatattttattaaaatattcagtgatatgatttcgctgtgtccctacccaaatctcatcttgttcccataatctccatgtgtcataggagggaactgaagggaggtaatttaatcatgggggcggttgccctcatgctggtctcatgaaagtgacttctcacaagatctgatggttttataaagggcttttcccctttttgctgggcacttctccttgctgtcaccatgtgaagaaggatgtgtttgcttccccttctgccatgattgtaagtttcctgaggcctccccagccctgtggaactgtgagtcaattaaacctcttccctttataaattacctagtctcaggtatgtcttacccagtgaacattagtctgttctcaccgtgagaacagactaatacatccagctagtcttttaaaaataataatgtaactgacaatttaagaatatcttatattggccaggcgctcacaccggtaatcccaacactttgggaggccaaggtgggtggatcacaaggtcaggaatttgagaccagactggccaacatggtgaaaccccgtctctattaaaaatacaaaaattagtcaggcatggtggcgtgcgcctgtagtcccagctaatcaggaggctgaggcagaagaatcgcttgaacccgggaggcagaggttgcagtgagccgagatcgctccactgcactccagcctgggcgacaaagcaagactccatctcagaaaaaaacaaagaatatatctaaagaggttggtcatgaatattctctgaaactaggaccaaaagtctctgttaaaatataaatgagctgagagtggtggcacatgctggtagtcccagctactctggaggttgaacgggaggatagcttgagcccaggagtttgagcccagcctgggcaacataaagagactccttctcaaatgcatgtgtgtctgtgtgtgtgtgtgtgtgtgtgtgtgtgtgttcctcctttgaaacaattttccagtctgattcttcaagctcatattaacgcaaatggacttaatggttccttttcctggggactaagtttggggaggaaggcaggactgattccttacccttcaaactaaaccctggtcacaggctgaccagtgcctccaacccagaccaagccctgaccctagcctcagactgtgcaataaccctgactagcatatatgtatatatatacatatgacaagtcattcacatttgaaaattggcagtagggccggccacggtggctcacgcctgtaatcccaggattttgggaggccaaggcgggcagatcacctgaggtcaggagttcgagaccagcctggccaacatggtgcaaccccgtctctactaaaaatacaaaaattagccgggtgtagtggtgggtgcctatagtcccagctactcaggaggctgagacaggagaattgcttgaacctgggaggcagaggttgcagtgagctgagatcgtgccactgcactccagcctgggtgacagagcaagactctgtctcaaaacaaaacaaaaaagaaaattgacagtagataatggaattacttttaaactatagatatctattacaaagaactgtacaaatgtactgtttgctatttgtaaatttaaatctcaacacttccactatgtttccagtcggatttctcttctatcctctgtatcagcaattcacatcttcctaattcttctcagtcctctagatgcccctgttccctccctcctcacatatgcctttcacaaaagaaatggaagcctttcaatgttttctgactcttctttctctttctttctttctttttctttctttccttctttccttccgtctttccttctttccttctttctttcagaacctcgctctgttgcccaggctggagtgcagtgatcttggctcactgcaacctctcctcctgagttcaagtgattctcttgccccagcttccccagtagctgggattacaggtgcccaccaccacacctggctaattttgtatttttagtagggttttatcatgttggccacaggctggtctcaaactcccgacctcaagtgatccacctgcctgggcctcccaaagtgctgggattacaggcgtgagccaccgtgcccggccaggactaacactttctagctttctacccttcagtccataaatttattcatttagacaccctgtcttaacatttttttttttagcctttacgttaacagaggcttctggtcctaatttcatatcatacccaggttcattttcattatccattaaatctgctattttatgtcttctatattcttatcttaaaatactaaaagagaggacaaaggatacaaccttggggcacatccctagggtctttcctctagagtgacttttattcagtaatgaactcactttgtctggctcttaaagctaagaaattatacaactttttttttccatacaacttttttttggagtgcaggggcacgatctcggctcactgcaacctccggctccctggttcaggcgattctgctgcctcagcctcccgagtagctgggattacaggtatgcgccaccacacccagctaatttttgtatttttagtagagacggggtttcaccatattggccaggatggtctcgatctcctgacctcgtgatccgccctcctctgtctcccaaagtgctgggattacaggcatgagccaccgcgcccggcctcctatacaattttttagtatctctccctgccaagtcaggtttctagatacccagaatttcactatctgagattcattcctttggctgatggttctgttctcctttcaaacaattttcctgtctgactcttcaagcgcatattaatgcaaatggacttaacagttccttttcctgtggaccaagtttggggagggaggcaggactgatcctttacccttcaacctgaaccttggtcacaggctgaccactgcgtccaacccagaccaagccttgaccctgactagtcagtgacccaggccacaccctaactcctggtcacaacctgaacccctgcttcaggtgtgagaactgatagaccggcgttggaatggaaggagggtgaggcaagctgagtgggattctcgtgtccccagccccgcccgcgggccgccagcttcccaacctgcacaggcccagcagggcccctccaggtctaggtgagcagagctccacctacaggtaaaacgcggcaaggggcagagaaggagccaagtggcgacgtggtcatgcgcagaaagatccgtccggctctctgagcagagggtagcgtgtgggggcgggataccgacgcggctcggctgccgattggtcagaagaggatagaaaggggcgggaagccggcgcggctcgactcccgattggccagaggcggcagaacggggtggggccaaacgacgcgcgttctgtggcgcgcggcctggcgggcgtgcaacggccgttagaggagctgagggagggaaccaccgctcaccgcagacgtggtggctgcagtcagtcttcccgagtgagggatttcgccgcccgctttcaggcccgtgtaagttttcctccttcgggagcctcagtcctagtggccgaccttgcctctcctcccatagctccggcgaagcctcagacgctcgcgacctgccaccgtgaggggccggggagagcgaagcgcatgcgcctcggctccgaagccagtgccccggcatacgccctctcgcgtcccattcccctcgcttcccccgttgccttgctttgccgtccgtggttcaccccacggcagtcactttacctgcgtgccaggccctgtgccgatagccagggacacagcgagcggcgcattccttgcccttgcggagcgcacagccctgggagtcgacgttaagcggggtaatccctcggcgcgcagtgagggtagagtggagaaatcttacaaagagcgcaaaacagaaggcgcggatctagtcggagaggtcagggagccctccccgaggaggagaagtttgagccgagattggaaggctgtgtagagaattaaggttgtgggacggaaagcacttggcggggccttaccccggtacttctcggccggggcgattttgcttccctggggacattggtcgatgtctggaaacacttttgatagtcacagctccagggcttgctactggcatctagtgcgaagaagccagggatgctgttacacagcctactgtgtgtaggacgcccccaacaacaaagaaaaatcccccaaaatgtcagtagggcggaaggtgaggaagcttccttcagcgagaaggagctggtgctttggttgaactgaaagttagtgtgttcaggtttatttgttcaacagtatattcaacgcttacttcacctcagttaatgagagcgatcctttacaccagtacattcccaacacgtggctcagagccaggcgcatagtaggcacgcagtaaatttcggttgatgaattgaacactgggataagtagggggcggtggtgatacaaggacgatgaagctagcca

SEQ ID NO: 4630 - DNA, 6000 bp, Homo sapiens; identical to SEQ ID NO: 1491

SEQ ID NO: 4631 - DNA, 6000 bp, Homo sapiens
tagtttttgtttggcttataaagttgagcttcaatgcagtggtctttcaaatgttttccttgagtcttcttaaaagaagattttcaaactacgtactcccttgcatattttagaattaaaatactatatatatatatatttgtttttgtttttgtttttttgagatggagtctcactctgtcgccaggctggagtgctgtggcgcgatctcggctcactgcaaactccgactccctggttcaagcgattcgtttgcctcagcctcctaagtagctgggattacagacatgagccaacacgcctggctaatttttgtatttttagtagagatggagtttcaccatgttggccaggatggtctcgatttcctgaccttgcgatccacctgcctcggccaacaaaagtgctgggattacaggcgtgagccaccattccaggcccaaaatatttttaaagctctaaataaacttactttcttttaaatataatagagtgattgaacatttcaaagacgaaaaaactaagacgaggctgttaaagacacagatatgccatgatatgatttgataaaatagccttttactatcttattgaataaagttaaccaaatctgaaagaaatcaagtaaaattttacatataaattttatccaatgtttaaaaaaaaaaaagtaatggttcatcaaaaatcccatttatggcctggcacgatggctcactcctgtaatcccagcactttgggaggccgaggcagacggatcacgaagtcaggagattgagaccatcctggctaacacggtgaaacccatctctactaaaaatataaaaaattagctgggcatggtggcacatgtggcaccatggtggcacatgtagcctgtagtcccagctactcaggaggctgaggcaggagaattgcttgaacctgggaggtggagtttgcagtgagccgagatcgcgccactgcactccagcctgggagacagagaaagaaaaaaaaatcccatttatgttcaagaggatagccataagtctcccatattccttcgatatcctagattcagagatccaaaatgggctcaaatatccctgaattggctaaaattctgagtatcccagcatgggctgaaatagaaatattttagtgagcttcacatatatctatatgacaggaaaaggcttaaagtcttggatgtttaaaataccttgattaattatccaaggagccctccctaaaaccagtatttccatttatccatttgtttgatattctggagctatttacacccaaggcaatgcactacatgagatttgagatggagggatgctattcactatgaatttagagaatgattactgtgaaccccggctcattttcaaggaaatcagatttaggaaagagcacatatggaatttgagaatctgaaaactgacctccttaaaggtgtgcacgcagtcttcaagagctagagttgtatgttgaaggttttgaatttaccttcacttactggcgttgtaaagtctctaagaagctcttaggaaataagtcaacattggcttttaatgcacacctcacaggaaatggtgatgattcaatcttttttctccaacaaagctgaatgagccatgaggtgctggacactgagaagaaaagagcagctgctacagataccatcatttggatgagtcaaaagatgtatgtggccaggtgtggtgactcatgcctgtaatcccagcactttgggaggccaaagtgagcagatcacttgagattaggagtttgagaccagcctggccaacatgatgaaacaccatctctacaaaatatacaaaaattagccaggcgtgttggcaggtgtgtgtagtcccagctacttgggaggctgagtcaggaagatcacttgaacccaggaggcagaggttgcagtgaccagagatcatgccactgcactccagcctgggccacagagcaagaccctgtctcaaaaaaaaaaaaaaaaaaaaaaaaaaaaaagacagaaaagaaaagaaaaaagaaaagaaatgtaatccccagtgctggaggttaggcctagtgggaggtgtttggatcatgtgggcggatcctgcatgaatggcttagtgccatcctcttgatgatgagagcgagttctcgttcagagttcaggtgagatctggttgtttaaaagtgtgtggcacctccccctgctcctcttgctcctgctctctccatgtgatgcacctgctcctgctttgccttctgccataattgtaaacttactgaggcctcaccagaagccaggcggatgttggtgccatgcttgcaccggctatagaactgtgagccaattaagcctcttttctttataaattaccaagtctcagttattcctgtatggtaacacaagaacagtctaatacactcctagaataaaacatagggaaaaacctctttgacactggtctgggtaaaaatatttttagatatgacactgaaaaaacaagcaacaaaagcaaaaataaataagtgggactatatcaaactaaaaagctcagcaaagaaaacaaccaacaaaataaaaagacaacctacagaagggaaaaaaatatttgcaaatcatttatctgataaaaggttaatatccaaaatacataaggaactcaaatgactcaatagcaaaaacaaaaacaataaaggccagaaaatctgatttaaaaatcagctcttgggcagagcacggtgactcacgcctgtaatcccagcactttgggaggctgagatgggcagatcacttgaggtcaggaattcgagaccagcctggccaacatggtgaaaccctatctctacaacaaatacaaaaaaccagaccgggtgaggcgtctcacgcctgtaatcctagcactttgggaggccaaggcaggaggatcacctgaggtcaggagttcaagactagcctgaccaacatggtgaaaccccgtctctactaaatacaaaaaaaattaccggggcatggtggcacatgtgtaatcccagctacttgggaggctgaggcaggagaatcacttgaacccaggaggcagaggttgcagtgagccgagattgtgccattgcactccagcctgggcaacagagcaaaactctgtcacaaaataaaataaaataaaataaaataaaataaaataaaataaaataaaacaaaaatcagctcttgattttccatagcctcctaactgggctcttcatcttcaatcaattctccacacagtgttggagtcatatgttgcttaatgactgggataccttctaagaaatgtgtcatcaggcgattctggacctgaatagatttttttttcaaggaagacggataaatggccaataagtatatgaagaggtactcaacattactgattatcacataaatacaaatcaaaactacaatgagctgggcgtggtggctcactcctgtaatcccaggactttgggatgccaagactggcagattgcttgagttcaggagttcaagactagcttgggcaacatggtgagaacccatctctaccaaaactacaaaaaattagctgagtgtgatggcatgtgcctgtggtgctagctactcaggaagctgaaatgggaggatcacctgagcccaggaggcagaggttgcagtgagccgtaatcacgccgctgcactccagcctgtgtgacagagcaagactctgtctcaaaacaaaaacaaaaacaacaaccaaaaccaaaaaacaaaactacaattagatatcacttcccaccttttggggtgcctatgataaaaagacaagatataagtattgctgagggtacagagaaagggcagccttgtacactgctgttaggaatgtaaattggtacagttatcatggaaaacagtgtgaaataaaaacaattttatttaaaaaattaaaatagacctaccttaggatccagcaatccctcttctggatctatagtccccccacagaatgaaatcagcaccatgagagatatctgccttcccatgttcatgaagcgttagtcaaaatagcccaaacatggaaataacattttaagtgcctatcagtggaataattggtaaagaatctgtaggctatacaggaatattatgcagccataaaaaggaaggaaattctgccattgcggtaacatagatgcaacttgagggcattatgctaactgaaataagccagacagagaaagacaaatactgcgtgatctcacttatatgcagaatctgaaatagttgaacccataaaaacagatgatagaatggtggttaccaaggttagagggtggtggagggaaaggaagctattggtcgaagggcataaacttgcagttataagatgagtaagttcaggagatctgatatacagtatggtgaccatagttaacaatactgaattatacagcatacttgaaatttgcttgaatgttctctctgcaaaataaagagtaactaaataagatgagagatgtattaactaacttgattgtataataacttcacaaaatatgtatgtatcaaatcatcatgttgtatatcatcaaattgtagaattttattcatcaattatatttcaacaaagctggaaaactaaaaaaagaaacaagtgtataattaataacaatgctggttgtaaattaaaactaagcgtcatatttttggtgtcaaaatgtttgacatttttaagaaaacatgtataagtgttctgcctcttggatgagaccattttaaattaagctgtaaaaaaaaagtaccgacaaaacagttcactttcagtaatctggatttccccaaatagtgacacgagagccagtcatttcgaattggacagtttgagttcctcttcaagagtctgcaatgtaggtcagggctctgctgacatttccattgacctcagaagtgaaaatctaaagtgagtgctgacaggcaggcagtgaggaaagaagacatgacacagccaacaagggtggcagcctggctctgaagtggaattatgtgcttcaaacaggttgaaaggtaaataggcagcgatcatccaaatacttaaagacagctatatttccttttggaaatacatgggccaagttgttttctcttgcaagttctcatgatattccatgcagtggttactgatgaaaagggaatctataatattatatggcatcacattactttaaataataattattgcatatttccatcagttaacttctaactaggaacatttttagggcttctgttgcttcttatgaagagaagaattactattgctaacaaataatgaaagggatccctatatttctgagccaaggggaccccagtttttttaaatgttactagatattttatgcgatatgatgagccatgcattgcgttctcttgtagttttatagaaaaagctcaggttttattaaacagataaaataactgaataatgttgatcattgagtaaatgagttaattcatgtaactgattaatcaaatagtgtaactctagttgtaaactaacaacggtattattaggaatttctataacgtgttcctttcgcgttctctacagatgaaaggctttttcctcttttttagggggtgcgggggacaaggtctcactctgtcgcccaggctggagtgcaatggtgtgatcatggttcactgcaaccttcacctcccgggtagctgggatgaccgtcacatgccaccacactgggctaatttttgtatttttagtagggacagggtttcaccctgttgcccagcctgatctcgaactcctgggctcaagcaatccaccggcctctgcctcccaaagtgctgggattacaggcatgagccaccacgcctccccagatgaaacgctttttagagtctcactggtgagagcacatattgcttaatctcacttcacttttcttaattttgaatccattttctctgggagttctgaaatttttggctcttcc

SEQ ID NO: 4632 - DNA, 6000 bp, Homo sapiens
gtaacttgtccaaagtcacagagtagcagagcctgtaactcaatgtcatgtctgtctggctctagagaccaagtacataaacaccactagtagtactcccaatagtagtactccccttatagggtgaattgcaaggattaaatgagataatgcatgtaaggcacatgcctagcacatagcgctgttattcttactaaacattattatatattactagctaaaatttgtatagcactttactgcttgtaaagctcatttacatagtaactcattggaaactgtctcagaaaagttaaaagacttggtcaaggtcatttagcttgtaagcacactaatatcagaacctggatcttttaattccaaaacgagccattttaccttggcttttaatcactggggagtgctatgtttttctatagttattattagtaagaggtagctattttcagattaggtgagttctaatcttgccagcctctaaattgctcctttatctggtaaatcttgaaatctgtttcttgattttctgctcgattctctcctttatgtcagataattcacctttccagaaatgtggagaagtctcatttgtcccactcctacattcttttccacagttaaatatatacatgtaggtagatgtcaaattatgaatgggctatagtttgtaaggttattttgtaagttggttgtttagaaatctgagcatttctcccatgttttgaatgaacattaagtcccatagggaacccataggaacctattatgagcctgtgccagatgcaggaaaagggagagggaatgtggagaattatgaagctccttcaattcattctgggctgggctagataaaagttttgaaagtctttgcttttcacatcttctcacctcctacagcttgtcttgtttcctagtgtcccttctctttctactgccctgtacagcccccaaatcaggcctgctgtacaccaaggagtcttctaagttacaaaactatctacctgctcctactatttttttcctcttctccctctactctaaatggctgtttgatatgatataggaatttgtagaaaagtaggctaatgaaataattcatgctaaagtaggaaaggctgacttcccttatcccttctagaggtgtttacatttttaaaaaattattaataatgcaagtgaatttgtaattggtgagagctgtagcagtgaaacaaaataaagtgaaaaatggatattatgtagaaggcattttggaagaggtgtgttgcaatctgggtagaacagcccagatagggtctaattcttgttccattccttaaaccccctccagcgcatttacacacatacatgccaaacacacctcatcagttaccttggcttctagtctttttcttttcttttttttttttttttttttggagacagagtcttgctctgtcacccaggctggagtgcaatggtgtgatctcagctcactgcaagctctgcctcccgggttcacaccgttctcctgcctcagcctccccagcagctgggactacaggcgcccgccgccatgcccggctaatttttttgtatttttagtagagacggggtttcaccgtgttagccaagatggtctccgtctcctgacctcgtgatccgcccaccttggcctcccaaagtgctggaattacaggcgtgagccaccgcgcccagtctggcttctagtcttttcctcatcaaccagataactattagcatgatagcatttcagaactggaaagggttttagagctaatgtcattagcttattttataattgaggaaatagggttcagatagcaaggctcgtgctcacagttcttctgcctaagaatctaggacattttcatctatactccatgcttagctttcataagtcttgtaaaataaacttagaaatgctcatgcattgaccttgttcacttatccacttggaatttcttttttctctttggagttggcaggtggaagccatcagtgctggaggcaagatagtctgacctggtgttcttaccaacatgttctggcctggaggcctggcattctctgtcctctgccaagtggaggaattggaaaattaaaggttgtttgggggcctgggcacatgctttctttttctttaactacttataggagatatcatgagatttaaaaatgcatgtgaaagtgttaggatcatgattgcctctttcttctttctctcattgagcatttgtattttcactctaacaattggaacaagtctttttgctgccttagcagtacagcatagtggtggggatcctggtctctagaaaggcagaccacctggggccatatctcagccactacttcctggctggattaccttaacacgctccttcacttctgtgcctcagctccttcatctagaaaatagacacactgatagtttacactgtatggggttgtttaatatatggaaattcttaataaatgttagttgctgtcatcaccattatcatcaatatctatgggcctttttagtttgcttttttatttaaaaaatttttttatacttaagaaagggaagcttttctggtcttagctgcctttctctattgcctagcaatctgaaaatagtgcagtcattgaaggttaagtcgaccctttatgcaattcttgcctgggaggcctcattgtgtatagtgagtcaccaccacttagaagtggacagtgagtcagtagcctattaaggggaggtcagaagttcccctggctcaaaatgaaaggatccaaacccaaccctggggtacagaaaaaacagtgtacttatatggctgactggacttgaagtgccatggagtacctggactactccagtgagaaggcataatatggcgggtaaacgctggggctttagaatcacacaggcctcagttggatttcagctctacctctgccttgctgtgtgacctcagacaagttgcttaacctctctgtgcctcgtttttctatcatctgtaaatggaaatgatcataacaaaaattacttcatgatacaaatgagtgggaaaatgctaagaatcaagtaaatacttaaaaaaaggttattattattattattatattaccacatcatcatcattaatgggagtcgggacagacagttcagggatcagggataatggaggagcaaattaagggggaaaataacaggaacaagtctgtgtctttgatgtggtgagttttaggtagtgacacctcatttagctggtgttaagtatgaaagaagtcataatttattctttactgcatacctatgaaggaatgagtgatgtgtgttctcataatttccattttgtaaaggaagattctgaggaatagagtctaaacaatcttcatgaaaaagtacagaactgattcagcagcagttaggagctaagcttccattcagatcctgttgtatagggataactcttctggcctaggcagaggagaccttgttaggtctgtgagtccacagtatctaaaaatatgaatgtcatataatcatcctgtcattcttcttcctgatctcaattggccctcctgatttcatgccatctgcaaatttgcacatcctttgtgctcctttttgctcacattttatgccttcttttaccatctcatttactctgcatgtttcaatctttctgggcttccatttttcttctttttttaatgcagtgttgtttctctctctctctctctctctctctctctctctctctctccactcctttacagcccccacctcctccctccacaccaatcaaattcctgcttgtttcttgccatattcattatcctacctcattcccctcttattcctagaaaacagcacactcaccctcccctcctccaactctcaggcccaccctccataaattccagcagcctggcaatcagtaactttagcatcacacttcacagctctcctagtttacactacttgttactactctccttgctactgctctctagggtttctgctaaaataaaaaataaaaaaaaataaaaaaagcttcactttaaaaatatcttgggtacaagttgaacctacagttaagtttactcacacatttacacatttcatgattttattttaactagtagctcaagtccatgctcaattatgcagtgaaagaaggctagatccttaggaaacaaatttttctctattgtaaagaagaaaaatcacctaaccactcaacagaaaccccagtcctggggccactcaccctcttatctccctactcccccaatctccagctaatgggactttgctttttcctttgtcgggtcatttatttcacttttcctggcgctgagatggcctgagtctgtgtatgtgtgcacacgtgtgtggccactgcttttcttccaaaggactcacctctcttctgccattttactaggacacaggaggcggctctctgctctcgctctccctctctttttctccctgcccccaactcagcctgggctttttcctgtctcttaactccaccagtgcagcagcaactagctgagctgcttgagagagagagagagagagacagagagagagagagagagagagagagagagagtgtgtgtgtgtgtgtgtgtgtgtgtgtgtgtgtgtgtgtgtgcctgcgtgcgcagctaggccaagcctgcgagcctgcctgtcactggagagttttagtttgcattcagaagaaaggaggaggggagacaagaggggaggaggaaaaggtggaggggggaggagtgggggggcgcagagaagggagggagaatgtcttgtttgtggcttgtcagcaattgcttgagacaagcttccatgtgtgaaagctacttggcatgaatgcctgggccgtaccaagtgtcaccgcagcaagagggggagtcagaagaaaaacagatcagaccagagcagacaataggcccctaaagtgttccccctaagttgctttgatgttgtcctggtgtcttgataccaggaggccagggattgcaggaaaagggtcttttttgtcttcattcactttcccccctcagtttctgaaatgattctccagaatttctcctcataaaaaaggtaagagccctaacaattccttcttcggtggcaggcttgttcgcctgtgcctggaagtgggggtctcattcctgcgctgctctggaggagcgctggggtcctgcgattggagctcctgcgttgcccctggaagtctttcaaggcatccaggactggggatggcccctctttcgagggaaccccagtaacacgatctgtgcctctgggttggtgggggagaaggggtggatggagagggctgggaggagggtgtgagggtgggagggaaaagagagagagagagggagcgcgagagagggaagcctggaaaagagggagagaagggcagagccttggttcagggaaaccccagcccagagcccagggaggccttgcaggctccgagctgtgcattctcaggctgagcaagggccggccagggctccgccgagtgactgcagagattgcatcgagctttgtgtgtgccagtgtgcccgtgggtctgtgtgtgcgtgtggacttcccacacactgccctggcgtgcctcgctgtgaaggggaggcaccccgatccttaccaccccagcccagactctccgaggaggagcggcatggcaggcaagaagggagagcaagagaactctgccacaagacgatccagaaacttttccagtctcagggattcctctggtcgtagagactgttgagttgtggggtgccccgtgcctcaatttccccatctgtaaaatcaaggttgctgatcagggatgctgtatgcctccctgggattgagcgaaacagaacagatcactgtgtctgaaacgcgtggagaaatcgtcagctagagatgctgtggaatcacagagtagaagtgttatcattattcttgatcatcatcatcagggtaataaa

SEQ ID NO: 4633 - DNA, 6000 bp, Homo sapiens
gaatagggagacagtgtaaatagcaaactctgagcatccctgcatttagtgtcaggagaaagaggatgatccagcaaacagactaaggagtggccagtgaggcaggagaatcaggagagggggacgtgatgcatgccaagacagaaaagcatttcagagtggaacgtgaaatgtcaacagttcaaatgcagagtggccaagtcagcagagggcagagaatcccctgttggagccagcaacacaggagcctttgtgtcgttagcaaaagcagttcagtgaagtggtgggagctaaggccagatcacccactattagggagtgagtagggattgcagaagaggaaagagtgagtatgggtgagtcttccggcccaaacggaagggaggagaaagatggggaggaagctgaaaaagatgagtgaggcaaaggagaggtttggtttgctttggatgttattgtgcatgtccgtatacagatgaaaaaatccagtggagagagaaattgatggtgggaaagaatggagggaatgagtgcaggaaggaatactttgagaagaggaatgagtagggaatccaagccatgcagcctcattcagcaaagtcaggattctaactcaagcctgtctgattcacacaccatgctcattcctaggtgcctctttcactcacccatgagtgtccaactcccagggtccagtgcaataaatcctttaccactatctcctctaaagacacaagttttatagtcttcccatttccatctgggttccgcatctacccaaggaactggaggagaaaacaagcaaactgaagaaaattaaatctgacctattttatgcattctatataaatgcatgaaatagattatgtttgacagtggtaaacagagaaccaaaaaaaaatccaatttatcactttaattatatatgcatttcttcctcaatctccagccaagaatgagcctccagccattttcagttctttctgtggagccattccctaatttctaaagctgtttttggtaaccacagatttccactcaaggatgttttatctgaagcacactgaaaacttaacatgctgcctatgatggcacatacgaggaggaggaatgcagtgggtatgtatgaaattaaaagtaaggaaatagaggggagtgtggagttctgattcaaaggaatagcgtggattaaattgatgtccctgtaaagaaattgacattctcctattgccacaaaggaaagtaataggtgctgagttatttggatactgagctaattcagagtcaaccaaccacctttagtaaagtaaccttaccctaaaatctacttattcatgaataagagagggtaagaggacctgaaggagggcaggtgagaaggcagttagcagccaacacactgactgttgctgtacatgagcaggatcagggagaagggggcttctgccttattgcagtctccatcccacacatatgtgtcgaacatctgcttccaggcactgagggtacagcaaagagcaagacagaaaaggcccttgcgttcagaaagcttgcagtctcttggtgaaatgcacacaagaggcaattacagtgccaggggtaagtgctaaatcctcagacaggggaggtatgtgcacctaactcagcctgggtgggggacagtggtcaggaaaatgtttctgcaggaagggttatataaacttttaaatctaagacatgaccaagatttagccagactggcagtgagggcaggcagtcgggagataataaacaagaaaaacataaagcacatatgtgtgcccacaaatacacaatttcgattatcttaaagggtcatgtgaatggcaacattgttgctgctttatattgcactttggggaaaatcagagtcatgacaagccgtttctgactcgcaatcagggttagtggtgctgttggataatgtaggaaacagaaaaggaccaagttgggaggtagaggctgggttcagccttgacaggttgagtaaaaggagcttctgagacctccacatggagctctcaggtaagcagtcggatacttagatctgaaactcaggcttatggcttggactagaaagatacatttgggagtcattggattagaggtagcaatttaaaccatggcacagatgagcaccctcccagggagagaaacactctcactaaaagggaaagtgaaaagagaaaagagcatggggccaggggatgaagaacttcttcatagccactagaggagggaggctgagcctgtagaggaacccgggaaggtgttactgggagagatagtaggaaaaccaggagagagctgcttcacagtggtttaaaatggagggagtaacccacagtaatgacattagcatgcacccaaaaaaaatgaggacaaaacctgtccattggatagaccagagatgtgaaggaatcacatgtgaagccaaattggaataggttgaagacgagtgaggagtaagctaacacacaccagtgcttgccaaacccttttgctttgtggaacatatagaaaattatagctcagtggacattggccagctgcacaaggctgcccccagctggaagtgtggccccacacagatgatctgagggccaaggaaatcaatattttataacacctatagccatttgagatacaccaatgtgtctcggaataccaacttgtaaggtctaccatagaccactttctcaactagagtggctgtgaattggggctcccagggggtgtggaatcaaggtgagcttgctggcttggtttggtttggttagaagagtttttaagatcttagcatctttcagaagcatctatggaaaaaattcggttgagctgggaggactgaattcatgagagagaaaagggtagtatagcattggtggtataaggctcctcagaagtcagaaaagaatccaatttcaggtggagggtcaaatgtacaagataccatgtgtgcaaaagtgtaattctctccacaatactagaaattggatgtcattattactgtgttacaaatttaaaacctgaagcttagtgagattaagtcactgccccaggttccttgcctagtaagctgcatagccaggactataacctatatttttctgactccaaaacgcctaacaattatacttaggtgctaggcctggagacgcaaagatgatgcctttgaagaggtcatatgctaaaagtgtagagagacactaaaataaacataacacagtgtgataaatagaataatggagacacgggggaaaatgctttaggaaccacgaagactataccccagtataggcccgtcaattcctgaactcatggaggcaggggtggactggacatacagcaagggctaaaaagaaatacaaatacctggatggatggatgggtgggtacacagagaataagagttcagtatgaataaagattccctccttagggcaagtgtggttcatgtggccacaagaggtcgctcagatctgacacaaatgaagcttttttccattggtgctgccatgctctctccagaagctttctggaaggaaggggttagaatggagagagggaatgagggtggtgaccagatgctccatagcgttttctgccctctgtaggccagacccagagcttcatgcccaggctggctccattttcaccctactcctggtcatttccactcctgtcctaagttctaggcttttgatatgtttctccaatgtgttctgtctttcagatgtaactcagaaatggtcttaggtttctcgttaggcctgtagttccagctgtggatgagactccaaccccaacaggctttctggctgagtgcctttgtacaaattacttcatctttctgggactcaccaaaaacactaaggttgggaggaagggtctggtctttaagtcttcctgacccacactgcttacaatagctcaccttcaccgaacacttcctacttgctaggcattggtctaagcctgcaatatccaagaaggcagacacttgtcacatgtagctgcttaaattttttaaatttcaactaaagtaaaaacaattaaaacttcagtttctctgtgtcatgagtcaatttcaagtgcttaatagctctctgtggccactgaactggatagcccagaaaacatttcatcatcactgaaagttctattagatcttgctgtctgagagcatcttatgtttttaatcttgtttaaccttcatagcaaccctatgatgcaggtgtaattatgtatccactttagagataaggaccctgagacacagactggttaaaaaacttacccaaggtctctcaccagattcatatccagagtgaggattcaagctcagatatttggctctagggcctaccatgcagagctgtcccctaccccaagctctcttgctctcccgtctcgcctccggaactggaatgacttatcctgttccccaaaggccattgtccctgactactgccgccctgacaactgactctttgagtgatgagagcacctgggcctggagcctcttctggatgaggatccacactctattttcatcccacctccttttagcccctgaattcccttagagtattagtgttagtatcatgggttttaatatctccactaacccatcccattctcagttcaaggtcagcctgagtcctggaagattccaaacctgggcagcagccctgttgctgttccctgagggtcaccttcatccccaagggaacaacatgcagccagctcagctcaggctcagctcaccaacacctttgaaggtgcaacagcatctcactctgcaggggaagtgcgaaaagtcagatgcagttcacactctcatgccgctagaacccggtagaagttgccagggcagaggcttcatccgttctgtgtgcaaaccacaaatgtttgcaagctagaccacttgcggttatcccctctgtctcctgccccagctgctgccctgcagggactccacacacccacaggacctgcagctgaacgaagttgaagacaactcaggagatctgttggaaagagaacgatagaggaaaatatatgaatgttgccatctttaggtgagtggacaagatttctacttcctactttacttcctcactacttttccctctttcctaaacaactgagtcaccgaaaaaaatgcctggcagtgtcaaattagtttcccacttccactgagtcagacaatctagggcaagaaaacttagaaaattctctctgtccattcctggcctcagcaataggcacatcaaattccatcagactatgtagaacttctcacttaaagatttccaggaagaactttactgtcagaaaatgcttagccaggcatggtggtgcatgcctgtaatcccagctacatgggaggctgaggcaggaaaatcacttgaacctgggaggcggaggttgcagtgagccaagattacactccagcctgggcaacagagcaagactccttctcaataaaaaaaagaaaaaagaaagaaaagaaacaagaaaatgaaaatgcttcctagtattttgcctgactctgtgtttcaccgtgaactcccatgttctgtccacagaggagatgagaatgtgtgacctctttttctgttgagggaacattgaataatttccagtttttatctattacaaatgatgctgctatgagcactcttgtatatgttttttcaggcttatatgtatacatttctgtttgacatttacccaggagtgaaaatgctgagccatcagggatccctgtgtttagttttggtagattctgccaagccattttctagtgactgtaccaatttatattcccactagtggtgtacaagagttctagtttcttcacatcctcaccaatactcagtagaggattgcatggggagggtcacgggctcccccagacccagctcagtctcagctggtatcactcccttattcttatggaaggtgtagtggtat

SEQ ID NO: 4634 - DNA, 6000 bp, Homo sapiens
ctgctggtgggattgtaaaatggttcaaccattgtaatggttaactatgtgtcaacatgactggattaagagacgctcagactgctggtaaaacactatgtctggctgtgtctgtgagaatgtttacggaagagggctgggcgcagtggctcacgcctgtgatcctggcactttgggaggccaaggcagatggatcacctgaggtcagcagttcgagaccagcctggccaacatggtgaaaccctgtctctactgaaaagtacaaaaattagccagggttggtggcgggcgccttcaatcccggctacttgggtggctgaagcaggagaattgcttgaacccaggaggtggaagttgcagtgagccgagatcacggctttgcactccagcctgggtgacagagtgagactctgtctgggaaaaaaaaaaaaaaaaaaaaaaaggaatatttatggaagagattagcatttgaattggaagagtgaataaagatctgtcctcacaaatgcatgtgggcatgatcccaccactcagggcctgaataaaacaaaaagatggagatagggcaaatttgatctctctgattgagctgggacattaactgccctcagacaccagccctcttggttctgagtcttcagacttggactgagacttattgactccactgattgtcaggcctttggacttgaactgaattacaccattggttttgttggttctccagcttgttgatagcagagggtgggatttgtctgcctctaaaattgcctgagtcaattcctgtgtttccttgtatgcatatattaattctgtttctctgaagagccctggctaatacaaccaatttggaaaacagcttggcattttcttaaaaaattaaatatttttaatttttaaagaaaaattaaattacctacataaaatttaaaaaactacctaaaaatacacctacacctatatgatccagccagtccactgctaggtacccaagataaatgaaagcctgtgtccatacaacttgtacatgaaagtttatagtacctttatttgtagtagccgtaactggaagcatcccaaatatcaaacaataggtgaatggataaacaaagtgtggtacagtcatgtagtggaatattactctgcaataaaatggaaagaactgttgatagacacaacaacatggactaatctgaaaataattatactgaatgaaagaagacagacaaaaagagcacatgctgtatgatttcatctatgtaaaatctcagtaaactatagaaaacttatcatgacacaaaacagattagtggttgcctggagaaggtggatagagaggaagggattacaaaagtgcacaagtaaattttcaggagtaattcatctgcttattatcttgattgtggtcatgttttcataggtacacacttttgttaaaattcatcaaattgtacaatttaaagatgtgcatttagcgtatgtcattatttctcaataaagtgattttacaaacacaaaatgaaaagacaagccataaattgaaaaatatttgtaacaaatatgactgacaaaaaatttatgtttaggacatatacaatctcttaaaagtcaataagaaaattccattcatatatgtaccttcgagaaactcttataataacaaattatgtacatgaatagatgcatggtttttgacagcaaaaacctgaaaataactcacatgtccattgtcaatagaataatttgtgacatgatcacatgatgaaatacttcacagcaatacaattagttaactatagctacacagaacatcaggttgtatttcagttgagttaaacgaaagcaagttggctgggcaaggtggctcacccctgtaatcccagcactttgggaagccgaggcaggtggatcatgaggtcaggagttcgagaccagcctggccaatatggtgaaaccccgtctctactaaaaatacaaaagttagccgggtgtggtggcacacgcctgtagtcccagctactcagctactcgggaggctgaggcagaagagtcgcttaaacccgggaggtggaggtttcagtgagctgagatcaaacatactgcactcactcaacagagtgagactccatctcaaaaaaaaaaaatagagaaagccttagaatgataaatacagtacaattccacttactaaaagttcaaaaatacaaaatgattactacataaaataaagagagtgataaatataaggtaaagattgtggttgatgatggtggggagggaagacagtgtaatcggacagggatctatgcagtacttcaaggataacagtactagtctgttccttcaaccatataaggtttcaaaagtatacactgcattattttttacaccttcacatttttaataaatatttttatctactcaattaaaaataaagaagagataagcattagtccactagtgacaagccaggaatggcaaaggagggcatccaccacctaattggtcttgggatgggatgagagctgggatttgtcccatctccccctgagtattctgaggtgatcctgatggaggaacttactcaataaaccgaatctcagtctccatgaacaaacagcagacccaatgttgctttttcctcgcagtgaatcacatctattctaaatagttcattgattaagcttcaagcgagtaaattttcccagcagcttaatggaaatttcagtgtaaagaacttgatagcttcaccccaaatcttcagaaggccccttgccttccatattgacagtggggtcctgcaaggattgctgcagatggtataggggagggtctctatccaggtaagatgctatggtaaggacagtaaaggagaaagggtgacataagaagagaaagatatcatgatttgtttagaagccccttagcctctgcctaaccctgagggtctatgttttatgtagttttaggagtggcgatgcatctaaacacattttatttgtttaattcgtacacctgtaatccagcactttgggaggccgaggtgggcagatcacgaggtcagaagatcaagaccatcctggctaacagggtgaaaccccatctctactaaaaattcaaaaaattagccgggcgtgatggcacgctcctgtagtctcagctactcgggaggctgaggcaggagaatggcttgaaccctggaggcagaggttgcagtgagccgagatcgcgctactgcactcaagcctgggcaacagagactccatctcaaaaaaaaaaaaaaattattaaggctagctaggcttttcttcctcttctgaggcttcacatcacatcagctgcaaggcttactgcctcactgccttccccagcacccatattcaaccacccctggactccctggggccacctgcacagaagcgtatgcctctcgataatggaaattttattctaaatgcttattttagactcagaaagatccactctcttatgcccgtgtggttgatatgtctgctctgacctgtggtttttgcacagttgaagggtcatactgtccctctctctgccttcaaggaggaccaaactaccttcccccatttctctctctctctttttttttttttttgtgagatggagtctcgctctgtcacccacactagagtgcagtggtgcaatcttggctcactgcaacttctgcctcctgggttcaaatgatactcatgcctcagcctctgaagtaactgggactacagccatgcaccaccatgcccatctaatttttttttttttttttcagtagagatggggtttcaccatactggccaggctggtcttgaactcctgacctccagtccagtgatccgcccaccctggcctcccaaagtgctgggattacagaggcatgagccacagtgcctggcctaccttaccccatttctgatggctcatttcatctccaaataacctactggaggcctggtgggtgttatgatgacagaaaggggaggaatgtggccactgtgaaaagacacatgggccctaccattaagtaggcctcaaacaaatagcaaacattcagaggcagggacaatggttcccaggaggccatctggaacggaagggagaggctgtagcctctatattgctcctattcctgagtctcctcaggtttctcaagatatcggatgcctcctatctctaatttcctcaggatcagtggcctgagctttggctatgagcctaagccctgagctgactgctggatcctctgggaatagattttctttttcctctactctttcccagtggattctccctgccttgtactcatatttccactgagactgagcagacttagtcatgctccagaaatagagagctgacacgagtctagagaaatttgcatgcaaatttgtgtgggctttggatagtcagagcctactagagactaatctgatatctaacttggtgccgtgactaatcttccttctctgtctcgctaccttctagtcactagaaacatataagtgttggaatgggcaggacatttgaattctcatcattgattctccagtgattttctattggccttcaaacaacatcccaccttctgtccccagttgcatcaccagtgaaaagggtggttgttgcactgacctttcccagagtgtacatgaaggccagctggctatcagacaatgacatgctttgacaggcccctgagctctgtgagtaaattcttgaacagctgagagtgctaccattttgtcatagccctaagggtgcagatgatgctgaaagcgtgttggccaaatctgaatgatgaaagccaattacaaactagaaaatgaaaacagaccccagatgcaaggagatgagacagttaaatttacttcctcttttctaatctgagaggtttcatgttgaagaaaatcagtgttggggttgcaggagacctaaacacagtcaccatgaagctgggctgtgtcctcatggcctgggccctctacctttcccttggtgtgctctgggtggcccagatgctactgggtaagtaaaatatttgaatattggtgtgggaatggagctttgcttaccttgggagaaaggaccagaaggaaagaaacatggactaattctggccctccaaagaagcagtattcaggtggaataagaagggtaggtataagaaagtttggtgtacaggattgaattactttctgaatataaaaatcttccatcctgaaagtcccctctgatcatgatatcctctctagctctaatctcaactcttttctttcacttgtgagacaagttttcttaaaagaatagtttgcacttgctatctccacttcctcacttctcacacgctcctcaatgcttgcagcctggcttccactggaattggttttgtctagggcacaacgatctctatattgactgggttatggcatgcttttcagttcatatcctgctggacttctctgctgcactgggctctgttgatcacttactccttcttgcattctctactaccctggcttccatggcaccattttctccttgtactacatggacttctcttgatcccttaatagcttctcttctcttccccttaaacactagtgttctctatagttatagccttgcctctgtactcctctttctttacacaatctccttcatgagcttatttgtctgtttaatttttgccactataactctgtatttaagagtcccaaatcatatccccaaccctaaccatgcttttgagcttcacattcaaatatcaagcttcataccagacatatctacctacatatctcacaagtgtctctgcaccatgtgactagagttgaacttatctgtccttttggcccctgcctcatctaattcattttccactttctgatctcagctaatgacaccagcatctacccttacaaggccataaacctcagaaacaacccagactcttccttctttttcattctctaaatc

SEQ ID NO: 4635 - DNA, 6000 bp, Homo sapiens
acgactatacagttcacaaagttttggtgtactaaggtttcttctgaatcgagtaaaggggctgagatctgtgctctgggggatgagaagccaaaatagagccagcttgtgttgcctaagaggacagctgacaactgcattgcattcttaccattgaggtggtggcttggtgcagaagtcagacctctgtggcaggctgtggatcatgtgggaagccacacactggccctgagacgaggaattattaggatggaggggaagcacaagagtgctggtcagcccaggcactcctaaagcaggcaggtgatcatccctgttcccagtaattagttcttctctgcctcccctactcttgggcacattgtcaaatatgtccctactttgtttgaaatctacaggactctatctcttttatcaaaacctgcactcaaaacatgatctgaagtgaccagcataatttaaatgaccagtcacattttcctaagaggcatttgcatttttaaaaggggctagtccattaagcaaaatatgaggggactctcagagtggaacttcaggcatcagcaagaggggaagatactatcttcctgggagttgacagtacctgataattgatctccttcccatcagatttccaagggatcaaggtgccccggttctaaacaaccacaggtaaggacaggatagagtccaaggagacacactatcaggctggaaaattcattaagtatttacatgaaaattcaggttctcctcattgctcaggtacggtcacatggctcagaaagcacaagaagtagagccccgaggtcagatctgagaggcttctgaggggccgatgcagtgacttctctgctgcaggtcaggagttctggaactggggcgtggctggggaggggttgcagggaagggtgggaggaaggaagaaaagaacaagtgattggaagtgccacaggatgagctcattgggatgggtaggaaagaagagttttctaacttcttaagaatttaagaatttatgagaactcaagatttcaggaagggaggaagaagaaacacattgcatttctatccttgactggggaactagatgatagggatgtgaagggtggttggtgagtcatgccttttcgtctactcattgtggcaggatgtgagctctgggggcaggcaaccgaacactgacctctctaggtctcatgccaatgtctgtcatcaggagtgagcaggaaaaaggtccttaaggacatgaggccgtgtcttcctcagctgagccttgcagggctggctggaaggtggagaagggatgggatgggagtgggatgtcaatgggagcctgaagatggcggggtcatctgctggagcctggggttctatggggctctcttgtgctgtggagggcacaagttctgcaggccttcctttcagtagtcagggctggcctgagctgtgaggtggctgtagatgcggtagatgagacagtgcctggcacttgggatacctgatattcagcctgtctcccactggttctggtctgctatcttcaggaactaggagtgggtgggagaagcagcaatgtctcctagtactcagtggcatccactggccacattctttctctctgttccccatctcatgccagtgcatctccatccttctgcagctgctgcagtcagatccatcatgtggccactgacagcccttctgctcctgggtgagtccacagtgaggcagcagaagagctttgggtggtggagaatagggtggaccaaggtatggggagaggagggtgggtatccaatcctcagtttccaagtggttcattatctttttttggaggggtgaagaagaaggggctttctcagagcttgggaaaccaggggcagaagaagaaaaacaggttttgggaccattcagcctttcttgtcgtcaagagtctctctcctctcatcgccaatattctccttctccttcctcttccttctttcctgttctgcagttccaagcagtgggcaagctggtgagtcttataaatttctcatcccaattttctacagcttccactccaaccccctaagtgaccttttcaagtagactcctcacttcttggctgcgctgggatagtgtctcttcccactctcgtcaacccctgggactaaatttgcttgaaggcatttagaaatgggtgctggctgatggactggtagtctgtaacccaatgaatgtgatctcctctcctgcagggatgggttagtacatgggctggggcctgcgagctggggtttcctaagatttcccaaactcaggtcgtttctttgggcacctcaccttgattctctttgcatgctgccccctctcaccccactccccaccccagctactctggagaagcccatattgtctctacatccaccttggaccaccatcttcaaaggggagcgggtaactttgaagtgtgatggataccacccactgctcctggagctccagcccatcagcactctctggtatttgggccacctacttctgccctctcacaagaagagcattgaggtgcagacaccaggggtgtatcgatgccagacacggggagcacccgtcagtgaccccatccacctctctgtatccaatggtgagtggactgagcacgaggggagggggagcacgtgtctcctctggcaatactagtcctctggtgggagggaacactgggccaatcccaaggtgcaggaaacaagggccacactggggcctatcttaagtctctggagcaggtagggacctgcacggcactatgcgagagatgcagtaaggcatgcctagcccccaaggtccccttaccctcctgccatagtgtgaggcacagtgtgaacatttctgtttgtttctgagaccagctcagaagagcaaaggctccaaggacctggagtgctggacagagaactttagggggttggggagggagcagtaaaggaaattcaccaaacaggaaaggtgagtttccctggcagtctgagcatagatcaaggatctactctcagttgaacagtgtgatgcttctctgtgcctcagtgtccacatctgtaaagaagggacaataatagtatgtatctcttcggctgctctgaggattaaaagtgaattatgatttgctaaagaaaaaaagcagcaattgaactgagcacttactcaaagttttattgcagacgtgtatatgtgtacacaggagtcagctgagaaactgattctcgagatgcttgaagggttttaaaacaggataagaaaaataacaataatttgttcaataaagtacaggattgctgggcacggtggctcaagcctgtgatcccagcactttgggaggccaaggcgggcagatcacctgaggtcaggagttcaagaccagcctggccaacatggtgaaacactctctactaaaaaaaaaaaaaaaaaaaaaaatagctgggcatgatagcgggtgcctgtagtcccagctactcaggaggctgaggcatgagaattgtttgaacctgggaggcggaagttgcagtgagctgagatcgtgcactcctagccacaatttgtattcagaatttaaagcacatcactcaatgttcagattagcacttacacacacttcatattcatactctgtggtttcttgttcggaaatcattggtgatagcaataattatactgagtactataggagtaattactgcttacagattgggagtgcatgtggattgtggctattacttgcaggattctttctcaatgtacaacacctaaaatggcatctgctctgtgctagggctatgtaagcgtgctataatgatcacagggtaattatgaggtgctgtaggagatacctaaggctctcctggggtgtcagggatgttttctggaggagataaggtctaagcctagacatgcaggacaagcaggtgaacttaaacaggtgaaagagagtcttcttggctgaggaaatagcaggtacaaaagcctcgggctcagagcagggccagttctctcaacagttcagtatggctggaacttatcctgttaggagtggaagatgaggaaagtagagaggaaatggggcaggaatgaatactgccatggtgagggagaggtaagcaggacccagtcaggaggactctgacaccatcctaaggaggttatagttgattctcatggtcaaaaccctttgagggtggagccaagtctctggcatctttgctccctggctaagtgaaagaccagccatcccccttccttcccactcacctacaaatatatcttgcactatgaggctgctgggtgccaaccaccagggaaggcctgtccgctcaagaaagcagtgggaggccaggcccggtggctcacgcctgtaatcccaccactttgggaggccgaggtgggcgtatcacctgaggtcaggagttcaagaccagcctggccaagatggtgaaaccctgtctctactaaaaaatgcaaaaattagctgggtgtgatggcgcccaccggtaatcccagctactcgggaggctgaggcagaagaatcgcttgaacccaagaggtggaggttgcagtgaaccgagtttgtgccactgcactgcagcttgggcgacaagagcaagaccatgtctcaaaaaaagaaaaagaacaagaaaaaaagaaagaaaaagaaaagaaaagaaagcggtgggagatggcggggaagggagggagaggagttaagaggagaaagctggaaggctgtgagagtgggagatctccagggctggactttctgtggagtcaagcgtgtctgtggtgtctgtcgcagattggctgattctgcaagtgccctatgcgccagtgttcgagggtgagccgctagtcctgcgctgccgcggctggtacgacaaggtggtctacaagcttcactactaccacgacggccaggccgtgcgctacttccactccagcgccaactacactgtgttacaggcgcgtgccagcgacagcgggcgctaccagtgctcgggcaccatgcgcatcccggtggagagcgcgcccatgttctccgctaaggtggctgtgacagtgcaaggtgggagagaccaggggccccgggagggaggcaaatgagcattgagaaattctgggacaggagctcggcgagaaaagaaggggcggaagttcaaatagctgccacttggagggtttctcttagactatggacgctgtctcctctcctttgccgtgaagcagcgcttgatccgccgcctgcttggaggctggtccctttccccgacgcacatcctggcttctcactctggctggggactcccacagagagggcagctctggcaggggcaggggccactgtgggactgggacgaaggagcgactccctagcgtcctgcaaggcaggcgcagcgtctcctattctaggctgcagaacccgagctgagtgtcagtcgggatgtgacatgaagcgtctggcctggtccctcttcctttcaagctttccccgtccctcgtggactcggtccccctgccccacatttcagaaggctccccttccccctccacgtggacacacggcctcctcccctccccccttggtctgtgggtctgcaaggagccctcgcgggaagcaggaaggagcggggtcgcggagcggtggacaagccggcgccgttgctccccgccctctccgtagagctgttccgggcgccggtgctgagggtgatgggtccgcgggaggcccgcggcgcggcgctgggtggggtggtgctgcgctgcgacacgcgcctgcacccgcagaagcgcgacacgccgctgcagttcgcgttttacaagtacagccgcgcggtgcgccgcttcgactggggcgccgagtacacagtcccggagcccgaggtcgaggagctcgaatcgtactggtgcgaggcggctaccgccacccgcagtgtccggaaacgcagtccgtggctgcagctcccgggg

SEQ ID NO: 4636 - DNA, 6000 bp, Homo sapiens
aaacactgataacattggttcatttagtttatttttatttaaaaagaaatatcctctaggtctttaaaattaaacaagctaattatctaggaaaaatgcaaatattattcttatttagactttaaagtaacttttcccatgagtcttcagagggaacccatgtaatgttaagaatgatattctcagcaccagcacattaagcactgcaacaagtttcacagaactattttttcaaaagctcttccatgtaagccaaaatgtaattcagtaaaaggagagctataatgcgttaaaatgatatggttcagatagctgtttttgggactaacttcaccaaaggatagtttttagactctttagagctgtggtcttccagctcctcttgaacatatgccctatcagtaaaaaacaatttgagtatacatcctgtttataaatcatttatatatttataaattatatagaattactgcaataatatatttttgtattacagaatgtatacacaatgaaaaatttaagtggatgaaataacagtaaacgttactggaagttctataattttcttcctacattccagtgtttcattgtgtgcaccccttgggatgacttaccccattttggaactcacaaatacaaataaatgacactcctccactgataatttttttgttttccttaactaagcttttaagaaaacattgggccgggtgtggttgctcacacctgtaatcccagcactttgggaggccaaggcaggtggatcacctgaggtcaggagtttgagaccagcctggccaacatggggaaaccccatctctactaaaaacacaaaaattagctgagcatggtggcacatgcctgtaatcccagctactcaggaggctgaggcaggagaatcgcttgaacccaggaggccaaggttgcagtgagcccagatcacaccactgcactccaacctagggaacagagcaagactctgtctcaaaaaaaaaaaaaaaaaaagaaaagaaaagaaaagaaaaaataacactgggcaacataacttcaagattatttctttgacaaacactggagtacagctatgcaactggctagggtggagtcacatatttttatagtcaggtgggggataatgcggggactgacatccttttttgtgagttgaggaacttgaccaggacacacatttggctagaactctattccttctctacagtggcagatcatgacatgccagcaaaaacacataggcaaatggataatgagagcctcaaaattctggctcacaggtcagagatgcaatactgtaactaaaatatgtatctatacataaaaacacattagtttttttttttttttttgagacagaacctcgctctgttgccaggctggagtgcaatggcacgatcttggctaactgcaacctccacctcctggtttcaagtgattctcccgcctcagcctcccaagtagctgagattactggcacccgccactacacccggctaatttttgtattttagtagagatagggtttcatcatgttggtcaggctggtctcaaactcctgacctcaggtgatccacccacctcagcctcccaaagtgctgggattacaggtgtgagccaccgtgcctggctaaaaacacattcttgttacctgtcgagacatacagtgtcagtgataaaattaaatctcaaaaatctagaatcagcaatgtatgatttccaactgttaatattgtagcatttcatatcatttaataaactccttgtaggtgaatctagaaaaatgtttcaatgacaattcaataacaaatactgttaggcaaaatagtatgcaaaatccttgaatattcactctggataaactcttaagacaataatcagtgtttccttagattttattcaatactcatcagtcaacgtatttttcaagctcctccatttctacactggtgtgcctccaacttgtcgatcataaataattctgctgtaatagatatccttactctgtatgttgctcaaattttagaactgacagttattgagagtctaagtgcaaacgctgtgctacatgttttagagacattagatcatctgattttcacaacaatcctgaaatgattacaattactcccattttatagatgagataactaaggcaggaatttagggtcaaggtcacacagccaagactgaaacgtaggtctatttcccttcaaagcctagctccttttactacactgaaaaagggggttaaaataactgaacgaatccaaggattttcaggtgaaatgcacatcctgcaagtgaaaggtaatccctcttcattctgaaagctgagtagtattttaagcagtaattacaggtggctaaaaactaaaggcttggaaaggatcaaggtaagactaccctccaattttgtattattttaagtagtttaaaattactcttactctgtcatgcccttatcctacagctaaaacacaaagcttatgaaggtcagggttgacttcacattcagttgactctgtaaagcccagattattacaaaaagcatagctcaaccctccttcccgaaaatctttgccacaaaacacagcataattccaaaaaaattgaatgttaaaagaactaaaaggcaaataaacaaaaactttttaaatcagtaacaaactgtccttaatgatcagttttataatgggttcaatgttgcagtaaataatattaagggttagagtataatccagatgttcaattcattccattatcaaactggaaatcagatttagtaaccagttcagactccagagagctggttcataatcagataatgggggaactagacaactttcctaatgataccaactacagaatacagattttaactatgtaggagaataaaagccacttttcgggtagcacttcagtctttcaatttacaacacattttctagtttgccaagtcttaggcttgaaacagacctcagaatatatctgatgttagcccctagcaaataagtattattacaactcactttatagaagaggtaacagaattctagatctttaataaagggattggaatctttcagtttcttacagttttttttttcaaccacaagaacacagttttccagtaggcaaagagagatgtaacgtttactgagcatttacaaagagtcaagcacatatgttatctgtcattctcatagaccgcgtattacacaaacagagatctaggcttttgctcaaggtcacaactataagtggtagaagagaatgatatccaggtctgtccacacaaaaagctctgggtagagcttgttcaacaatttcataaataaggatagacttaaaaaaacacactggacctatgggatgagaaatgacactgactcaagcctggatgaagtaaagcatgcagtttgggggagggctcagtctgcaggcctctgccagcagcagctgaagaaagtgacctttactccaaaccctacagtgcgacaaaccacccatccagctctgcctagagtgggttaatatgccacaattcgaaaagagaaagagaatgagtgtttcatggtggccccagacagtttggtggccgcagaagttgagaaggctcaaatctggagatcaggtttgggttggagtcgtgcgtaagggagcggatgtcacataggtggggaagggagctgacttgagatacgttggcttaggaagagatgttgcaggagagagggtgaaatgcacaggctaggagagtagacggcttcacttgaagggaagggattggggctgtggatgcctctagaggcagttgtcagagggcctctaaaaggtccattttagaggaagcgagaaggaaggtctcgataaggagccattcagggtccattacctgctggatggttgtacaacggcctcaatttctcgggcagcatcagctccactttatcgaggagccggtggtaggtggcccgcaggcctcgggcaccggcggccgacatcgccgccgagggatcgttggcagccgggtgggagcgtggctgtgttctcgtccctggctgacaacgaaggggagctagtcacttttcctgccacgacgactcgcgtccgcctctcgcctggagtacccttcccgcggctttccctgcccgctgtgaaccgaaaagctgcggcccgcgccccgcgaaggttgagggggcggaggctgccgactgccagcccccggtccgcctccggcccccggcaggagagagggaggagccatggcaacaggtgccaaaataatcacctcaccaagtctgcgctgcgccctgctggcagcgcgcttgcgcaggccgagctgcccgccatgattggcccgccccgaggcgcgggcggggtcgagcggaaacctcctccttctccccatgccctcgaggccatgttggagaagggaaagtgaagctgcgctggttctactgccctttcactttgattaagcaggcccgtagttaaaatgggtttttgggccttcagtgcctaaagatgatgccgcacaattctcttgcttcttttcactggagactcgtgagcgagagactacagaattgagtagcttctctctctactcgtcttttatccctagcgacttaaggatctggttagagtggcccgaatgcattcttccagggtgagggcagccgcagcacacaccagcctcagtccccagggtggtcgtcatctcgcgagaaagggttggcggggagggtatccaggacgaggagagggaggagtcgccatcgcctccgcctccgcctcctcctgttggaggggggctgagggaggagactgttgctgatctttggatgttctggttagtctaagaaggagagtatgaggcgagctccggcccgggtgcggccgggcttcaggggcccaggcgccgctgctgccaccgccatctaacgctgcgccctggaggcccggcgcgcggatggtgccggtgcggctcgggtgttgaaacgggtgtcccctccccctcctcccctcccccacgcggtggtctcccctcccacccggctcaggcagagccatgtctcggggtggctcctacccacacctgttgtgggacgtgaggaaaaggtccctcgggctggaggacccgtcccggctgcggagtcgatacctgggtgagcgggggccccggggcggaggcgctgaggtcgccgcctagagtgggggagggggcacgctgccgggtctgttggaggtgggacggcgtctcggtgggggcgcccggagactctggggtgttgggtggggccttggttgccgaattccgtgccggtgcctcccccagtcaagccccctgtgcatgctgccagccgccgcccttgctgggtttttctcggagggccgggccgtgggcagaaggtactggcttgtaaaggtgttggggtcgctgatgggttgggactcgggagacttgcggaacctccaggagctgccgcgtttagagcaaaagttagctcttttgctcttttccagcgcgctttccccgctcagccgaagaacctaagttgttgcccaccctctccttcaatctccagagggtttaggtgtcggctgcgacgcgttgaccaccctcagggacttcacgctccagacagaatccgtgtaaactgtttttgcggcgctgagccaaaacctaaaagtgatagctgagctctccccacccccgcgcgctctcccagttccactctgctcttcagttcgttttgaccgcttaaaggtggtgtagggtttcacgttcctcttcccacccctggaaaacacacttggcatttacagtttcgtagttaagctttctaaaaacaaccttcagtacttgggggaacagtattccacttttttcgttttgcataacattttttttttgaggattctaggtcacgcccgagtcaactaaaaagtttggtttcttaaaaatggacgtacttagta

SEQ ID NO: 4637 - DNA, 6000 bp, Homo sapiens
taacagttttaaatcctgtttagaataaggcaagttaggagggtctgaatgaatggaaattggtgagtactaaaaagctgaaatacgttattggaattcagtgaatttcttgacaagacggtggatttgaaccactataggaaggggaggtatgttctttaccatcctttatgaatgtgactgtgtataaggaaagaaaaatcaatctgtgttggtaaactggctcattgcaataatagtactagtgattgctaatatttacatactatgtaccaggcattgtgctaagtgaccgatgtggttgggctgtgtacccaaccaaatctcatcttgaattctcatgtgttgtggtgggagggacctggtgggaggtaattgaataatggaggtaggtctttcccgtgctgttctcatgatagcgaataagtctcatgaaatctggcagtattataaggtggagtttccctacacaagctcctgtctgcctgctgccatccacataagatgtggcttactcttccttgccttcagccatgattgtgaggcctccccagctatgtggaactgtaagtccaataaacctctttcttttgtaaattgcccagtcttgggtatgtatttgtcagcagtgtgaaaacaaatacagtgacacacatgcattatcttcagaagctccagaatccccatatggggcaggttttagaatgtaatttggttggacagcagggctaggggacttgatgtggcatgggagacccctgtcttttctttttttttttttgagatggagtctcactctgtcgcccatgctagagtgcagtggtgcgatctctgctcactgcaagctctgcctcccaggttcacaccattctcctgcctcagcctcccgagtagctgggactacaggcgaccaccaccacgcccggctaattttttgtatttttagtagagacggggtttcaccatgttatccaggctggtctcgatctcctgacctcatgatctgcccaccttggcctcccaaagtgctgggattacaggcgtgagccactgcgcctggcctcttttcttaaattataggtttatttgggattacttaagacagctgatggccattatgcgtgtgtagtaaaagtactctaatgccccaacaagtgacaagtcacttcttggttccaccactgctgatttcattgaatcctcacaataatcctgtaaggcagaattggttattacctccattttctatgagaaatcccagacttagagaagttaataatttggtcaaaggtcacataggtaggaaatgtcagagcctcatttgaaaataagtttgactcctgaacccatgttctttgctacagtattctactcccatttgtacaaggactagccttggccaaaaattggcaaatggattttacctacccacagaaaagggctcaaatcaaactcgacacagacacagacacagacacacacacacacacacacacacacacacacacttctactgaattaaaaaagaaatagccaaggggaaactactgattaaatataataaaatatattatgttgaaaacaacattatttaacaaacaagacccttttgctaacttgataattcatcatttggtttttaaggatgaattgcactaactgcaaatgagtcagattcctcagaggggccttaaaatacatataataaatcaggtattaaaaagccaaacacataaagggatttataatgaacaggataagcacaacccactctgaaaagtgcggcctgagatttaagtttagactattgctcagaggtgaggcttgtttttccacaaagagaatgcgagggattctccctacctcagtgcctcccagcttagtggggcagtcttacctgtccttgaagatcttggcataattgaatctattaaaaattttaaggactattaaagctatgctattaaaaactgcatattaatattggaaaatataaatttgaaaagaatttacaaaatactattaggacgtaaaacccttttttggtaaaatgaacaaataaaggtatgcttatatgcagacatatgtagtcagcaaaaccactgaaaagaaatacactaaaatatgttaacagcaaattttttcctttcttcctccctccttctctctctccttccttccttccttcccttctttctttctgttgccatggttgtagtacagtggcgtctcagctcactgcagccttgacctccctggctcaagcaatcctcccacctcagccacctaagtagctgagactacaggcgcatgcaccacacctggctaattttttgtatttttagtacagataggggtttcaccatgttgcccaggctggtcttgaactcctgggctcaagcaatttgcccacgtcagcctcccaaagttgggattacaggtgtgagccaccatgcccggccaacagcaattttttctgatgggtgatttttatcttatcactctctgggttttttatatgtatttgccctgtactctggattaaatttactaatttgcaattagaatacaatgacttaaaaaatgaaagacatcggtcaggtgtggtggctcacgcctgtaatcccagcactttgggaggccaaggtgggtggatcctgaggtcaggagttcaagaccagcctggccaacatgggaaaaccccatctctactaaaaagacaaaaattagctgggtgtgtaatcccagctactcaggaggctgagtcaggagaattgcttgaacctgggaggcggaggttgcagtgagccgagatggcaccactgcacttcagcctaggcgacagagtgagactctgtctcaaaaaaaagaaagacatcgttgacatacctacatttttttttttttttgagatggagccttgctctgtcacccaggctggagtgcagtggcacaatctcagctcactgcaacctctacctcctgggttcacaccattctcctgcctcagcctcccgagtagctgggactacaggcactcaccaccacgcctggctaattttttgtatttttagtagagacagggtttcaccatgttccaggatggtctcgatctcctgacctcgtgatctgcccgcctcggcctcccaaagtgctgggattacaggcgtgagccaccgcgcccggcctcatacctactttttaatgtcagtacagcaggttatggtatggaatgcattttggaacaagatattaacaaaaattcaaaggaaaaaatacatggccatggaattccagtgctgagagacatttgggaatattgggggagttttccaaaagagaaatccaggtgactgtatttgttaaatgagtaacaaaaggaaaaacaatgtaaagaaacagaaaggaaaggaagagagaaatacaaagatctgagaagagaaggtgccaggggccgctgagagattgccaaatgttaatttcattatttggcttcttattttattctgggtaaaggtagacctattagtttcctgttgctgctataacaaattaccaccaacttagtggcctcgaacaatgcaaatttattctttcaaagttctggaggacagaagtccaaaaatgtgtcctatcagctgaaatcaaagtgttgtgttccttctggaggctctaaggagaatctgttccttctcttttctagttctagaggccatctgcgttccttggctcatgtccttctttcagcaatggcatcatcactctgacctttgcttccattgtcacatctccttgactctgacccttttgcctccctctaataaggcccctctgattacactgggtccaccagataatccaggatagctctctgtctcaagatccttaatttaatcatatctgccaagggttttgttttgttttattttgtttttgccatttaaggtaatatatccacaggttctggcaattaggttgtggacatctttggggcgacaattctcaacctaccatacaaccggtacataaggttctactacctactaaatgcatcataaacagaacttctgatccttcaacaactctgtgaaatatatgacaggatttgcttttaaagttgaagaaatcaggccttggtgcaatttgggattctgcccatggtcaaatagtggggaggcaaacccaggtccctgaacccagctcaagcctgcctgcctcatggccatgcctccattcacctctccccttcatgtctacttcctctttcctgtctgggcctgttccctagctccctggacaagcttaagctgctgttttccagcttgtcatgtgctccttatgacagtgtagccacagcttgatcttggggattgctgattgagcaagctgagtggctgcccctcagaatcttctgtaggcctttctcttgccttcttttattcagtaagtgttttgagcttattgtgctgggtgctagagtagcagggaggacagacctaagttgaagattacgggacaatctaagtgacacctgctatctcagacagagacttcagcatcatagggagccagagcagggagttccaagccgtgggaactgtgactctttcttactgacccttaagcaaaattctaagctccagggaagcagaggcagcagcttgagctccctgattgaccagatatgattaatctttgtttctctgtgctttgaacatgactatgctccataaatatttaaaaattgggaatagggtgaagatagatacaccaaaaggagcaagcagtgtctgaaaccagcaaagacttaaaagttaccgaagaaggtgttcatgctttcattttatcttttttttttaacctagcaactgatgacactgcatatcttcccctgttcttattgggagaaggccttgtgtgtcaccaagaggttctcagaagggacctgtcagtttttggttaaaagaacccggaaagagaaggactatgggggaactgatggcgttcctgttacctctcatcattgtgttaatggtgaagcacagcgattcccgtgagtatcccacgtcctcttctctcctaactccaaagtcgaggcagcctagaaggcacagcttttcttcctaaaacttgtggtgaaaaatatagaagccaggggcagaaacgtgtatgtattacactcagactccaggagcaatggattgcctgaacagtttcccagttcatatttgtaggattttgatgtcaccaccttctgagggagggggagccgttctagaaagactctggaacttcctcactttccctctgagcatggcctcctttcttttctgctcatattttttcttttacttttgtttctcctcttttctaacttccagagtctcatgaggatgtagtcagagtttcaggggcattaacagtggagtagatccattgttcaggtttatttatgtttttcctcaacacaagccctacctgtaataaaagatccaagaaagataaaaccatggctctgggtttgtttactgactgtgagaagtattaatcaagtagaagggagagtttttcattattcggggagctcaagtcactggggaagcaaatgccttctgttgcctcaaataggggaaagggcccatgggctagaaccaccaggcttctctgccctaatcacttgctccctgggctgaggactggtactggtgggcagtgtccagaacttagacttggccaccaccataggtgtgactgatgaacatgagaggaaggagttctttcaaatcacccatgcacatagagagtggaatgactgaccatggagatttggaagggcgaggggggtggatgattagaaattacttaatgggtacaatgtgtgttacttgggtgatggataccttaaagccccaacttgaccactacacaatctatgctataacaaaattgcatgtgtacatcataaatttatacaaataaaaaaattttaaatcatatggc

SEQ ID NO: 4638 - DNA, 6000 bp, Homo sapiens
caaagaggcaccaaaacttaagcaaaagaaagagttcaaaaacagtcactcctctttatcttaacaaccaccaaactttcctcctcttgcatgcctccgcagacctttgggaagatacagaacaggatgtaaagggaggggaagtgaacacaggtactgccaagcctcagggattagactgctccctccctcgctttgacgcgctctccagcttcagctattggcatttgtgaacttgccttattatctctgcccctgacctcactagcttgtaaattgccttgcccagcacaatgactggcctataaaaggtctgccatacacagttaactgaattctggtggttgaatatgcatgttactaataatttgccaacagtaataataaaataggttgtttttttttaaagagacatcacatttacagcttagaaattttgatttggtgagaaattgttttcaccttccacaattcaactctggggttagctgtggacctggtaggcagtgggatatatgaatctgaagctcagggaagaagcctggacgaagtaggaatccaggagcctcatagcatggaggttggggttaaaactcaaagggtattgtccaggaagaactagagaaggtgaaaaccagaggctggtgtcttgggatcccaatcctgaagaaccaggggaggcagaggaggtcaggacagagccagagcagaagtcagagaggagcgagaaagaatggggccaaaaaagccaggggtctgggaagttttcgggattagagggtggccagtggcctcaaatacagctgaataatctagtcacaaaggattgagagatgtctgctggagtgggtaatataatagtcagctggtgaacccatgaaagcaactttggggtgagagggtagatacagtggaaatgggatgggaaatgggatcagaaatgggatcaggaatgggaggcaaagacatgaacacaatcgcgggaggtggtgaacataaggaaaagtgcaagggcttttggttttgaccctgcacccaggctctgctttaccgatctagcttctgtatttctactagttacactttctaaaaatcaaaattaatcctgtcacttccggttatgattaacatccactggcttttgccatttgctggacaatccggagcaaagtctggggccaatctgtttagtgtcacttatttttcaggtttggtttcttcatcacctgtaaaggagagtggcacaggactataatcccttgtccgaaatccttgaggccacccgtatttcagaattcacagccttttggatcctagaaaggtgatacagtgcacatgtggtatattacataataccaccagcagggtctgtgccccaccctggaaccaaacacaccaagtgaaacaaataaagactaagcaaccttacttgaggtcaggtcattttctactaatggagttaccaagatacttttgttttccagagcttttcagatttttggaattgtaataaggctcactgaccaccctggcagagttgtttgaaagctcaaataagatatgtgtgtgaaaatgaagcagaaaggataaccacaaagggtacagaggccctgatcttcttgactgggaatgaaaggaatttttccttttctgacattgtgcatgtgtgagcaatttataaaggacactctctgatagcctttcagaagccacagcaggaaaggaataacctagtttaaaggatgcatccagcagccataaaaaaaaaaaaagaatgaaatcatgtcctttgtagcaacatggatagagctgaaggccattatcctgtcaacgaacgtagaaacagaaaaccagatacagcatgctctcacttataagtgggagctaaacaatgggcactcatgtggcttggctctgtgtccccacccaaatctcatgttgaactctaattcccagtgttgggggagggacctggtgggaggtgattggatcatgggggtggatttcccccttgctgttcttgtgatagtgagtgagttctcacaagatctagttgtttaaaattgtgtagcacttcccccttctctctctctctctcctgctgccacgtgaagaagtgctggcttccaagcacttgatttggcccttctgccaggattgttaagtttcctgaggcctccccagtcatgcctcctgtacagcctgcagaactgtgagttcaattaaacctcttttcttcataaattacccagtctcaggtagttctttataacagtatgagaatggacgaatacgggtacacatcaacataaagatggaaataatggacactggtgactccaaaagggggagggtgggaagatggaaagggttaaaaaggtaccaattgggtacaatgctcactatttgggtgatgggtacactagaaacctaatgcccaccagtatgcaatatacccatgtaacaaacatgcacatgtacccccgaacctaaaattaaatttttaaaaaaagaatgcatcctagtgtgactggggacatttgcataatcaagggcaattcccataacttcttccttatcttgatttctctgcctctgtaggggctgaggctgggctaagcttggagatgctggaactcacagtgatggggaccctcacaatggagatctgttctttactgtcattctctccataactgtgagctctatgaggcagggactgggcctgtcttgttcactgctgggtctctaatgcctagcccagctcctggtgtttgtccagggtggacacttgttttactttttgctgaattgaattgaaactgatctcttatgttccttgtgacagaaggcaaagttggcattgtcttaacttccattgttttcatcttcagggaaaaacccctacacctgggggtcattctgcccaactctgccctctctgcctctgctcattgctctttatagcttccctcaacacacacacacacacacacacacacacacacgtgtctcattaaatgaggatttgggtccctggctcatagccttctccttcatcttattccttttcttactcatagaagactttgactttgtgtggacaacccaactataaatccagcctcaccagggactattgctactctaaaatgttaaaccccaatatccaatctgactaaaacttatttcctgctatattgaattcagatttcctttaatcctggttccttaacttctctcttttgactcaattaattaccagctatctagcatggatcccataatttatcatttcaatcattctcttgccagtaccacctacaacattcttgaccctttgttcttcttcctcatgtaccctataaatccctaatatctgtcttttccagtccaaaatccaagcttctgggtgttgctggagacagaccctaattggggctattcccagatatgatctccagtttcagctttttactctacttgacatattgcttttgagtttctttttttgttgttgttgttgttgttgttttagagacagagtcttgctctgttgcccaggctggagtgcagtgatatgcgatcttggctcactacatcctccatctcctgggttcaagagattctcctacctcagcctcccgagtagagtagctgggattacaggcacccacgaccaagcccaactaatttttttatttttagtagagatggggtttcacgatgttgaccagggtggtcttgaactcctgacttcaagtgatctgcccacctcagcctcccagagtgctgggattgcaggtgtgcaccaccgcttcccacctgtttttttctaataggcttccttattcatttctcacaatggcttttccaaaccttctcctcaaggatccaaacccatccttgcttcctcaaagatccaaaaccacccttcctatttacgaaggtggtctcctgtcttaggtgacaagaaaatgtaccttcttgccctcgtatctacatgctcacctataccctcacccgacttttccctcctcctcaccccatcaaaggcaataatgcacctgtttttattcatctgggcctttggtcttccccttcatatttcccgagacctcgctttcttctttctcttgtattttttatttttctatctcttatgtgtccttctctaaaagttataaacatgcacaaaatctttccatctcaaaatataataccctttacctggtgtcccctgcaggccatcttctttatttatttacttttgcgccagcgtcttcctctgaagcccaggctgggtgcgtagcgcgatcatggctcactgcagcctcggactcccgggctcaagcgatcctcctgcttggaggatcagattttttatccttgcagaagtgataatatggcttcttcctcatctcctaaacaccagtcatctgacatacactgcagatctaaaatgggcctacgtgttctgcccttccttgcctacctgttgagcttgcaccgcttctgtgagtctccccccacccacaagagatccttcttccttcgcgctccactaacccgacataaatgtttatcatataaagttttccgttgcactcttgtgtttatgtctcctggcttcttcaccaagctgtgtgacagctgggccctgtcgcctccttcctcgtatatgcagcgactatcgcagagccgcttaatctttgttgaaggcagctgcggttcagccctgagggccacgggacggacgccactcattcagccctaccgggggcgctgtggcagccggcattggttgccgtgccctccgcttgtctcgctcagctctcgagccacacgccctgggctccgcccactccctgacaacatccctcctgcccattgggcgagcatggacggggctgtccaatggagcgaggcgttggtgcgaggaggcgccgccatcttggggctgctgggactcgcgtcggttggcgactcccggacgtaggtagtttgttgggccgggttctgaggccttgcttctctttacttttccactctaggccacgatgccgcagtaccagacctgggaggagttcagccgcgctgccgagaagctttacctcgctgaccctatgaaggtaaatcgctggcggggccgctgctttgggccccagcccaggatgtcttcccgccatccactcggcccctggagcttccccagcgctcccaggaggtgctgggaatgaacacaaatggaccctgccaagttaatgttctgctctctcgtccccttcttccctgatctagcggcccagtgaggccctgaagctggcaacagccaggttcatctcagccctaaacatttctgcaatcgatcttcccgccccagtccctcagcttcctttatggcttcggttgttttacgagtccctgaagccagggctcctccccctgcagcttcctgtcctttgtcttggttcacttttcctgtaccgcctaggcggtaagggtacctcatgtatataaaactgatgatgttttttctactaccgctcagacattcttgaaagattccaatttggaagcatctgtaccccccagaatattggttcttagtattttgggagtcacaggctttgggaccataagaataatatttgcacctttcctcagaaaaatggtataagtaaatgtataagtaaatgtttgcaaacaattttaagggattcatggacctctgaaatacattcttagcccccacaaaaattataatggaggtggatgtcagaggttagctcattattaaaaagcaaaggagtccaagtgatgggagtttagcattcgggtcttacttttcgtctcttgaggttttggttattttattgtcatgtctaagaattatttgaagcatcttcgtgttaattaaaagttctgcttctttttagaactcagcatattgaagggattttatactgaaaacctcagacctggttatgtatgatgctt

SEQ ID NO: 4639 - DNA, 6000 bp, Homo sapiens
gaagaaaacggaggcttaaaaaagatgaaatgacctacctaactggagctggtttaggcaaaaagaatttgatgacccctatataattggaagagtaaaggtataagtgggcgggaaggagggttagaaagagaacaaataggatgtgtatatatatgtatgtatatatgtatatatatgtgtgtgtatatatgtgtatatatatatgtgtgtgtgtatatatatatatatagagagagagagagagagagacagatttattttaagaaatttttaagattgtgggagctggcaagtccgacatctctaggacaggctggcaggctggagacccagtgaagagtttatgttgcatctcaagtttaaaggcaatctgagatagaattccttattccttgggagacctcatcttttcttaatgccatcaagtgattggatgtggtctacctacattattgagggtaatctgctttactcaagcctaccgatttaaatgttaatctcacctaaaaaataccttcacagtaacatctagggtcgtgtttgtccaaatatctgggtactgtggcctagccaaatcagcccataaaattaagtatgacaggaggtgacaggagccagggcttgctacctagaatgctagctttttatcagttccaaataaaggcatcctagatgaagattctgactgctttggcattggtcacaggctcattcttgaattaatctctgtgattgtgtggtggggtactttggctaagcttcgaccaggagccaatttctggacagtcattgcccagagagatggcatcttctgtttgaactatatgagtagaaagacattagaagaggcggaaagagaagcaatctcctaaaaggactgctgaaccctagaaggagagagagtcggtcagaacaaatagcttacatcaccactacagtgatgtaaggtgacttgtgacagagtttgtatttagtatttagtaacctatttttctccaaatctgatggtttcaaaaccatataatgaatttctaaaagtagagagtagataggttattttgaatgatattgagataagattttgggggcagaaattttagtgtttacattatttattctgtaactatattagatcagtgttttctaaccttttttataacccataattccttttaacaaatttaaaaactacttcactgttgtttaaaattctaagtaatgttaatatttaggctcaatattaattacttgacatcttacatattttgccttgcaaatcctaagatgatagagatattaacatccacatatgaaaaataagactagggttctgaaaggttaagtgacctgatcagagtgagaaaaactatttctcagaagagctagatttttctctgtttgcttgtgagagagattgacagttaagctacttaatgataccatttttatggtgaaatgtactccaagagaatttttataaataagtttcaggattggaaaatacagctttgtgagttttcacaactttgtagtttctaatagtttctagtttttaatgttttctggttacgaaatagtggatgctgctgtttaggaaaaaagacataaaactgtgtttctgggaaggactttgaagatgattttatcttgtctttgataatattggaattgcatcaaaaactgagacagatggcttacaccctactgcctgtacatagagtctaggaaaatggaagtggattgcatagactcaaggtccctcagcctaactgtccttgtgaataacttgaccatttcatattagatttatgtatttatgaaccttaggcttctgaaagcctagcttgggatttgctttccttgatggttcaaattcaccgctccatggaatcagaactgtgagcctttggaataccagggaggtttattcttggcttgttctttatagctttggtacttgtggattcctcaggatgtgtaagcatcttaaaaatgaaaacctgaaagatagtctaaaatagaggatgagtaggatcatttcatttcccttttctggagattactaaggtgaaggtaatagcttttcctgtcatgacatccaagatgagtggtggtttgggcaaaatgctcacacacctttttttattttattttatttttttttgagacagagtctgactctgttgcccaggctggagtgcagtggcctgatagctgctcactgcagcttccgccttctgagttcaagtgatcctcctgcctcagcctcctcagtagctgggactacaggtgtgcgagaccacacccagctaatttttgtatttttagtagagacagggtttaccacattggccaggctggtctcgaactcctcacctcaagtgatccatccacctcggcctcccaaagtgctggaattacaggtgtgagccaccacacccagcctcacacacctatttttgaaataatgtcttatatctgtcttatctacctatattggtgggctccttgagaagttgcatataaatattacttcttattgtggcacagatccttaaagagaattgcttttaaattactagtgttaaaaataatgcttgtattgattatgtgtccatcaactgtagaaaaatatacatgttcaaaattagggagaatataagaaatatggtcaagtatcctaagtgcacacaaagatatgtttagatatttttatttgcctgaaatgagaagaatagttataaaggttaagaatcattgcaagacaacagaataacatttgagcatctctgaaactgtaaactaggtcaagaaaattacttgattttcagtctgatatacaggacaagttttcagtcataatttttttaatagaaagtgatataattgaacatttaattctttttaagttttctgtttagcaatatatgttatactacttggttgtgctaataaaaggaatattgtaagaccagaattttattagataaacatgaatcaaaagttaaatttaattgatcttcttactaagaggaattaatgcctaaagatctccatattttttttttagttgggaatggtcttcaggatatgattagagataacaccatcctttcctccccttcctcttcctcccccatagaccccaaattatgaagagaaatttgtagtcctcaagcttcctccattttacccaaacatagactgtgtttgctgtttagagctgagtcctttgtaatctgttttggattttcaccaagtgagcttccttcctttgctctcccatctttctgccttggctactttgagtcagctcactggcttcttgtagccctgttttcctgcatgcacacttgatctgagcagacactgtcagtgacagcagttagcagcagagcagaaagaattcagtacaaatgtgtgcactgctgatctgtgacactgtagtgttttctatttttgttattatctactttcagaaaccaggagctgagttgatactgaccttgtgtggaatgcctctgaggatttgggatggggggagggtgctagattttcatgtgacttatctctaacatgctgcagcaagactgaaaacattcatctgctcacataaggaggaaagaaaatttccaagattgagcttgcagaatttgttgggtattttcagaaatttttccccgtgtttttgtatttcttgaatttgcttaatttatataagggttggaggtgggggatggtctttgcatgataaataggttgaggtatggaaggatcgggctgcaacaatgattctcatggtaagggactgtttaaaatcacaacatcgcgacccacattgcgacccatctgacaaacggttagtgagctccttggccatctcaaatgtttaaaagtaacagtgtacaaatagctttatttgtatgctttcttccatagacatcttaagaacattgtgcctacgtatccaaaacagttgatttttgtctacatttaaaatctcacctcaagaaggtgagaaatataaatgaagcatgcagttgtcccttaagtatctgctttggtataattttctcactttcctttatgctggagctaaatggagcctgagcttacattttgggttatgtctgagatggaaactgaaatgtagtcttgaagctcgaaggagaaacttggctatactaatctggaggacttgttaaatgctgtcttcccttctccatgttgccgccttttacctttccctgcgaccccagaaatgtactgctgcagaattctttgagctttttctctcattttgtagaaaagaaagtgaagggaggtgtgtgtgtttgtgtgtgcgtgtgcacgcatgatttcagtacaactacaaatgggcagttaaattgttacatcaaaagtgacagctttattttgcaattctgaatctaaggttgcttgggattcgttcatagccactcaggcctgattaaagcatataagaatttaggtaacgatgtttcaaagtaaaagcggagcccagcatgtttgatttgaagagcagaagagataaatgctgctgtggttctttttttactttatatatactgtttgtatatttgatcaattggatttgatatatggtcctaaaatagctttttttgagatgtaatttttgatagagcaaattgcctgtgtattaataatctttcccattttctctgttgtttcattctaaaattgatgcacaccagtgatttaaggggaaattaacacttcagtaaatgtctttttccttagtattgttgactgtttttattagccattttcatttaatttgacagtggtacctaagggttaaccttacagagctgatgcaacccctccttttctttaccagcaattttcattggacactatttccatagcaacagtgacatcagtgaaacctgagtgtttcattgattatttttctcctcttccttttttaatctatcctcttttcaccacattttagtgagaaagcaattttttttttacaaatggagcttatattgatttttatttcataaataattgaaagagggtagaaaaatctgcccttcatttaaaaattgaatgtttcactatgtatttaaaaagcgattcaggattaggaggatggataaccataccagctgtagctgatgttctaaaatattcttgcattgtttgctggtcttctagggaaaagaataatgtggaacaggaccttaaggagaaggaagatactattaaacagaggacaagtgaggttcaggtaagtgaccataaaatttagtgttccactgctgatttaggactattcattttaaatttatatggttatttactatttgctggatgtagtattaggtcaagagaatgcctaatgtttatattatataaatgtttatcttttccaagatgattgttcttgcttggaattctggcctgcaaagattatactgcaatgagaaagcagtatttttcagcatagatttctagttttgaaagtattttttaaatggtacttacctgcatattatatcattaaaggggtaagtttgcatgacttacaatgttaatatttttgcaccagtaaaattagagtgagatcatcatctcatcatcatcatcatcatcatcatcaaaaaccagtatgctttttcatgcatgtgaggtttttgttagctaggagacctagtatgttaaaggactgtttctcataatacttgtagggtgggagatgatacagaacaatttaaagtagcattttatgagtagcttagtaaccagcatatcttaaactttggcataaagagctttagttcattttcattaggtgttgtgttaaattgtttcattttacaaagagaaaggatgacaaaaacctcagtttttgtttgggaaatgataaaaataagggagtagcagtgtttctaacgttagaaatagagaaaactgggcagtgcctcacttagagcagtaagcaat

SEQ ID NO: 4640 - DNA, 6000 bp, Homo sapiens
caacatggtgaaacccagtctctactaaaaatacaaaaattattcgggcatggtggtacatgcctgtaatcccagctacttgggaggctgagggataagaatcacttgaacctgggaggtggaggttgcagtgagccgagatcacaccactgcactccagcatgggtgacagagccagactctgtcccccaaaaaaagaaaaaaggccgggcacagtggctcatgcctgtaatcccagcactttgggaggccgaggtgggcagaccacgaggtcgggagattgagaccatcctggccaacatggtgaaaccctgtctctactaaaaatacaaaaattagctgggcgtggtggcatgtgcctgtagtcccagctactcaggaggctgaggcaggagaatcgcttgaaccagggagttggaggttgcagtgagccaagatcatgccactgcactccagcctggtgacagagcaagactccgtttcaaaaaaaaaaaaaaagctgtatctgttgatagaagtaatgaaaaggactggggcatgtggaaggaagtgggactgagtagcaggttaaggataagaaaaacttccctgaagaaattagctttagactagggtcagatgacaaggtgtggtaggcattctgggcagaaacccttgtttgcctggtttgtaaatatgcccctattgaatgatggagtagttaatatgtaaactttagaagttcaaggaaaacatcttcaaaagcttattcttatagaaaggaatggcttctgttgagataagcgtaggttaagtttggaaaagtcataaaaagatgaaagcttgctaatttcctctaaatatatcaggatatggtcatatgtagttccgctaccagagaagtcaacaaaagctttaacatgtttcctcagcaatgactaaatgtgtaaaatgtcatgcaagattttgatgtgtctgctggtccattattttaaggttcatgttttacaatgaacattacttattttgattattttccctctttctttgctcactgttgattcttgcattctattcaagttttttttttttgttttttttttttttgagacagggatctcactctgtttcttaggctggtgtactgtggcatgatcatggctcactgcagcctcaacctcccaggcttaagccatcctcccacctcagcctctcaagtagctgggactacagacatgcaccaccacacctggctaacttttatttttgtagagacaggatctcgctatgttgcccaggctggtcttgaactcttggactcaagtgatcctctcaccacagcctcccaaagtgctgggattacaggcatgagacacagtacctagcctccttagtaattctttaccaaaggtctttagtgacagtaaattttctagatcccatttgtctgaaatgtctttattttgcactcaacctttgttttttgtttttgtttttgttttttatagagatcagttttcattatgttgcccagattggagtgcagtggttattcacaggtgtgatcatcgcatactactgcctagaactcctgaactaaacaatcctcctgctccagcctcccaagttgctgagactacaggcacatgccaccacacccagcttagtttgcactcaatcttaaatgatcatttgacattacagaattctaaaagcccccaaatacaatattgaaaaccagatacaacccaaatgtctatcaacagctgaatggataaatccattgttatatagtcatacaatgaaatactcagcaataaaaaagaatcaactactggtatacacaataacatggatgaattacagaaacactatgctgagtgaaagaagctagacatgagtacatactgtattatttcttttttcttttttttttttttaagacgtggtctcgctctgtcacccaggctggagtgcagtggcatgatcatggctcactgcagcctcaacctcccaggctcaagtgatcctcccacctcagcctcccaagtagctgggactactggcgcatgccaccatgcctggctaatttttatatattttgtagagatggggttttgttatgttgcccaggctggtctcaaactcctgggctcaagtgatcctgcctcctcaacctcccaaagtgctgggattacaggtatgagcctctgtacctggcctgtattatttattttacttgaaattttaggagagatgaagttaatctataactactggttatctattgttgtatctggatgactttgaggcatccagatgcagcaatggataagtcaagactgcagtctcacctgaaggctggactgagggtctgtttccaagctcactcgtgtagttgttggcaggactcagtgcctcacacgttgtcagactgagttccttaattcttcactgggtgtaggccagaggcctccttcactcagttccttgccacagtgttctcttcaaaggacagcttataacgtacagctaggttcctacagagtgaatgattgagagagagcaagatagaagccagccttttgttaacctaatcctgaaagtgacatccatcatttttgtcatactcgtttcattagaactcactaagtccagcccacattcaaaggtttgaagaccagaaaatgggatcactggacatcttacaggtcaaacttaattttaatagtaatgttttacatgtaacaatgcagaatgaccatgaatagtatgcatttttagaaggctcatgcactaaaactctcatcttttggttaatgcctaaaattccagggagctttgacctttcagtttaaggatttaattagtaaaatatagattatttaaggtaaatttccttttgggcctgagtaatagtactggttaccgttaaaaaatgtgggggttggggcattgacccccctgcacagttgaaaatccacagataacttttgactaccccaaaacttaactactaatagcctactattgaccagaagccttgcagataactagttgattaatacatattttatatgttgtatatattatatattgcattcttacaataaacgagaaaagaaaattttaagagaatcataaggaagagaagtggaagtggatcatcataaaggtcttcatccttgtcttcatgttaagtaagctgaggaggaagaggaggggttggtctttctgtccaggggtggtggaggcagaagaaaatcactgcataagtgaaacttcccagttcaaacccgtgttgttcaagggtcaactgtattgtatatactatatatacctaaaattaaatatactgtatttgccctaaatccacttcagataaagaagataggcaaagaatatggcaaacctggtaagcccacgtaaaaacacttcttttttttttggcctatggtagatttgttgatagaccagctcaatcttctcatattataactatgtactgacaattttagtatcttacgtttgtttcttgaccttagattgtatatgagttggttttctcctttttttttttctttacttgaaagggccatgcttgcaagtgagtattagacattgcatgattttctaatattctctccagttttctacacctacctctgtcatcttaatttctattttcatgcatttgctcaaattaaagatgtggagattaaatgaatgaatacatgtaaagcacgtagattagtatccagcagatattaagtggccaatactattatgattgatgctgttgttctttgatgctttgatctccacaacctacatccaattggttcactttccttctacacgatttgtctcctcctcaaatctaacctttctcttctgttcatcttcttacatagtctcactgctacttggccctactaaaatttatttttgcttcttaccacatttgccacaaatgttgatataaaccatttccattcttctgagatgtatcacctacttacagaggttattatctacccaaaatcttctcttcttcactccacttgaacatacttgcattcacattctcctctctgtttcagatatcaactctttcctcctggctcaaaggaaggtgcattcttttctgactacacccacatctctgtttattatccagttcagttagcattaggctcggctgcaaatagaaaaatccttaattaacagtggcttttaacaaggtgtttccatcaggtgaaaaatctagaaggcggctcttgagggctcatagggcagctccacaagttgatttttccatctcactgctatgccatctctaaagcatgccttcatccttatggcacaaacttgccgcctgaaaaccagcgaacccaactttccaggaagtaaaatgcactttaaaagatcaggagggctgggcgaggtcgtttaggcctataatcccagcactgtaatcccagcactttgagaggccgaggcgggtgaatcacctgaaggcaggagttcaagaccagcctgcccaacatggtgaaaccccgtctctactaaaaatacaaaaaaaaaattagccaggaatggtggcgggcgcctgtaatctcagctactcaggaggctgaagcaggagaatcgcttgaacccgggaggcggaggttgcagtgacccaagattgcgccattgcactccaccctgggcgacagagcaagactccgtctccaaaaaaaaaagtcagggacggcctcctctcttttagatgccgtccctaaagacatgcacacaatttatacctaattggctaaaacgtagtcacatagccacatttggctgcaagagagactataaaataagctattttaagctgggaagcagtgtgtccatcgacacagtgttctgtgactttaaataaaaaattggttttctgtcatgaagtagagactaggtttggtgaggcactcattcatcctttctcacctccaacaataatttgcgtttacttattttttcaaccccttcccatcccctcaaacatagttctctaccttttatctcaaaagataaccaaagaaacctcttgattctggtcatactcttcctttcactgtgacaataacaacaacaacaacaacaacaaaaccttattcttctcctttacaatttctttaacgtttttttcttttctgctattcccaatccctaaacaccatctcacgtttagattatacagctttccacttcgtctcccagttcctgcgagcaccttatatcccttttaccccaaccaagtccttaaattttatttatagttagcgtcacaatacacgagtaaatattgtctttctttaaaaagcacaaatatctcaaacttctcccttggacataccaatggctacattaagctctttagaacgtagaaatgaaagaacgcctcccgggttcaaacgattctactaaacaaatgaaagaacgaatggcatgtaagtgcgtttttacaattcatgtgaacgggtacgctaagaccctctgtcactgcgggcttcgccgccccgatgaaggtctttcccagcaaaaatctggcttgccttctacagctctgaaatgcacacttaaacccaggccctttgtctctgaccgccctggcctgaactggctgggcggagattctcgcgaattctcggatctgcgcggaaaacgcgctcgaggcagttctctgacgcatttccggagcgccagggaagagggaagtcgtggtggtcgcgagggagccggaaagatggtggttaccagatctgcacgggctaaggccagcatccaagccgcgtcggctgaaagttccgggcaaaaggtaggaaatccagtcttccctacttctcgccgcttcgcagagccgcgctcaggcaggcggggcggcgcaagggtccggttaagggtgaggacctgccgacagagaggacccgagcttgccgcgcgcttgggtctcccaggccccgtgctaagcctgtc

SEQ ID NO: 4641 - DNA, 6000 bp, Homo sapiens
caggttcaagcaattctcctgcctaagccttcccacaggtgcatactaccacgtctcgctaatttttgtgattttggtagagacacagtggctcacacctataatcccagcgttttgggaggccaaggtgggcagatcacctgaggttgggagttcgagaccagcctgggcaacatggtgaaaccccatctctactaaaaatacaaaaattagctgggcgtggtggcgtgcacctgtaatcccagctacttgggaggctgaagcacgacaatcgcttgaattcgggaggcagagtttgcagtgagctgagatcacgccactgcactccagcctgggcaaaaaagcaagaccctgtctcaaaaaaaacaaaaacaaaaaacagaagatgataaaaaaaaaaaaaagaaaccctcccgaaaacggcagaaagacagtcataaagggatgcaaagaaatttatacatatgggccaggcacagtggctcacgcctgtaatcccagcactttaggaggccgaggcgggcggatcacgagttcaagagatcaagaccatcctggccaacatggtgaaaccccgtctctactaaaaatacaaaaattagctgggcatggtgacgcatgcctgtaatcccagctactcgggaggctgaggcagaagaatcgcttgaatccaggaggtggaggagggtcccttgagccaagattgcaccattgcactccagcctgggcgacagagggagactctgtctcaaaaagaaaaaaaaaagaaagaaagaaatttatacatatgaacccttagagctataaataggaaacttaaaatcttctacttatgtttgtgtgtgtgtgtatttttagtagggtggtctataactgactagctataaaaagttcctgcttcaaatttgaagagatgtttctgaaattttttctgtcattggaaaataagaaaacttcctactataaaaaaggttgtcacatgtctttctacaatgtttcaaaaggctagtcttgtggctgtttggaaggttatcccttgaggggatacatgacattttaaactctaggctaaagcagggtcatcgcctcatgatatttgcgggacagctgattggaagctggccaagagctggtgggcctaacatgtggactggtgattctccccaatccagaccagtggtgagaattttttttttttttttgagatggagtctcgctctgttgcccaggctggagtgcaatggcgcaatctcggctcactgcaacctctgcctctcaggttcaagtgattccctgcctcaccctccctagtagctgggattataggcacccaccaccatgcccagctaatttttgtatttttagtagagacagggtttcaccaagtcggtcaggctggtctcaaactcctgacctcgactgatccacccacctcggactcccaaagtgctgggattacaggcgtgagccaccacgccaagccgatttttttttttgagacagggtctcactccgttgtccaggctggagtgcagtggcatgatcttggctcactgcagcctctgtctcccaggctcaagtgatcctcctacctcagcctcctaagtagctgggactacaggtgcatgccaccatgccagctaggctaatttttgtatttttgaagagacgtggtttcaccatgttgcccaggctggtctcaaacccctgagctcaagcaatctgcccacctcagcctcccaaagtgctgggattacaggtgtgagccactgtgcccagctgacaaatttaaactatctttggcactcttgtccccattctttgttcatctttcatactgtactcctgctttaacctagcttgtctgcttgccctctcctcatgatatgagcaaattcccatttatattcttcaacatacaatttttttgctttcagaatgctcgcttgtcttttattttgctgggttatatccaatatctattctaagacctgactcacaatatttctaagaagccttccattcattcattcaccatatactggtgtgtgtgtgtgtgtgtgtgtgtgtgtgtgtgtgtgtatgtgtgtgtgtccatacacatataggccttccaaattaacttaaactccactatgtcccttcagcaattaggttaggtaccccatttgttctactgttgtatatactgcatgttttacacaggcattttcaagctattacactttattctgccttccaattaaacattgtagcagtgactctttcatcatctatcctgtatgattgtcccaataattaataataaagtactatagtagcaacttgtactctcttgatcctaacaaaaccctgtaatgggctaatattacttcatccatatgtcttctttgtagacatagaaactgaggtttaaagaggttacattagttattccaaatcaaacggcttgtaagtggcagggaagatggcattcaagacccgggctcaaataactagcctcaatgtattaagtaaggcactaatgaggggcattgcatattaagtaaagccctaggaaaggcattgagatagaggttctgaggacaaagagggctctaaatcaacaatcttaaccgaaaaatacacaaaaaacttgctgggcgaggtcgggcctataatcccagcactttggtacctgaggccggcagattgcttgaggctaacagttcgagacaagcttgggcaacatagcaagaccctgtctttacaaaacaaacaaacaaacgaaaaatacacaaaagcaacaccagaggcccatttgcatggcgtgtttttgtttatttgtttggcctaatatggtttcgttttgtttggaagaagggattgtgccctccaagcctttgtcgtttcactcacctctcccaacctggccctgtccagcccctccctggagggctgggcatatggatgctggaggtcacaggctgcccaggcaggttggtgacctcggaggcagaaccacggcctcgagtcgggcctctaacggcgaaaagactgacgcggttggaccgcgccattcccgaaatgttaaggagcttaaactccgcatcgtcctccaagataagtaggaaaagggcagtcagaaagaacgtcttccccgtccgccgtcttcctgcgcgcccttctaggaacccagcgtccatcccacggcctgatttactaagggagtcttgtagcatacgggagggggaaaagtcattgattgcaattacggtaatttggttagttactcaaacggtcgtttacatataacttgcatgttaatatacttctggaagtatgcatatgtccatacttctttaacagggcacccacggccgcctgctcaccctacttatgcagcaaattttacttctctctcggcttctttagcctcgcaaacgctatcgcttaggtccgcttcttaaatattggcccctcctcccacccgtaagctcctcccttcgccctctctccctcgagagcttccaaacatcttttccccgcccccttttctatttctgaacaggcatgttccaggcagctcacccgactccttagattactatggaatcggtagggtcctgaccgctggggaagcaggaaagcgtatcctgggaagaaaggcttggcttggactccggagaagaatactacatcgagacctgctggggaattttattttattttattatttttttggtcttggttgtactgagggaggaagaagaggttgtgtggcccggtcgaacttgtggcagcctgaaggccccctcaggcggcgccgcgggcagccccgcagccggggcctggtgcagcctccgcggccgctgtcagggaagcgcaggcggccaatggaacccgggagcggtcgctgctgctgaggcggcagtgtcggcagtccaaccgcgactgcccgcaccccctccgcgggggtcccccagaggtaagctactcctccttcatgagtcacctttgccctgttgggtgggggggggggtccctctcccaccctgtcccgcacagtcttccccacctgagttcgactacgaaactgccctcttggtgtcagctgcaccccgggttccttctccaccctttcctctcaggcctggggtcctcctccgctttttggcttcctcttctattagctcctccctctgcctcggggattcccccctccctcactcatccctgttgcctacgtctcgaataattcttttttttaagtcatgaaccctttccatatcagacgactcccataatgcccatccttgtccttcctcgtcgtctctgcccctgccccaaaccttttccatggactccacctttatctcttttcctagtttgcacttttcctcctatgtccctgtgcaactccagcactgggttcccatttccctgagctaaagattgcatccctgtcttcctgtgctgcttctgattccattacctcactgtcacccacctacccagccagctcctggcttccaagaattgcctgttcccttctccttaagggatctcgggcccttgtcatcaatccaaaagtaccatttacattcttactttgaacctagtcctcactcttctctgggatgcattatgatccctataactttctttagcttctctttctccctcctcaatcccccaactttctagaggtttctgtctgtaggggagagatttgacagtgcccttcccattcaggatttccaactttgacacctccctcgagtttcagggatttctctgatccttgtgacatttgttctgtttttcccgtgggcttcatgtgttctctgttacactctttatctccacataccacttatttcaggatcaactaaaccttgaactaagaagaaaaatgtgttgtgagcagggggagcctcagctgcctcaggccgttcaggacagaagggtgtttctgaaggccggagcaagttttgaagaagtccctatcagattacacttggttgactactccggagcagccactaagagggatgaacaggcctgcgtggaaattgaatgagattgtgagaaaacttgtttcagattatttaattttaggcttttgttaaaggaatcacagaatagagtgccttctcacccctgtccagatccatgaggaatcagtttattcttgtggtttactagaatagttttggttggttccataagaattcaggcctggagtggggtaagggtataactggaaaaaggaacatgagacaatggaaagagcttgtacattcagaatcgggactcctgggttcagcatgtgacttcctcacttgacctctagagtgatccttttggaaaatgcccactctctgtaggcatcagtgcagtaataagttggtagcaggatgtgggttgggggaaaaaatcagatttggtttatttgtttacaaaacattttgggttcctcaggcaaaaggtatttattagtagtggtttagtcatcctgagaattttccttcaccttggtctttctgtcagatgtttctagtccacaaccaggggtgtaagtcattttgaaagacaagctccaggcctgcttccttcatctgctttgctttttcccccagtgcattaagtggctgattttctgtcctgttcctcacgtacttgatccataactccagattctataggtagaaagtatgtttgtgggaaagcactttgaggaagctggctggaaaagagaacttggagtgaactgagacttaggcaactagttgctgccatgtctctctcagcctgtgatagcgaaagggcacgtgagattccattcattttctgattctaggtctgtttgggagtagttatgtcatcttatcccacttcctttctcttccttgtcgttagtcatggtgcagtctcctcataattccccttattagaagctttcctgccaggcgcggtggctcacacctgtaatcccagcattttgggaggccgaggcag

SEQ ID NO: 4642 - DNA, 6000 bp, Homo sapiens
ggccccacccatggtccaagtcaggaaccccctcagagcaggatcgcagggccacaggcttggtcagctgtgagcatggaggaggaaagtttgagggccagagccaccaagctccagggccacctggtggaggaagaactggctgcctgggtgagcaaggggagcacccccaccacaggactgctctgaggtgcaaggctagaggccaggagccggtgccacgtcagggaggaagctgggtggggccaggcaggagcaaggggaggtgggcggggctgggtggggccttgccacctcggggcagtcttttctcctccctcaccccagcagagcccaggccatcaggccactcgcctccacacagcctagtgaccacggcctgccagtggggagcatctcccgggcagaagggcactgtgtgtgtgtgtgtgtgtgtgtgtgtgtgtgtgtgtgtgtatgtcaggtgtcaagactgaacagcagaaggaaaaaaataacagaatagagtcagaggttagggaagctatagggggtatagggcatggttgaagggctttctgagacaaaagactggccatgtgttctgtgatgagctgctatgtggatgtaggaaatgggccaaggtctggcaggggaatcctctttccaggggctccctggctaggtgtttcatagatgttaactgcatgaatgggtgacacccccccacccaccaaccatgctccagctaaggccctcccctcaacggctgctccccctggaggtccgagtatccatgtgacccccatcgacccactcatgctccctactgcccaatctccacccagacccggccacgcagcagcagcagagaagggaggccttcctcttcaggctggtaggccagggaagcctggcccgtggaagccagagaggggtctgtatttgcaactctcccctcctcttcctccaaacatcctctccccctactcccaacccccacatctctgaagccctggtgttttcaggcatagataagcaaccaagagatttcagtcccacagagatttaactctggctgtaggatatttcttgtgcacctccaatgaaattacaaagtaaataagaccaacacagtccctgccttcacagggctttacaatttggcaggaaagacccatttcatagacaatgacacaattacagcagttaggtgacagttggtgacatggtgagtgccaggaaataaaatgcaaggagctaaatgtgtcagcacaagggcaggggaagggggtgtgtgtggcttctccaaggaagaaacataatcagagacctgagggagaaagagaagttggctagattaaggggtacaggagggacaggcattctaggcaaaggagcagcttgggggagtcccagaggcagtgaggagcctgacacttctgggtacctggaagagggccagtgtggcccaagggcagaggaggagagaggggcactgcagggggtggcctgcctgcccttcagacgccaggctctgagggaaggagtgcggcagtgggatcctaggagtggggaaagtgtctcagcccctcatgatcttcaacctttgacgtcaaccccctctcttgtctttacagagctgctggctgcaaagaagacccacacctgtgagtagggggtccggggcaagaaaatggctggggcataatgagatggagaataattcagcaagtgatctgtggggggactgaggttggacagaggtggaggagtcaggaagagatggcaggcaacaggaaagcaaggggaggtgcgaggaaaccacagatcagggcagtgggaggagatgaggaagaagcctgaagcatgaaaggaaacactgtaaagaaaccaggagagaacaaaggaaaagggaaccgccttgtgaaaaaaggcgaggagaaatgctggacagaggcagggagatgggagggggtggggccgactgccaggccggggaaggaaggagatagaggtaggggggtgtgcggaggcggggtggcctcaggaactcaggaactcagcgctgctgccaagggagacagggagcctgcaccaggctttttttttttttttttgagacagagtctcacactgtcgcctgggcgggagtacgatggcacaatctcggctcactgcaacctccacctcccaggttcaagcgattctcctgcctcagcctctcgagtagctgggactacaggcacccaccaccacgcctggctaatttttgtatttttagtagagacggggtttcaccatgttggtcaggctggtctcagactcttgaccttgtgatccacccctctcggcctcccaaagtgctgagattacaggcatgggccactgtgcccagcctgcaccaagctctgtggtcctgagccaggtttggtgttcatctctgtggttaacacatcctgaggtgtgaacaagcctggagccagcctgtgcaggactagagagcaggagagctttatctctgtaggaaacagaatggacaggggcactctgtgtcctggggccctgaaagccagactacagcaggtaagaagggcactagagctcagagaggacttcccagtggacgctagtgaataagaatcctctctagggaccactcagcacatcagctctcctctcctagtttgtggcaaaggctagtcccccagagaatgcacacagtcccaaagctatgcccatcagggccatgcgtgcccttctgtgagcatgggtccctgaatcgagaggatccctccagggtaggagtggccacaccatttctccatagccgtcccttgactgccttgccagttcctcctgagagctcactgccatctcgcccaatgccaaaattgtctagagcctccctgttccaagtagagacatctcagagagcaaagcattgcccttctccatgagctgggcagcccagggctgagggccatccaggatgctacctcctcctgggtgggggttgctttgctcagcataatcctgatcagtgtctcgcctgcccctagccacagggccccacggaaatgctgagcagggccccgggaggaaagcgggtcagggagtgacgcgggtgagctgggggaggggggtcacggaccttatgtgggtggggggagtagggggactttcggagcagcaggaactgggagaggtcaaaccctattcctacccttaacccctgacctcagaaacctcagccaggactatacctccttatccctttcccatcccaccagtcctcgtgtccccaccccaagagtgttgtcctgaggatccaggctgacagcctctcccccactccacggcccagctcctgaagccccaggaaggcccaggaaggcaaggaaaggcctgtgcctggatgagagggtctggagtcccagcaagatcagacacctctcaggagtttgccccacagaatccaggagacattaaggcctcccccaggccgagagactctgaaaattggctcctgaattgagacaaccccaagatgggggtccaagatggggaacccgggggaactccccagaccaagagggagcctgaatactgaggggccctgaagagggactctcaaagccaatgtaccccacaaagcacctaagaggctgagaaggtctctggaattgtttggcccctgagaaggacccccctcccccaggccaaaaaacactccagagagactcacataccgagggacctcccaggctgagacaccctcaaaagcagacttgaaccagagaaaccctcccatccttcaagtgggatccgaagccagtctgcctgggcttgaatcctgactctgccacttactagctgtgtaaccttgggcaagttacttaacctctctgtgtctcactttcctcctcgaaatgaggataatggtagctacttcataaagtttttttattttttctttttgagacagagtcttactcagttgctcaggctgtagtgcagtggcattatctcagctcactgcaaactccgcctcccgggttcaagcgattctcctgcctcagccccctgagtagctgggactacaggtgctcgccaccatgcctggctaatttttgtatttttagtagagatggggtttcaccatgttggccaggccggtctcgaactcctaacctcaggtgatccacccaccttgggctcccaaagtgctgggattacaggcgtgagccactgcccccggcccacataaagtattttgtgaggattagattatccacataaaacatcgagaaccatttctgacacataatagtaagcactattattatgattatgagtatgatgatggtgatgatgatcattatctacactccaatttcagcagtttggctcctaaggaaatttctggtttccttctgtggattgtgggtatttgcctggtgattattactgcttctatcatttccatgtattccctagcgcaagatatatgtggtgtctgcagggaggagcgtgggcatgggagtggtgggacagccccccaggctgcaccacactgggtatggctgttggcagtccacagggtgtcaggtggcacatgccaccaccccaggcagacatcctgtgacttacctctgaaaacatccctgtccctgaagtcacctggcaaagagggtcaggcttggaaggtcctcgggggtaggaggagtagaaatttggcttcaggctcgtgtgagctccattctggctccccagccagaactaccctggcgggtggaaacagcttttaccgcgtgtggctgtcgcatgtggttttggaattttccaacgccccctacgattggctgcccctcccctcacaccctgccccaggcccagattggccacgtggggcgcctgtcatcctactcactgcaccccttgggggtggggtggggggttgtcacttggccacctgtgtggtgcagagcttaaaccccccagtccagaagcactgggggagagagctaggtgcagagcttcaggctgaggcgctgctgagagggcctcgccccgcctctgccgccagctgcaccccactcctggaccaccccctgctgagaaggacagggagccaaggccggcagagccaaggctcagtcatgagaagtaagtgaatggggccacctgggggcgggggagcctggaccctgtcgtcacccctctggaaaggaggatgtcttgggaacagtgtgagcaaatctgagcaaagcagggtgcgtcctggtcaaggtcaagatctgttgggagatgggtggagcagctggggagtcctgctggccaggcggctccctgacagcagcaatggtaagaggactgttgaggaattcctgagttccaaaaagaacctccaaaagtatctgaggtatccaggcccttaattttacaaaaagactgagagccaaggaggccgcgtacttggcccaatgttacacagctggtatctgatgggggctggtaattactaggggccctgaacgcactctcctgttacagtgtttcccttgttacggtgtttccctctgtgcctccagcctgcttgtgagtaaaaggaggccagagcagttgctgtgctctgaagcaacaggacagcgagagtcaactgaggttggcaggcagcagggcacagaatccccgcgtccaggcctcaaagccaccaggctttctgcccaatccagggacatgaggactatgtggaatccagtcagggtgcacccgggcacatgcctgcgtgtgtgtgcatgtgtgtgtgtgcgtgtgtgtgtggggtgtgtgtgtatgtgtgtgtgtggttctccagggtcagtcacccatttgaccggggaagcaaggcaatggagatgggattggaaagacctcggcctcacccttttcctggcttggagccctgggccaacagttggtgggcagatgtctggggttcctgtgccttccagcagagcaagggtgggcaacctcagg

SEQ ID NO: 4643 - DNA, 6000 bp, Homo sapiens
ctacaggtgcatgccaccacacctggctgagtagtagtatttttattctggtagagataaggtctcgctatgttgtcctggctggtcttgaactcctaggctcaaacaaccctccctccttggcctctgaaagtgttgggattataggcgtgagccattgcacctggccaaggggatgagctttaaagtcaaacctgaatttaaatctgagctcggccgccttttagttgtgagaccttgggcagatcttttcacctctgaccctcattttcctcatctgtaaaagtggggaaggaaacaatacctaccttacggggttgccaggagaatgaaatgattatgtatataaaacactcagcctcaggcttaatccatagtaaatacccaatagatggctgctgttctattctgtccttccctcctcctgcccaccacacatttacagccacagcttcactgtcctgtccctcaggatggctggctttgatggctcagcatgggatgaggaggaggaagagccacctgaccatcagtactataatgacttcccggggaaggaaccccccttggggggggtggtagacatgaggcttcgggaaggagccgctccaggggctgctcgacccactgcacccaatgcccagacccccagccacttgggagctacattggtaagttgcttggatggaggcgggctggggctagggtgggagtggttggttagggcttctggtctcaccttatttttatccctgcagcctgtaggacagcctgttgggggagatccagaagtccgcaaacagatgccacctccaccaccctgtccaggtatgaagggagccgagataggcagagctggggagtgttggaggcagggctgggatcactgtagagcctccctttcctcagcaggcagagagctttttgatgatccctcctatgtcaacgtccagaacctagacaaggcccggcaagcagtgggtggtgctgggccccccaatcctgctatcaatggcagtgcaccccgggacctgtttgacatgagtgagtgctcgtctctctcctctctgcatccccacctttctacttggttctggcccttctcctgcctatctgctctttccttcctgacttcccttccctgaagtctgggtcttgggtgtgtgttgtgcctgctacttcccctcaccctccctctatacttccagagcccttcgaagatgctcttcgcgtgcctccacctccccagtcggtgtccatggctgagcagctccgaggggagccctggttccatgggaagctgagccggcgggaggctgaggcactgctgcagctcaatggggacttcctggtacgggagagcacgaccacacctggccagtatgtgctcactggcttgcagagtgggcagcctaagcatttgctactggtggaccctgagggtgtggtgagtgtggcagaggtgtgggtgaggggtggcaaaaaggaaggtacagtaccctacagtgtatccctcttccttccctcattgctttgtagacattcccgctgggcagctgtctatgggcctctcttgctctttaaagtgtctggcatcttcctccagaggctcatcccttagcctgaactatgttctttatagtcctggcacagggccaggcgtggtggctcacacctgtaatcccagcgctttgggaggctgaggcaggtgaatcacctgaggtcaggagttcgagaccagcctgaccaatatggtgaaaccctgtctctactaaaaatacaaaaattagccgggtgtggtggcaggcacctgtagtcccagctactcaggaggctgaggcaggagaattgcttgaatctgggatgcagaggttgcaatgagctgagatcacaccactgcactccagcctgggtgacagagtgagactctgtctgaaaaaacaaaacaaaacaaatacagtcctggcccgtcctcaaatccccaagccttaagcttatcagagctagaaggcagtcatctcatctgtgcccctcttttgacaaataaggaaaccaccctgaagaggttgtgatgcccaatgtcagatggttagaggctagacactgcaagtttccttttgtaagaagatccaagggcttctccagctccccagactcaggactcagaccactgtgctttctcttatctgcactgcctcactgttcttcaaaactttccttgtttagccaggtgtggtggttcatgcctgtaatcccaacattttgcgaagctgaggtgggaggattgcttgaggccaggagttcaagaccagcctgggcaacatagcgagaccttgtctctagtcaggaatggtgacacatgcctgtagtcctacctacccaggaggctgaggcctgaggatcgcttgagcccaggagttcgaggttacagtgagccatgattgcgccactgtactctagcctgggtgacagagaccctgtctggaaacaaaaaaacttttgtttgttttctacagtaatctcagcttcctttctttttttttgagatagggttttgctttgtcactcaggctgcggtgtggtggcacacctggctaatttttgtattttttttttggtagagatggggtttcgccatgttgcccaagctgttcttgaactcccgggctcaagtgatccgcctccctcggcctcccagagtgctgggattacaggcacggaccaccatgcccagcctccacatctttttttgcactgtgtatactcttctgagacatgccaacttcctccaggtcaagaaaggggtatatagctctcagcttcactctttcagggctgatgtcgcctttgccttttctcacttcactgacctgtctattcctacaactgtctctttctagagaagcctcaatgatcaggattgacaggccacactctcccccaccatttttttctcctccttcaagcctcttgtctgtttcaccctcttccaccttggaggctgaggtcttatttgactcttcacctgaattgaccttcttccttcccaccctcccaggttcggactaaggatcaccgctttgaaagtgtcagtcaccttatcagctaccacatggacaatcacttgcccatcatctctgcgggcagcgaactgtgtctacagcaacctgtggagcggaaactgtgatctgccctagcgctctcttccagaagatgccctccaatcctttccaccctattccctaactctcgggacctcgtttgggagtgttctgtgggcttggccttgtgtcagagctgggagtagcatggactctgggtttcatatccagctgagtgagagggtttgagtcaaaagcctgggtgagaatcctgcctctccccaaacattaatcaccaaagtattaatgtacagagtggcccctcacctgggcctttcctgtgccaacctgatgccccttccccaagaaggtgagtgcttgtcatggaaaatgtcctgtggtgacaggcccagtggaacagtcacccttctgggcaagggggaacaaatcacacctctgggcttcagggtatcccagacccctctcaacacccgccccccccatgtttaaactttgtgcctttgaccatctcttaggtctaatgatattttatgcaaacagttcttggacccctgaattcaatgacagggatgccaacaccttcttggcttctgggacctgtgttcttgctgagcaccctctccggtttgggttgggataacagaggcaggagtggcagctgtcccctctccctggggatatgcaacccttagagattgccccagagccccactcccggccaggcgggagatggacccctcccttgctcagtgcctcctggccggggcccctcaccccaaggggtctgtatatacatttcataaggcctgccctcccatgttgcatgcctatgtactctacgccaaagtgcagcccttcctcctgaagcctctgccctgcctccctttctgggagggcggggtgggggtgactgaatttgggcctcttgtacagttaactctcccaggtggattttgtggaggtgagaaaaggggcattgagactataaagcagtagacaatccccacataccatctgtagagttggaactgcattcttttaaagttttatatgcatatattttagggctgtagacttactttcctattttcttttccattgcttattcttgagcacaaaatgataatcaattattacatttatacatcacctttttgacttttccaagcccttttacagctcttggcattttcctcgcctaggcctgtgaggtaactgggatcgcaccttttataccagagacctgaggcagatgaaatttatttccatctaggactagaaaaacttgggtctcttaccgcgagactgagaggcagaagtcagcccgaatgcctgtcagtttcatggaggggaaacgcaaaacctgcagttcctgagtaccttctacaggcccggcccagcctaggcccggggtggccacaccacagcaagccggccccccctcttttggccttgtggataagggagagttgaccgttttcatcctggcctccttttgctgtttggatgtttccacgggtctcacttataccaaagggaaaactcttcattaaagtccgtatttcttctacctctgcctcttaacccttctgggaagcctattgtgtacgccgcgggccctcagcggcagacggggaggcgggaggtcgcggccgcccagggaagctgggggtctgcagagtttgggtgcggcagagtggggcgtttcgcgccaccgtccccatggggatgtcgtgtccgcagagggggctggctccgggtgggtcgaggcgggagccgggcctgcccggcgccccagcaccggcccccgggctacctgggcctcccgggtgcgccttcggctcgcgcgcgcccctccgcggcggctccaccgcccgggatggtacggtccggcagccgggccgcgcgctgccgcccctcggtgagctggtgtgggccgccgctagcggagacgaccctttccactcgcgtggtgccgtggtaagcctcgtccctcgcccgccgcctgttttcaggcgtagcgtctcgtccggtccttgctccccctccccgcagcgctcagtggtggtggccgcgacgagttccggttccggttgctgccgccgctggcgggcggcgagtctggagagagcgcgcagtttgcgcggcggctcggcgcttccctgtcgtcgcactttgtggttgctgcagctcgggggcctgggctgcccctgacaccccttctgggcgatggtgcagcccaagggcgcctccatcccccgccgctgccgctaacccgggtcccccactccatggccgcctcggcgccgcccccaccggacaagctggagggaggtggcggccccgcaccgccccctgcgccgcccagcaccgggaggaagcagggcaaggccggtgagcgcgctgcgaggggcgggggctgaagaggcccaggacttgggaacctcagaggggagggatggtgggcggggggtgtttcacagtctgaaggcttgaagggaggctcaggtgaaaaggatgggtgggtgtaatcctccaggggttgggggcaggtgtcacacattgaggactctagggtttggagccacatggaattcagtactcacttggagcttgaggatatcgaaagatgggatatctttcatttaaaggaagacgtagctgagagtatgatcatcttcacaatctatttttcatattgcaccccttgttagcatttgttgaataaataagcaagtatgtattgacgttaaaggagttcctcagagcatggctgagagaaaagaggttggggaaacctcagggaaacttgtctgcgtcttccttttgccgctcttccaggtctgcaaatgaagagtccagaaaagaagcgaaggaa

SEQ ID NO: 4644 - DNA, 6000 bp, Homo sapiens
tacaaattaaaatgtcaaagtcccattggacctgtggattaattcatctcaaagtttctctccccataaacagacagactcatggttcaggacaatcaattttagttgcttaatccacccgatggcctggctctgatcccagtgaggtgctctggtgttctgggtagaaggtcccaagaggttccgttctcaaggatcttccttcctcagttaaaaaataatcgtcagctgtcactcctggctttgctcttctcagtccatgtctggcagggacctggcttacttaccaagcccagaaatattcccctggcctcctctctccacccgctactcttttctctggcacgccgttgttagttatccttcagatctcggcttaaacatcattgccactaagtcaggggccttgcacgtattactgcatcttaccacattgcgggccaggagctatttccgtgtcagatggggtgttctgtgaggatagggactgagtctccttaattgccatttccccagggcctagcacaaagcctggctgtttgctgaatgaatgaaggttctgcaggatgtggttgatcttggcgaggtgaagatacctttatcttcaaagcctcttcattcttcctcagatctgtcatcagggaatcacatagcctttacaagcgatttcttctcgcctccactcattctcttgctaacaattcagttggtggcattcaatcgcctccctttgctcttgtgctttgttgatgtagtgacaactccagccactcctttaattgatggggactatgtgtgtgctgcttgctcttctgagtctgtcagcttcaggacattgcttgatgggagagatgtgggcatatccaggctcctcctagaatcccacttcttctgaagtgtaccagtcagaaccactgaggtttgggaaacctaagcaggagcttggggagtccctgtgtcacctgtgttcacggctcttccctgccagctttgatttgagccttagtttcgaacccaacccacaccctcaaacttagccccacatgtcgatctcatccctctctgtaaccagaatccgacgttgtcccatcaccacccatgcaacctctgagccccctgcccttctcatgcaaccatggcctcacctggcagacctccacctccaaatcatcactgaaagctgggtggacagacagcagctgcaaggctccttggcttctctgtgactctttgcctatccattgtcactcacagcttctgctcccagagtcttacctcagaggtttcctctgcaggacagctcctccctgggtgctgcagggtgagccctgggctacatggggacttgggagagggggctgaggagcttgctgactgtgtggggaggagtttagaatgagtcaaattgcagtgccagccaaggcaggggttgtggggagcttgattgagcctgagcccagggagtctggcggccactgagaggggttggggtgggcaagtacaggcaggggagggcagggcttagaggagtggggtggagttgccatgaaagggactttggaggaagaataggctttggaggaagagtaggcagcccaagccctctgtccgtccttcccagaaaggttctggggctgggctgcacttcatctggtaagcaatctgtggccttctctgagtttttgtccagcctcttcctacctcctgtatctccctgtttactcctttctaagccagtctttgattttctgttactgtcttagaatagaagcaaataccagtcaaagcagggccattcttccctggagagtcatggatttcttaggaaaaagcaaggggcccttttggaaatttgtattggttcccagctcgtggcctgggccctctgcctcctctgtatccctctgagtctctggaggggccatttagaccatgtgtctttctgtctgcctctgtccctgtctctgtctttgccccttaactcatcactatctctcccaatctctttcttctctctctctggggtcacagggggaaccccagtagtctcctggaccagacctttataaaacctgaaaaggaagtgggtggggaaatgagatgtttgggctggagactggttggggaaaaatgagagggaggaattgggacggggtcttcctaggagtggggccctcttccactgctgaggataaggcccagagacttacacggactgtgagctgggcccagagggaggggactgtaggactgtgacatatgctttggaaactatgctgacaccccagtgccttcaccccatccacagcctccccactgctgccctccctgaaaaccctgcagggctcagggtttagggctggaaggctgacagcttcttttataggactcaaattgcaagaaggtagcaattaagcctcagagggtcaaggggaaacaacaatggcactctgccctttcaggctttgaaagacccccatgtggtgccccataaagtggctgttctaggagcatgtaggccctcagtttctcccaactcccatctcctaaggactccaaatccagaccacccctcctccccactcagtaagactccctctgatggaccccatcttctagttcggtttggtgtcagagcccaactcattgtcagtagcttcctgcgtctcctccccagatgtttttctggagcttggccaggtggtgagctttagtagtggagcaggacttcagagggtccattctctatgggatttagttgcctcataccccttagatgggctcgtgtacatttggcttcctcctccaagtcttgggaccccaatcaacatgtgccattagtagtctccccgcactaaggattgaaaattctagccaaacctggatttagcagatggaggctgaagtctttctatattagaaataaaacctcatctttgatccccatcaactcccgctgcttacgtgtctttaaaccatgttccaaccctaaccacagcctatttcaatgtgaatctcaaacttagttctaacccaatgctaaatcaatctaaacccagcctttgatttagccctaactgtattcccaggcagagctgtaaatgaaactaaaactctattccttatcgtaacacaaatcccagccataaacctgagcctcaattctagctgtatttctaaccctaatcccaaccttaactctaatcccaacctcaaatctgacctcaacctcattcataattcaactaaccccaaacttaaccccagctctaacattagcccacatccagaacccaattaaatctgaagcctgcactgtagtttagtggaaccacaatgttactgctttctcctcaatctctctgttcgtggtctgacctgttttccctcccactcaccctgaccttccatggttcttgttcgtgagtgggtctagtaatccacaggatcaccaagaccattttttggacctctctggactgacaccctgggtacctgggtatcccagcttaggcaccagccgcattggctgaatccccatgtttctccaggtctctgtttccccatctgtaaaatggggataatgatccctgctcttcaaagggagcaggacaatcccataaacctaaaaataaataaggaaataaagatattcattgtgtacatctggtaggtctcagagcgccctgttattgttgggagttcaggtgcaacggcttggaatgcagagacgcgtggactccttgtgtttccttaatgttctgacttatttttccccagaggggtgggccctggcagcatccctgagccccataactctccctaacactcttcctcctctgccctttctgtgccccatggtagggatgggggcagtccctgactcctttgagggagttgagctattgaatggggtcactcatgtcctgactcccaccatggagtccaacaaggcacatgcccattctgtcccccttagacaagccaacaaggggtggcccttcacttgctccccatgcctaccaggaccctccccaccccagcacgaacttacccagaactgtgctggtttagtcagcccgatgaccagtccaggttatgagggtccttggtctcaaggacccagttaatactgggactgcattaaccctcaagacctggctactctttctgggcagagaagccaggacaccaagcgatccctcaagaagttcactcagaggggcttagccatcctcacagagacaccctgacacagacatcctgcctccctcccacagacattgctgaggggtgcacacgcttacacaggcacccccttccctggtcctcttggcgctgttctctccaacactccctcactagcccatcagtcaccttactcctagcacacaccctggaccccccatagcacccctgctcccaggggtcccctacacttggggatggccttgagtcgagtatgggtgtggaggacagttccagaggggacagccaggaggagactctgttcctgcacacaccccttctctcctctttcagctcaggaggcctgagtccctttgaaaggcctgaagcctgggggaaggtgggctggacactcctggggaaccctatgccctgggatcaggattaactcttcaggtcctggccactctttctcccaagcctggcttctccttcctcttccccacttcccccagggaaggaggcagcaaatgagtggtgaggggagcccttggaagctgtaaatgaggtgactgttgtcaccctgaggatgtggccaggaggaagtgaagtttaacaggtgcctaattacaagtcccgctggctgtcctgtgccactcttaggacagggaagagcttgggtgagggctgggtaatgcccaggtaggccaccctgtcaccctgctaattagggttcctgggactcctccccaaggcggggaccaggccccctccctcccatagaaataactccagctgctccccagctgggcactcattgcaccttcctgccaccccaggcagtgtctgggccctcagctccccctccctccacctaccccctcacacccaccactacgaccccacgggatacccagcccagacggaggaaacaccgagcctagagacatgagagttggaggagcattccaccttctactcgtgtgcctgagcccaggtacggggctgggcagggggcagggtagccagcatgaggctaggtgggaaggaaaggggcagcaagggctcacagtggagcctggggctgcctgagttgcctggcagggtgctgcccacccttgccctgctgcagccgggtgtgggtattaccaggggacctttccccaggagaccctgtgcctgatgttcagggtgtgtgtctgtagtgcagaggtctttgagtggatctttatatgtcccctgtcgggctcacacatgtgtgcaggtgccctgcaagctcatgccgtgactaggaggagagggattgattgctctgcaggagctggaggtggggtaggagaggggtaagcacgggcattgggtgagggctcaggaggagcttgggaaggatcaattttcatcagactgtgtgctattcccaacgctactccttctctcccaaggccagggccaaggggcagggaagtcacttgccttgaaagggcaagagactaagtctggtgtaagtctgagtggtttcttccatcatggccagtgacagctcaggcctgagacctcagccttgggccccctgtgctatgacagggcagtgccccactctaggatgaggcctgagggtggtggggatggcaactccagagacttctcaccccaccaggacaggtccacagggcagggctcaagtttggacattgtggcttcctgcccaggttggggcaagttccaccaaggggcattctatgccaacatcactggaaagggctccgagtccctcttgcagtctggatttgggatgaaggggcatgaaggagg

SEQ ID NO: 4645 - DNA, 6000 bp, Homo sapiens
ggaactagcgctactgcactccaaatacgggcttcatgtgagcccggcttacgagggccgcgtggagcagccgccgcccccacgcaaccccctggacggctcagtgctcctgcgcaacgcagtgcaggcggatgagggcgagtacgagtgccgggtcagcaccttccccgccggcagcttccaggcgcggctgcggctccgagtgctgggtaagcggggatctctgggtacggtctgagccgctgtggatgcagggggaagcagagatggggactgcagagatggatggggcagaggtagaacaggaataaaaagtggggtcatgttcaggtgagggagcttcatccagctagctatcctcgcacccaatccagaaattctctccaagtaaccccaaaagctggggaagaatccatttattaggaagttcttccttccgacgacatgaaactccctctgttacttttgccctgtggcaatatggcactggcttattctcttttctgcacaacaacctttccaaaagcagaggccctttgtcgtgccccacccaaatctactcttctccaagctaaacttactggttcctgacacagttccaccaaagacaatttcaaagcctctctcaccatcctgtgctccatggtattttttacaatgtgggtcctgaatgtgaacacaggcccagcaatggtgtggccatacacgatcagaggagctaataccttccttgatatggaccttcagtgaatgtggtctgagatcacaatcgctttttttattttttgagacagagtctcgctctgtcgcccaggctggagtgcattggcgcgatctcggctcactgcaagctccgcctcccgggttcacgccattctcctgcctcagcctcccgagtagctgggtctacaggcgcccaccaccacgcccagttaatttttgtgtatttttagtagagacaaggtttcaccgtgttagccaggatggtctcgatctcctgacctcgtgatccgctcgtcttggcctcccaaagtgctgggattacaggcgtgagccaccgcgcccagccacaatcactttttaaaccatcactttatattgtgggcacttgtggtgaactctggacttacggtcaagttaagtcttttccattctgtgttaatattttgaaggtaaaaataaaggtttttggctgggtgaggtggctcatgccctgtaatcccagcactttgggaggctgaggtgggcagaccacctgaggtcaggagttcgagaccagcctggccaacatggtgaaaccccatctctactaaaaatacaaaaatcagctgggtgtggtggtgcgcacctgtaatcccagctactcaggaggctgaggcaggagaattgcttgaacccaggaggcggagattgcagtgagccgagatcatgccactgcactccagcctgggcaacagacggagactcagtctcacaagtagataaataaataaataaataaataaatacataaaataaaggtttttatagtttccctttattcacatataagttaataacatcagccttggagtaaaaataaaaacccaagtgtaaatctaggctttgtcacctaatagctgatgacttgggatagtcacttaacttccttgtgctttggtttcctcatctggaaaatagagataataatacctaactcactgtttgttgacagaatttgagataacatttataaggtatttagcataatagttgacacatagtaaatgcttactagatggtggttattattattaggtagatgatatctggttagttttttaattacttcattattttattttttaaaataacctacgttcattgtaaaaaattcgcacagtagagaaggatacaaagtcacctgaatttctaccattcatctgcgtctccatgaaataagagaaggaaagggggcctgaaagtttgtacttgtgcaagactgaaatgcgatgagtgggggcctcctgacagggattgtgtagacctgtgacccctgcctttccccatttgcagtgcctcccctgccctcactgaatcctggtccagcactagaagagggccagggcctgaccctggcagcctcctgcacagctgagggcagcccagcccccagcgtgacctgggacacggaggtcaaaggcacaacgtccagccgttccttcaagcactcccgctctgctgccgtcacctcagagttccacttggtgcctagccgcagcatgaatgggcagccactgacttgtgtggtgtcccatcctggcctgctccaggaccaaaggatcacccacatcctccacgtgtcctgtaagtacttggatgcttgggtagggaggcccaaggggttctcagcagattggtgagatgccacaggtccctgagccatgccaggctggccagcctgggtcctggaggctatatatagtatgtgacagagcactagtccaaatgtggaagacctggagcccgatcccagaggatagacctctctgagcttctgtgtccttatctttacaaaggagattgccttgtttcacagggttgttgggagaatcaattagaaacatggaattgaaagcactttctaaaatattagtttaggatttggaaatagataaacttagacaagccctagttctacttaccagctgttattcattcttgttaggcttcattttcttcatcagcaaaatgggtataattatatataactcataccaactttagagggttttgatgggaattagaaactatgaatgcagagcaactcacacagtgcttagcgcatggaaggcgcttggtaaatggtagatattgttttcccagtgctagatttcaagcctctggaggggataagactgtcagcatttggctcaaagcaggtcctcaacaaatgtttgttgaagaaatgaatgaactagtaggattgttacacctttgaaaaatcaggcaacatttattcagcacctgttctatgactagcactatgctaggcaacacaggacatccagaaaatgtgtgatggatcactaccttgagggacttatggtctcattgtacaggtaaaccaatacagactctctgagcttagagaggggagggaacagtgtggccaggagctgtcagcagggtggggctgagctaggtttggcagcagatgagtaggatggagaagggcaaggggagggtgtttcaggcagggtggggtgggggcagggccctttgaggtaccacatgatcaaaggcatcattcccattctttctcctcccacttcccattccagtccttgctgaggcctctgtgaggggccttgaagaccaaaatctgtggcacattggcagagaaggagctatgctcaagtgcctgagtgaagggcagccccctccctcatacaactggacacggtaagggcccgagcctgaggaaggcctaacttgagactaggttcctcccctctcagggccaggatataccactatggaatgggacaacatattctgagcccccaaataaattggggtatgtgttcagatctcttgtattattatactcatcatacaagaatatgtatggtcaccaaatattattggcttgcccagggaatctaagatacatggtcattagtagggaataaatggataagcccttaaattttttgtcttttattttatttattttagttttgagacggagtcttgctctgtcgccaggctggagtgcagtggcatgatctcggctcactgaaacctccgcctcctgggttcaagcagttctcctgcctcagcctcctgagtagctgggattacaggtgcgcgccaccaaccccagctaatttttgtatttttagtagagatggggttttaccatgttggccaggctggtctcgatctctagaccttgtgatctgcccacgttggccttccaaagtactgtgattacaggcgtgagccaccacgcccagcccttgtcttttatttttatttttttgagatggagtttcactctgttgcccaggctggagtgcagtggtgcgatcttggctcactgcaacctctgcctgccaggttcaagagattctcctgcctcagcctcccaagtagctgggattacaggtgtgtgccagcatgcccagctagttttttgtatttttagtagagatgggctttcaccatgttgaccacgctggtctcgaactgctgacctcgggtgatccgccagcctcggcctcccaaagtgctggaattataggcgtgagccaccatgcccggccttgtctaacttttaaattgtgaaatataacacaatatttcgatattaatattttatatatttatgtgagtgcataaaatggacaagacagctgtgtctttttctaattgttgttaagccaacactcctataaccaccacaatattgctagcacctcaaaaacacccactacctccagttccctcaaggcatccttggcctttttccaagatctgaaatatctagagagtcagggagaggttgggtacacatgtgtgtgagcacatcatgggcatgttctcacatgtgagcatatgagcgatgcatgtggccttgtgcctggggctatgtttgtgtatcctgccatgcaacatcacgggtgttggagcaggcagtcacattttccaattacctctacacccagctaggagtggagtgtcctgttgtgtggactttataacatgtgtacctggtacccagtgttggatgacgtgatgcctgtggaagcatgtgggatggcacacgtgtggatcttccccgggtgtgtgtggggggtgcccaggtcaggctgggcagcagggagaaaggacctctgcctagacctgcctggtggagggaggggcaccgtgggaacagcctgcggctctgggtgacgtcatgggggtggagggtggagagctgtctggacacgttgggtggtggtggcttcagcccttcccggctggcacccttcagcttccctgtcttccaggctggatgggcctctgcccagtggggtacgagtggatggggacactttgggctttcccccactgaccactgagcacagcggcatctacgtctgccatgtcagcaatgagttctcctcaagggattctcaggtcactgtggatgttcttggtaagcactggagcagaagtccttggtaaggacctgggccaagggcttggtgggggcagcaggaagcaagacagagacagtgaattgggaaagtgtttattcagagggggctgggctgtgtgtcttgcagagaatcaaactgaggtgtggttttagatgttttgcgggggagctgtgaggtctggggtgggttgtggctgcaggcttccacctcagacagtggcctgtctccagcagacccccaggaagactctgggaagcaggtggacctagtgtcagcctcggtggtggtggtgggtgtgatcgccgcactcttgttctgccttctggtggtggtggtggtgctcatgtcccgataccatcggcgcaaggcccagcagatgacccagaaatagtgagtactgggcactcctgggtgggtagaactaagctgagaacaaagaagaggatagcaggaggtgggccaggaccgaggagactgggtaggctgaaaactgaggagtttcagactagaggtgggcagggtgtttctagggctgaggaggagctaagggtctggagcacagatggagcactcaatccttccaccttagtgaggctcagatccatgtgcctggatgttgccaagtatgcacacgcacacagcacacacatgctcttcagcctcactgccacctgcagccacacactcacacttgcagggccagcacggcacccacaccctccgggcctgtctcactaggctcagccaggataggctcaccttgggaggctgccactaccctcagctcctgacaagggtgtgtctttcc

SEQ ID NO: 4646 - DNA, 6000 bp, Homo sapiens
gacctcctccttatccttgcagggtggaatgaattgctgattgcctctttctcccaccgctcagtttccgtgcaggatggcatccttctggccacgggtttacatgtccaccggagcagtgcccacagtgctggggtcggctccatctttgacaggtgtctctctcctgcttccagtatttgtgtgtattatgtgtgtgtgtgtgtgtgtgtgtgtgtgtatacacatgtgtacatacatgaattctcacgtgggcatgaacctctgggtagtgctgggatggaggatgggcagcccaaacagttagctacacatgaccatgcagagaccactaggcacatgaaactataaacctggggaatgagggagagattaaaagaaagattgagatcacaataagatggagccactcagaggccagcacagttgccaggcagttgggagaacctattctcccaatggatttcctaaggagagattagatcttgacatcagctagtaagttgtgggtggagagggtgaactgtttatcctgggggccaaggatgggaaagggatcaggatctgtcctcaagaggccaggcaagatggactgtttatgctgggctctggatgatctcagaaggaggcctgcagcaggagcaaacccatcttcgtcaggcagggataccctgacagaaattctgtgccttaaatgatactaaaggaaaattaagccatctgataaggagttgaataaaatgagtagttaatgacttgagagtgagaggatggagaactggtaaagaggagaattaagttgaaattaatctctctgtccaatgccagggccccgttgtccctttctacctccatcgtaaatggtcttctttggtcatgtgcacatccactgagctgtatctattacttccctgccctttcccacatgttccatgtagagcccaacatggtgtttggaatgactcatcccccttcgtggtaaccggacctttctaccagttcattgaatgctgccctctgctgtgtttttctagacatgcaatccccttaccttgctgtgcctgttgcgtttctaatttccaagacttccatgatgcctttccatttccctgcttggagttcattgcttcctctttggaacccacttggactttgctcatggcagttatattcctgggcatcgtgctgctgctagtttttaatgtctgtttctttagttaaactgtaatctccttgcaatgaggggttgcatctttttcatttctgtacccctagtaactggtacatcatctggaaacagagtgggcttataaaaattttggttgaattcattttattggctcttggcctgttacttacggttttctcattacctgcttgtttcctgttaacagagtcctaactgagctggtttccaaaatgaaagacatgcagatggacaagtcggaactgggatgcctgcgagccattgtactctttaacccaggtaaccgcccttcaaccccaggggatgtgtgtgttcagccctcttccacggtcaacctccagtgctcccatgttattggtcctccatctcagctgagacacagatggcagagccaggaatccaggagagctcacagtgtcagctagagccattttggaaaatgttttgaatgagtgtggcaggcgcgtgtctggggcaagtggggaagatgaaagatgacggtggcccagggtggcagtgaagggggtggtaaaaagcgatcacattctggatatatttctagataaagccactgtgatttgctgatggattgaatatagaatgagaaagaaagaaaggagttatagatgactctctgggtttttttttttttaagttttgttttcctgaacaatgggaaaaatgaagttcttattcaccgagatggggaaaactccatgaggagcaagttctgacagcgggtgggtaggaatcgggatcttgtctttggacattaaaataggaaatgggtagtagatatccaagagtggctgcccaggaagcaactgctcatatgagtctggacttcatgggagaagccatgtgcatctgagagctgtcagcctctgcctgtgtaaggctgtgacactggggtgagatcatctggggagatagagcagagaagatggctggggactgagccctggggcatgccaacatttagaggtcaggtaaaaaagggagagccagcagaggaacctgagaaggggcaggcagtgagatagggacagaatcagaagggtggtgtcctggaggctcgagggaaaatagtctttcaagaaggaggcgatcagctccagcaaaccctgctgtggtcaagaaagatgaaccttcagaattatgtagtcattcatgcagaggctttatctccagaattaggcagttagttcatcaatgcaggacatgtgccaattcagctttcgtgccccatcttatgactcagtccatgctcagcacataataggcactcggtaaatgtgtgcaggtaatatttcgagaatggtccggataaaattaagctctcctccttagagtcagtggtgggtacatttgcctattcatggagtttaaaatctttgccccaagagtttgttgggtaaattgggcacagaaagaagagcaagggggcatgaatgaccagctttgtttatttcacacttgtccccatccagggtgtctctagtaactctacagagagtggccagagagaatggggacagcctctgctggagggtgtgtaatcaaaggctaactcagtcatgtcttttagatgccaagggcctgtccaacccctctgaggtggagactctgcgagagaaggtttatgccacccttgaggcctacaccaagcagaagtatccggaacagccaggcaggtgagacagtgctggcagaatcgtagtaacagcagcaactactcccactcttcatctactgagcccctaaagtgcagcaggcactgtttaggtgtttttaaatgttatttaatcttcataacaagctgaaagccacaaaaatgttaattccattgggctagcggccttatctgtcttgctcaccattcactcctctagcctcaacacgtaaaatagtgcccgacacatagtacacatctttaaatggaggatgaatagcaaacaaatgaataaatgtgggaattattatctccaatttctatcaagaaacagaacctcagaaatgtaagtaacttgctgaagaccataatgctagcacgcggtggaggtgagatgtgaaccctgttcgtgtgatttcacagagcctgtgtttgaggtgtgactgcattgctttctggtctgcccccatagaaacccccatgcagtaggaagtacaggctttggcagccagaagatatggatgctggtccccagggtgccacgtgtgtggcatctgggaaggtgctgggtctgagtctgggctcctcatttggaaaggtggatgttggtctagcagatctctgaggccatctagcagatctctgaggccatctagcagtataggtatttctgagttattaaaagatattctcaaaactttcttccaaagtacagctaagccaaagagttttccctctctgctaatgccagttaaaatgagaaagtatgatcctcaaatctcatagaaaattggaaatgaaacggaaaagcctgtcttgaagacattaattttgtttgggggattaattttacatgctcccaatgctcactaatggtttccattcctctgtgaagtctaatatctacttagctgtttatcctgaatcataagccaacctctagcaattgtccagaagagactgagctgtgttttttgttggaggctgtggatgaatttgagtaggtgggttttggccctttggtgcaatgaataggcagggcctagtatattagtgagattaagctgtaatagacccaccagatgccaccagtttaacacaaacatctattccttgctcacaaatctgggtgggcagtcagttcagagaggtggttgccttgcatgccatcactcagggaccaagactccttttttcttgtgtctccaccatgacccagagccatactgtgttttgcatccagatgatggaagggggaagaggtggaggggcagagaggctaggccatatgggccagacctcggtcttagagggccctcaccttttcattcactttcattagctgatgccaagtcacgtggcccagctggccacaaaggaggctggagaatgtatcctgttgtatgccgaagaacagaagaaaatattggattttggtgaacctggtagttcactatagatgagattgagagagccctggccaaggggtcaggacctggctgccagcaatagcttggcctctgtcaggtgtgagccttgggcaaatcatcttaattgaagccctgagttggatgctttctatcaaatcttccattttttgagcacatattatgtgcaggacattacaaataatgagagtcgtacatatcattttcctgaaattgtctctgtcttgctgtttatcttaaaaaaccaacaaaaaactccaactcacttttttcctaactataaaagcaatgcatgctttggttaaaaaaattataaaaatattttttaaaaatatgcggtggctcatgtctgtaatcccagcactttgggaggctgaggctggcggatcacctgaggtcggttgttcaagaccagcctgaccaacatgtagaaatcctgtctctactaataatacaaaaattagccaggtgtggtggcatgagcttataatcccagctactcaggaggctgaggtaggagaatcgcttgaaccggggaggtggaggttgtggtgagctgagatcatgccattgcactccagcctggatgacaagagcgaaactccatcaaaaacaaaaacaaaaacaaaaacaaaaaacaggtaataagaacttattgtaaatattttggtatatttctttccagtgttgtcgtgtatctattatgtctcgtgtgtatcctcgtgtaactattatgtattacgcatgtcatgtatgcatttctagatatgaaattatacagtttggtgtattattttcttcccttagccattctagaaattttattcaattactgacaactacaaattatcattttcaatggttttgtaatattttgcagtgtgaacatatcctaatgtatttagtcatcgccctgtgattgacatttgggttgtttctaattcatatcactttgaaaactttggaacttgactcttctgccagaatatggctggcagggggctgggctgcctccacactctggggagagaggccaacacttgttgccaggactagggcagaacttagaactgcaaggaggtggcagagtcccctgcatagtctcctgggtttgtccatcacagcttggactgaggctgactgccctgatcaagtgttcatagttggctcagtaggtacatcaggggtgtcactggccaggcatgtgggtgtgctgagggctggtcacctctggtccgcagaacctggttgaaggggatcctggcacagccaggtagaggcagatttctcagtgggagagtgctgccactctgtggaaacatttcagaagtgcatgtcacaagggccacattctgctttcactctgatcagaaagcagagatcaaaagtcaggtcacagaactcacacacacactctcttgcacacacagcaggcaccttcaaaggcataaatgccccttgctgctaacctgtgggtgaggaatgctgtgacgttcatgggtgtgtttatttctattagccttgatctcagttcctaaatccaggtcacacaacaaagagggtagtatgatggcatacttcgaattttagatattgtaaaatcgtggcctttttagagttaaaaaaattttttaaagttaatcccagtctaactttgtacttacagagaagct

SEQ ID NO: 4647 - DNA, 6000 bp, Homo sapiens
ggcacatctgacatgataatattttgttgtattggtagagtctgtctcatttccactacttcattttatcccaacaaaaacctgatgagaaagtcaatgagttgtaattattcaacacatgaggacaaataaggaaaagaacacaggcttactcagttaaacaggaaacatgcaaaaagtctcattctgattctataccccaagtctctgtagacctctgttcttcatgatttaattcaagctacacgtgagttgaagacatcaaggcaaaataggttggatccattcatatcaaattaggtctatacgatttgatagtgttagaaagaaagttttaggcacacatgaataatgactaataacattttggctgatatggtaggctactggtaaacatggttgttgataatttcatcttggggtctgggtgcagtggctcatgcctgtaatcccagcaactctggaggtgaagacaggaggattgcctgaggccaggagtttgagaccagcctggacaacatagcgaggcctcatctctacaaaaaagtttaaaaaaatagctgggcatggtggcacgtacctgtagtcctagctgctccagagtctgaggcaggaggattgcttgagcccaggagtttgaggttacagtgagctatggtcaggccactgcactccagcctggaatacagagccagatcctgtctcagataataatattttattattaataaaaaatataataataaataattttatctcattaaaaaagggcagttttgtaaagtgtagggtttttatatgtgtgtgtgtgtttttttttttgagacaggggtctcactctgtcacctcagctggagtgcagtggtgcgatcaccgcttactgtagccttgacttcggggctcaagcaatcctcttgcctcagccttctgagtagctgggacaacaggcacatgccaccatgccctgctgattttttctatttcttgcagagaaggggtctcattacattgcctaggctggtctcaaaatcctgggttgaagcgatcctcccgccttggcctcctgaagtgctgggattacaggtgtgagccaccggaaaccgtaggtttgaacatatttttgcatggattttttttttcctgagctgcctttaactctacacaggaattagagacataaacttgtctaactttacctgagctctccagcatttttttcgcatccttcaaaaaaacaagtctcactccaggctgagtgttcttgctttttctcctctctcacatcctgtgtcatacttgtaagcttggagctggagggaccttggagactggttcaacccttccttgtgcaattagggaactgaggcccagaatggttaaataatttgccagaggtcacacagcgagcactagcagcagctccaagatgagatcacatatctcctgcctacgggttcttatttgttttcctttccttttaaatggaaattttaatatcttgacatcaaaaattcaaaatatagcagagaaagactcataagagctataaagtcataataattaagtttacagtagcttttcaagtactacaattatatacctgctcacccacctcactccccatatgaagttctaccttatcatagaatgcttccctaaattgttttctagggactgtctaaaatatggagaaattagcttgtcatttcttcagctgaaaggataacacttttgctacataaaacttttaatttctgtcaaattgaaaagtggcattctaggtctccataaggcaattttatgtcaattaatgcatcagaaggtatttaatgagagccagtgttgtacttagcactatgttaggtaaacccgaagagaaagcggaaaaatgcatatttgttcagaaaggaattgggaagtgaagagggagttgaaagcttcgacactgggatcgcagtgtgagtcaacagagtgtatgagatgaacagtgggtgaccagcctgactgaaccatggctcagtgatgccagtagttggaaataagtttgaataggtaggtaggtaggtaagcagagagcttgatggcgaacactcaggacactttaatttgaaccccatctgtgtaattttgagcaaattactcaacttctctgtgcctcagtttccttggcacagaaatggggataataatacttccattcccatattgttgaggaggtttaattagatttacaaggtctaagcatgagtaaagtttagggcattgccttctatatcttccgtctaccttagtaagcatttttatgccctttggtttggttgggaagtgaaactgaacatgctccaacaatattaactattatattttggatgaagccggaaaataaagacttgaaagtagtctgcagagtttgaacttgaataagcaacagagagcggttcctaggcagagttggatttagagaatctaggcttagaaaggatctattcaaactccagagttcttgggtacgctgcctctactctttgctagttgctcaaacatctcactcctggggtaagaaaccactcagctgcctgaactggcatgtggagtggtgacaaacagcatggaagacatttgtctgaaaagaacaaaacaaaattggatttcagaggattaaagttagtcaaattgttatggttctttcgctttgtggtgagtctttaaaggtccaattccaaggttaataagtaaaaaagctggagaaccaggatggtagattgaatattaacgagtacctcttggatagttactggaaagttaccaataacgcctatagtaatccctccttgagttctcaataggcctttgccctctttggaaacatctatgcctctggtaacatctaagcacccgacaagactgcaccaattcatccttctggcatgccaaagggacagataagcaaagtgagccagagaagctatgtccaattttcaaggtggagagacataggccaagttttgggatctggccatcagtcaatagtcctcagaccctcttagtctagtttctccaattcagatcatctggtctctgcataattacaatatcttccctgtggaatttgcgaatgattcttggactgtgactctaaagggaaaagatctagtaagttacttgctgttttcattaaacttatccgacctctcaaataggtaaactatttttaaaccttcgagcagctgcagattattatggatgaattcaaaagtttttctctcaatcggctgtgcttttcagattcaaaactctccttgtgcttaattttttgcaacctcggcctctgctgtcatcttttaggaatttggaattagtaggaacagtgactccaccaatacatgatggtgacaaaggccaactacaggctcggtgaaaataaaaattcctaaacaaatgttgttactccaaatggataattattgataaagcagagcaaagcatttgccaaacctggtgctagatacttatttatcaggaatatgccacatgttgggtaatatacacaacattatgattaagagaagctacataaaaggtaccagacaatgtacaaataacacaaatattagaaaaagaagtaatctgtgctttacctgccatgtggccacaccggctaaaaatgcattctcatatttgcagaagtaaacgttaaggattgttcttgagaccactcctactgattctgagcataattataaaaataacagatacagtgcataattagcaataacatctttgtattaaaaaaaagttttcctgctgttgtagaatgagttaaataaaatctagttatccttcttgcccttccagactcccctggtgggccagatgcccggagccccccaaattttatgatgtgtcagtcgagtttctcaactaggggtttgggcttctctctgggtccctttctctctatttgtctctcgctctttcttccctgacccctccccatttttaaaaggctttaaagaacatctctgggagacaaaaatagctccagttgtgagaggcctacacaccgggaatgcaactgagagatgcaagtcagcaagtgcgagccgcgaacatgagtgtctggccctgggtggatgctcctcgctgtcttggtgccgattctctgcctgggcccggtgggtagaagggaaaatggtttttcagggttgggaggtgggttgggtaggtttgggatccctagccgtaggaatggaaaccccagcattcgggctgagggggctcttccttcccctccccccacgtttttcaaatttattttgcccaggcggggattggtgacggtcaaaagggagcagttggcactgaatgtcaccctgaaggtaaaatgaaagacaaaagatgaacgcatgcttgctttccgtttgcagcggctgcggcggcggcaggagcagcaggatttaaaggggaaaaaaatcacacgcatatgcacacatatatacacacccagaggcgtcaattatgcaaacgcaataatgcaatcaaatcatgacagtgccgggaattttttttagaaaaatatagatatttatttttaaaaagagaaacgcatgcaaacagaatcgtgcacataccacgtaaccacccgaggagaacctggcagcctctctcttcttctgccaagttatcattgagaaaacagacaggcatcatgacgtcctgggtcacagggagtgcggaccgacgctaccaagagaaaagggaggcgccttggcgctccggctagccgtgggcgcccctctgcccctcgcagcccggctcggtgagtgcacagccgctcgggacgcggaccccgggtgccaggccggccccgcgcccgcgggggcagagcggggggccgtgcccttgccaccggagggccggccagcaccccctcgcctgccgaggtcgcgggagcccagttaaaggaggcgtgtgtaagatgtgcaatgttcctgcatgggggttttgtagactttcatagccaaagaaaccggcttcggcttctttaaaatccccgacgactcacctgattaacctgctgcagttctgaccctgccaaggtaactggtccaaatccttatcatcaacatctggagacagacatttgcatctggggcattctttatttgcagtcctggttgaaatctagattgctacccccttcccccttcacttgcttatagtctcttggaaaaaaaaaaaaaaagcaacccctccctgaataacacaaccataagtactgcccacctcttgtagacttgccttaccatgactgcaaaactgtgagcgtgtgtgctggagacacagatgaattctaattgcaattagatttgttctttaaacacccctcccatcccccttcctggatagagacttcagtgcttggtaaagtggcaaagagtgagggcagagttagggcgctgggaggggaggggttagggtgaggggatatggagcaggggtcgttgggggagagggtggtgccaggagttgaggactgctgtcatgggctggaaaatccttctggtgattgctgctgctgtagtcctaggtgtctccctcctgtcctctacgctgctttccctcccttctctctccccaaccctttcaccttcccgagggagtcgctgaagttgcacggaggtcacccgatcatcatttaactattttaaaccatctacctccttctacccctcaagtctgttagagcctctgcaggatagacccctgcaccccttgtttggtgatgggagagtctcagagacagaaagacacagagggcaaagctcccctcctccctttcttttcccttccggcaaccttttccaagctgcaccctctccccctttcagaatcttaatgagcaattctggaagagtccggaagggcctgtagaaacccccgcctgcctcagtgctgtggaatgattatgtatgtgtttatttattgtgcttgtctcgg

SEQ ID NO: 4648 - DNA, 6000 bp, Homo sapiens
gtggctccctcgccaggcctggggtcctttccagcaggtggggaaggagcacctgccccatcactgggtctcacttgcgttcagttgtgtgtgcagggctgtctgtgagggctgtgctgaggccttcctgaccagcacatggggtgggaaggacgacctggggaatcctgaagtgatctgaagacagagccctgggctggatagatcgtctcggccactttccaggtcttgggagtgggggatgatggctggaggaggtggccaggccttggcagggggccctgtgatgcccgcctgtgctgagaggtgggggcagcttgggatgctcagtggtctgaaagatagggtggggtcttccctcggagtgtggagtttaggcacctgggaaccggagctggattcaggggtgtgagatggaggccctctgcttcctcgaccgcctgccaggctggggtgacctgtagtcagctgtgctttgctcctgaagccgcacaccagcaagtgggcagtggttctcccacacttggctactcaactcctggtcccagggactctggcctggggcagcgctgggcctggggtgaggagctgggcagcgggaatggggaatggtggctgtgggaacccgtcctacccctgggctctagccctgcaacctgtctgttggcccccagcccctgatggccctccaacacccgccccccaaccccaccaggctgttcctatgagatcccaaaggctcctcagagcaccaggcttctcttggactgtggggagaggagaccggtctgcgtggccaaggtgattgaggcctctgaggggcctcatgccggtggggttgctgtcccccttcctgagactcaggagccctgtgggtcagggcagcacagcaccatgggtggtttgtgacctgaggcatttgaggggacacgggttgcaggggcctgcaacaggctgggagagcaggtaggtgagcagctggcttgtcctggaagaccctctccctcctggcagccccaggactgggggcaggagggtatggactcagagaaggacccgagtcttgcaggaaggggcctgaaccctcccagtgggctgggtcctggggaggagacaggtctatgcaggtctatgctggtggctggggccgggcagggccagggcaagaactgcgtttccaccacctgtgagccagaggcctggagccaactggatttaaagaggtgctcaggtgggaggtcccctctcttagcatcctcagcctcgtttcctgacacccagaaggctggggagtgtctccttttctttacacactgcccccttcacctggccacagcccaccctgccacagagtcacggagggctccacaccaaggccatcgtgacccacatgccacctaactgtggtcatagttacgggccagagctcacagcagggctggggcatcctctccatcccccagcctacccaggaccaggaagggagttaaatatacccgctcctataaaaagcactgccgcctccagcgttgcacacagtgggaggacccgtcacgctgcgggagagtgggtggggaggccgagtggccggggaggggctcctgcaggaggtggagctaagacaggcgtggcaggacccccaaaaatgacccatcgggaacacagggctctcagggtcctaggtgtgtcacctgcatctatgaggggccatgtgggcaggtgaccggagcacagatgtgtctgagcccagtgctggcatttctagcagtgtggccttgtcaggtggcctaccttcctcctgccagctggcaggggagacatctcggggcgtggctgctgcaatgcgctgtgcctggcgggtacgtgcgtgtgtgccatcaccacgtgcacctgtcttcaggtgatctcgtgtggagcctctatgatcccctaggcctgtggagactcagcacagtggtgggagcggcccctcacctaagcccgcagtgtgagcggagaatgggggggtggggcttcccggaggccgtgattcctgagctcactcttgaggggcagatgtgtttccagcctggatggggataggagggagggaccagcactgtgacctttaaaccctgggctggccggcagtgtcacaccatcaaatgctgtgagggagatccacccccactccacagctggggccacattccaagaggagcggactctctgaggccctggaggcagaggggaaggggccaggacctggccctgcacaccagatggggatggggagccagtgctcagcctggcttcaaggtcccgccaggtacccaaggtctctccactgccctgccacattggtccagcagctggtcactcagagcctgtccctaaggtacctctaggctcccatcccagagcttgctctccatgcccctgcaagcagtccagccccgctcaccctggtgagctgccatcatcaccttcttccccaaggctctgtcttgggacgtagcaggacctcgggctggactatggagggagctgcgggtcctggtggatgaggagcatgcccgccatccaggaacagtgcccttggccatggtgtcagggccttgggagaggtctggctgagccaaggtgaccaaaaggggagaaaggctcaggagccctggtgcagggaggtgactgggtccttggccatggggttgggacctggggggaaccattggtccacaggtccagccgaagcccaggagaacagctggctgggcatcagcaggtgcccgttggatttggactgggagtcccagggccttggacaaggcagggccaaagggagagggagatgctgaggggagagagaaggggaaccagaagggaagtgaaagggccaggggtgcatgtggtttgagtttgatttgagccaggacgggggaaggccagtggtgatgacagccctcatgactatacttacagtggcagcagacgggccacatagcgctgtgtgctgggcaccctctaagctttgcagatactggcccatttaaccccacaatcctgggaggtaggtcctattgctcctattcaccgaaggggatactgaggcccaggcaggtgataacctgcccacattctcacagtgggtaatgcagagctgagcagcctggctgtaagacctgaggtgggagagtagcagaagaggggtgggggcacagccaaggtttggggaggaagacagggatctggtggggggagcatgggtaggttgcagggatggcaggcggatggccctcactcagccttctggggtgggggcagggacacccagacagacagcgccagagcctggggtgggctgttgctatagcaacagctggctccagctcccagtgcacccaccctccttggagatggggggggttcctcctgccccatttcacgagcctgctgggaagtgatgggtggtagccacccctctgacatgacttattaatgataattggacccaattaaacatttattaaatccagacagctgcagccgctaacggacccttccctgatcctgggtgggccatgctgggggtgggggtgctcaggatgggctgccgcaggggctctgggttttaacgtgcctgaggcagctttgttggccacgttgaggtctggtgatgggacgtgtgtcaggcgctgtggtctgcagctgtaagaactaaaatgagcaacagttcctgcacctctccaagaaggaagttcgctttgacagagagtgagggcgatggaggaggcaagagtgaggtggggggccgggggatgcccagggaggagggggcgtgtgggtgccccagggatcccagggagcgatgggaggctgcagaagggcacaggcctgccgcgggtggggggctggccagggagaataggagatagtagaggcggaggccaggaatttgcacttctccagggaagctggggaagagttggggagagggaggcaagaagattccccacccatcttaggcgcagggagcggtcagggaggcgccagaggtgggccagagctgtgacctggcctcacaccccgtcccggtggggctctcaggcccctgagggccagacgcgggacctgggtgcgacccgggcgggaggcggcagggctcagctgtgctggacgctgcagcagcgcgggaaggggctcccccggctccatggggtgaatcggtgaggggctccggtgccgatgtggaaggagctcctgagcagaactggggcctggactgcttgtgcccgagttggtttcgaggcgtctctgcttttcgctggaggcccacgaggtgggtgggaagtgggtgctcgcccgtcgcagaaacagagtcgggtgccgcctgcggcagacgcccctctccgcgcctgcaggtgcggggtgggggagaaaggtcatccctggagaggcccggggctggcgggaatcctcggcgggcggggtctgcgaggggcagggccggtcctgtgagcgcacgcacgcgtgtccgtgtccgtggtggacccccgatgcggcgcgggggcgggtgaatgcgcgggctgcgagcacggcaaggtctctcaggcttgtggacgtgggtacgggcgtctcggcaccctgagctttctcccctacccgccccagcgtgccggggaatgctgtgcggcttcggcgccgtgtgcgagcccaacgcggaggggccgggccgggcgtcctgcgtctgcaagaagagcccgtgccccagcgtggtggcgcctgtgtgtgggtcggacgcctccacctacagcaacgaatgcgagctgcagcgggcgcagtgcagccagcagcgccgcatccgcctgctcagccgcgggccgtgcggtgagcggggcggggccggtgcctggggcggggaggggcggggcctatgagatggagcgaggctgggaggggcttcggggccagtggggcgggggcaggggcggggcccggcggggaggagcggggctgggaggggcctggggggcggagcgggggagggggcggcccgtctgaccggcaaagccccgcccgcaggctcgcgggacccctgctccaacgtgacctgcagcttcggcagcacctgtgcgcgctcggccgacgggctgacggcctcgtgcctgtgccccgcgacctgccgtggcgcccccgaggggaccgtctgcggcagcgacggcgccgactaccccggcgagtgccagctcctgcgccgcgcctgcgcccgccaggagaatgtcttcaagaagttcgacggcccttgtggtgagcgcggcggcgggcgcacggctcgagctctgtgggcgcgcggcgacagcgtcctgactcctgccctcgacccccagacccctgtcagggcgccctccctgacccgagccgcagctgccgtgtgaacccgcgcacgcggcgccctgagatgctcctacggcccgagagctgccctgcccggcaggcgccagtgtgtggggacgacggagtcacctacgaaaacgactgtgtcatgggccgatcgggggccgcccggggtctcctcctgcagaaagtgcgctccggccagtgccagggtcgaggtgagcggctcccccgggggagggctccggccagtgccagggtcgaggtgggcggctcccccgggggagggctgcggccagtgccagggtcgaggtgggcggctcccctctgggagggccgcctgctcccctgctccctgcacatcccagggcagggatggagggtgctccagcctctccgtgactccctcacccctgcgtcctagaccagtgcccggagccctgccggttcaatgccgtgtgcctgtcccgccgtggccgtccccgctgctcctgcgaccgcgtcacctgtgacggggcctacaggcccgtgtgtgcccaggacgggcgcacgtatgacagtgattgctggcggcagcaggctgagtgccggcagcagcgtgccatccccagcaagcaccagggcccg

SEQ ID NO: 4649 - DNA, 6000 bp, Homo sapiens
tgggaggctgaggcaagtggatcacctgaggtcgggagttcaagaccagcctggccaacatggtgaaatcctgtctcaactaaaaatacaaaaattagctgggcatggtggtgggtgcctgtaatcccagctactcgggaggctgaggcaggagaatcgcttgaacctgggaggtggaggttgcagtgagctgagatcacgccactgcattccagccttggcaatgagagtgagactccttcaaaaaaataaaataaaaaggaagcatttaaaagctggatgaaagctctggattcatggtggttacctgttggacttcactgtagtatcagacttagactacccttttcacttgggaatgctcaaatgtcaatctctggatgtcttctctcactctctctagggaagaatcttcaacctgctgcctggtggagaggctagaggcaggaatgctttttagcctttggattcttgatgttgaggagattgggcttagagtccccacagttctatacatagttttttttgtttgtttttgagacacagtctcgctggagactctggagttgctggagtgcagtgtcacgatttaggctcactgcagcctccacctcccagattcaaactattctctctcatgcctcagctacctgagtagctgggattacaggcatgtaccaccacacccggctttttttttttttttttttttttagatagagtctcgctttgttgcctgggctggagtgcagtggcgtgatcttggccactgcagcctccatctcccgggttcaagcgattctcctgcctcagcctcccgagtagctgggattacaggcacccaccaccatgcccggctaatttttgtatttttagtagagacaggattttgccatgttgaccaggcgggtctcaaactcctgacctcatgtgatctgcccgcctcgacttcccaaagtgctaggattacaggcttgagccactgcactggcctaatttttgtattttttatagagatagagttttaccattttggtcaggctggtcttgaactcctggcctcaattaatctgcccacctcagcctcccaaagtactgggattacaggtgtgagccaccacacccggccatatacatagatttttacttatacttgttttcaacccaatacttcaccctctctgctgtgactgggtattcttgagttgggaatctctctgattgatttctccagagaatagtctcctgatggggaagcccagggtgaggctgatatctagctaatttgtatatagatttctagggaattcccctatttttcagctctgtggttgatacttgcctccatagtgagctgatacttcagttcagaggctcttgagaattgggaggagcagattttcttccctgttgtctgtaactcccactgcagattataacttttctgccccaagtcatttatctcccctgttcactttcatcttttaaaaacattaaaatctttcataggctgggcatggtggctcactcctcttaatcctggtactttgggaggccaaggcaggagaattgcttgagcccagttcaagaacagcctgggcaacatgacgagactccatctctataaaaaattttaagccaggctcggtggctcacgcctgtaatcccagcactttgggaggccgaggtgggtggatcacctaaggtcaggagttcaagatcagcgtggccaacatggtgaaacactgtctctaccaataatacaaaaaattagctgggcgtggtggtggacacctgtaaccccagctcctcgggaggctgaggcaggagaatcgcttgaacccgggaggtggaggttccagtgagctgagatcacaccactgcactccagcctgggcaacaagaatgaaactccatctaaaaaaaaaaaattgttttttctttaaatattagctgggcatggtggtacacgcttgtagtctaagctactgagaggctgaggtgggagcatcacttgagcccaggaggtcaaggctgcagtgggctgtgtccgtgtcactgcacttcagcatgggtgacagagcaagaccctgtctcaaaaaaataataaatctttcctagacttttgtttcctcccctgttgtttctcagttaatactttatttcttttctgtcattttaaagatgtttttggaagggagaagagataaacatttatggtcagtttaccattttcagtaagcttcccaggtgattctgatacatactgaaatgtgaaaatcactggttcagaaatttaagagtacagattggacctaggataagcttttggctgattttcagggatctttctttgtactgttatatctttggattaaattaggcctttgccgcctctttgacatttagtagatctgcatcactttttctgttttctcttgctttcctcaccttccttgttcataagcaaacaaaataaaacaaagcaccataatggtgaagaaaaagcctctgttcaaatctttattgaatacctgctctgtgccaggccttctgccgtgtgtttagtatatgattattagcaaacagacatagctctttctctcaagtctcattagcctttccagttgattgcatggctttatatcatgtgtggtatttagggaagaatatattacctttctgaccaaactggttatatgtcttatcagaaagttatgtatacttctgcagtccaattcagatgcacaccatctggagttagtgtcagactccacaggtttaagggcacagttctcagcaaaactgtgtttacttcagatgccaacagcaaattttggggtcttcaggccacccgtatttctgaccaactggctgcagatctgtaggcttctatgaccccttcaggtttaataattcccagaattactcacagaacttaggaaagtgctatacttattattacagttttattataagggatacaattcagggctgggtgcagtggctcatgcctgtaatcccagcactttgggaggccgaggcaggtggatcacctgaagtcaggggttcgagaccagcctggccaacatggtgaaatcccatctgtactaaaaatagaaaaattagctgggcatggtggcgggtgcctgtaatcccagctactcgggaaactgaggcaggagactctcttgaacccaggaggcgaaggtcgcagtgagccaagattgcaccattgcattccagcctgggcaacaagagcgaaactgtctcaaaaaaaggggggtgggatacaattcaggaccagccaaatgacatagggtgaggtccaggagcatcctgagagcagagcttccatgccctctccttgtggaataagagcatgtaaacacagcacatttatgtgtttacctaccaggaagctccagtgagctgctgtgtccagagtttttagttggagttttatctatgtaggcatgattgaactcaatcacccgtccctctgccttccccatagtagattaggcttaaagcagttgatttttctggtgatctgcatccattctgagtcatagtattggcataaatttactcatgatgggatctggcccactcctgtccaattcaggaaattccaagggcttagaggttacaggcctcccaggaaccaggtacagagaccagacaaattctgtattttacaacagaaatgctgccagtttttaaaaactgccctagaagactttctccgtccttgatttgaaagttcattaattctttagttttatactcaaatcctaaatggcaaaatttgtttagcttcctaccttcattgcagtagaacaacattcacagcctcaagggttgcttcaaaaaaagttgatgtggctgggtgtggtggcccatgcctgtaatcccagcagtttgggaggccaaggtgggcggatggcttgaggccaggaattggagaccagcctgaaaaacatggcgaaactctgtctctacaaaacatagaaaaattagcctgccgtggtagtgtgtgcctgcagtcccagctactccaggggctgaggtaggaggatcacttgagcctgggaggtggaggctgcagtcagctgagatcacagcactgcactccagcagggtcatagtggagtgaatggtggagacagacttgacatttattttcctaggtcaaaggtcgtgataaacatatcaataatttgaaaaagaaatgccagaaggaatcagagcagaaccgggagaagcagcagcgtattgagaccttggagcgctacctggctgacctgcccacactggaagaccatcagaagcagagccagcaggtagcagcaatgtcttggcatgcctggggtgatcagggagtggccaggcaggggaactttttcatcatctgctgtatgcagttatcctgtgacttgctgaaaggagaatcccaaagcagtcatgtccagattcataattgtcagatttgtaaccagactgcaaattttttgaggtacccagacagagtcttccttatgttaaagtgaaccccaagtttctcttcaaagaatcagtaagttcaggtctcttactctttgattcactattttaaagtttaacttcctggttctcttcgccctcttgcttctagtttcagtaaacaaccttttccaccagttttaatcagtagttcacatctgttcccccggtcacctactccgtcctgactcatcccggtcacctgctttgacctgagtcaccctggtcacctgctctgacctaagtcacctttaattacctgttcctaactgtccttcccaccaaactactcaccccaccactctggctcataaacctgttccctttaaaatagccaatcagaattagcttagactgtgtggttcaaccctagccaataggggaacgacatagcagtagggactacctgcgtcagaaataagaactccttcccctcccctgtccagttgtgttctcaccattgttccatctgcgaggagcaccctttctgcagaaagtaaaaattgccttgctgaggaaattaaatataggtttgagtgctatttctttgtgacaccgaggaacaagcattttgcatttataacacttggcttatttgacctaaacatgggatcctgtctctcagcttaaggattctgagttgaagagcacagagctgcaggagaaagtgactgagctggagagtttgctggaggagacccaggcaatctgcagagagaaggagattcaactggaaagcctgaggcagagagaagcagaattctcctccgctggacataggtaaataaccctgtgggactgagaggagtggagagttaagttttttgtcatagccatcctgctcacttacctgtgtgactttgggtgatttgggaaaatcattttacttatctgagctttgttttctttggactgtgaataataggaaagctgcttatgggaagcggcttttttttttttttttttttttgagacggagtcttgctctgtcgcccaggctggagtgcagtggtgcaatcttggctcactgcaagctccgcctcccaggttcacaccattctcctgcctcagcctcctgagtagctgggactacaggcgcccgccactgcgcctggctaatcttttttgtatttttagtagagacggggtttcaccgtggtctcgatctcctgacctcgtgatccaccctccttggcctcccaaagtgctgggattacaggtgtgagccaccgcgcccggccaggaagcggcttttatatctttggcatggagtatggatgcagtgggggcttatcttcatagcctttgtaaggatctaacccagtgcctggcacataattcttagtatgtatgtgttgaataaatgaaagcactttgtaaactgggaaatgaggtgtctgtatactttcaaaagtgggtactggtgataagaactgagagttatccacagttcga

SEQ ID NO: 4650 - DNA, 6000 bp, Homo sapiens; identical to SEQ ID NO: 1492

SEQ ID NO: 4651 - DNA, 6000 bp, Homo sapiens
tttgagatcacagaggtagggaacatttaattcaggggatcctcctgccttagcctctcgagtagctgggacgacaggccacaggccacagtgcctggctaatttttttaaatctcttttagagacagagtctcattttgttgcccaaacttgtctcgaactctgtggctcaagcgatcctcctgccttggcctcacaaaatgctggtatttcaggcgtgagccaccatgaccggcctgaatattagatttgaaaacacactctgttgaatatgatgatggacaattattccattttattgtatatccttggagttacagttctcttgactatgctctatacatttttgtgaatttacattttgaggtagaatgcagtaatatacccttttcttacgatagataaattaatgatgtttaagagctatcatgaccagtatcattttagcagtgcaatttttaggaactaaataataataataatacttgtattattattaccattctgatcttaatatcattgcatcaatttatttagcaccttctgtgttccagacacctctcatgcacatcacgtttcattctggaaacaaccatacatgatactactgtccccattttacagatgaagaaagtgataaaatgatttgcgcaaagtcacttagctagtaatgaggaaagccagatttcatcccagacatgctgacttgctatagtttaccaccatcccacctcccacaaaggaaaaaatcccatctggcctctacttccagactgacttctcacactgggaactaggagtttggagttgtggttccttttccttcttctccttctttctctttccctcctcctcttcctccacctcctcctcctccacctcttcctccccttttgtctctattcctttccttgccttttcattatcccagaatgtactcagaaactcaggttgaaaaatatggattaattgtataggaggccccagccaacaaaaccaccagattattaacagatgagccgtcttcatgggtaacactttaagaatgagacaacgcaaattagataaatgaactgttctatgccactgagaacagaagactgtcctgggaacaatttccacatagcagctacgggctgggctttaatgacattagggaggttatgctgaatggcagcgcagagttagtagcacattaacacttgccaaaaaagcatatgagaggaatgcttttaacttctcttgtagggaaataaattcgggtacagaaattgctgtgctttctgcctgccattttgaatattacttctccccattatataaatatggataaatatgtgttggaaagatgctaaaaggctataatctcgcttttatttcaatacgagtagaatttaaaaatatgacatctataataaaattgatactttttttttctttttttgagacggagtctcgctctgtcgcccaggctggagtgcagtggcgcgatctcggctcactgcaagctccgccttccgggttcacgccattctcctgcctcagcctcccgagtagctgggactacaggcgccagccacctcgccccgctaattttttgtatttttagtagagatggggtttcaccatgttagccaggatggtctcgatctcctgacctcatgatcggcccgcctcgacctcccgatacttttttaaaatgtaagatctggtggaaatatgtgaaacctaatcagtaagaataaaaattcaacatctgagtcttgtgtaacaaactaaatattcaagtatgtattacataataaatgccagtttgcaaaaatatgaactcattcaaacttaaagacttaaatctggattgcactgacctgctttatgctgtgattcttactgtgctatctgcatttctcataagactaaacagatttttactttctcctcagaataattcttttgccaaaagggtcctagaatgcttgtgctgctataacagtggccaagccgaactcagaggtggaggtgggtgacaggaggaggtgagaaatttatggccttgagggtgcttaaaatggtcctaagcaatttcagagccccagggatccatgcccttgactctagaatctcaatactgattttttttttttttccagggttggggttgggcagagtcttgctctgttacccaggctggagtgcagtggcatgatctcagctcgctgcaacctctacttcttggattcaagtgattcttgtgcttcagcctcccaagtagctgggattacaggcgtctgccacaacacctggctaagttttgtatttttagtagagacaggtgtttcgctatgttggccaggctggtcttgaactcctgacctcaaatgatctgcccacctaggcctccccaaagtgttgggattacaggtgtgagccactgcgtccagcctgaatactgattcttattacaagaagcttgcactagcaaaaggaaatcagctatggaattcagatgataaaggttgagtacagtaaacttgttaactaaattaaagctactgctacttctacgccaggtgtagcccccaaaattttattagaggactgtgttactagacagcaaatccttaatttttgtttttctctgtaaatcatctacctttgcacataattttagataataatagtataatagtcattgtagtaaaacaataattttcttaaagaaagttttataaacctagaataaatgaaaataaactaattcatagagaatattaacctgtaatagtggtctctaaaaccacgcctacaggcccttgagttctttgttaaatagtacagctatcaaagtcataggttttcattgttccttaggggagaaatggaaagtgttaatgattctattctgttcagacaaaacaaacttacaagtatttacacagtttagaaacatagcgattccaactatatacctcctactataacaaaacaactaataaaataaccaatcagaatttcagttccttctgtgaaggttattattatagaacatgccaacaatttacaaagccttagagtcttatgagatctgctttcttcaaataaaatttcaaggaaggacagatttattttaaaggagaacaaaacaagttagcaatagatataaatattcatatgtttccctaatacacaagagaaggagaagattattgtgataaaagatctgaattgaacatccatctttctttctttctttctttctttctttctttctttctttctttctttctttttctttctttctttctctttttttttctttctttctttcttgctctttctgtctcttcctttctttctcttttccttcctcctttcccttcctttctttcttttttgacagagtctcgctccgccacccaggctggagtgcagtggcatgatctcagctcactgtaacctctgcctcccgggttcaagcgatcctcctgcctcagcctcctgagtagctgggattggcacgcaccaccaccacgccgggctaattttttctgtttttagtagagacagggttttgccacgacgaccaggctggtctcaaactcctgaccttaagtgatctgcccacctcggcctcccaaatgctgggaatacagacatgagccaccatgcccagcctttctttcttttttttgagacaagctctcattctgtcgtccagggtggagtacagttgcaccatcatggctcactgcaaccttgaactcctgggctcaagtgaccctcccatctcagcctcctgagtagttggaatttcaggcacacatcaccacacctggctcaatttaacatcttttcaaatctgatcatctgaactaaatttgggtgcatatcatctctcctcgaacagatggagggaagaggggatagctcctttatctcatttttatactcttttgttaacaaggctaggctctggaattttattagttaggattgtaagggagtgaaaggtgggggaaagacaggactattagagttcagtttttttttttttaatggggaatgggctgaatagaattttccttaacagcagttttcttctatgtaacaaattagcaaataagaaaatgtccataattgttcattagaccatgaattttatttttttttactttgagctttctcatatctagatattgacgaaaagatgccagtttctccctaggcaagttttaaacagccaggtctttttttttttttttttttttctagtgataccttctgcagccgtcatttccagggctgagactataaatgctacagtgcccaagaccataatttattgggatagtcaaacaacaattgaaaaggtttcctgtgaaatgagatacaaggctacaacaaaccaaacttggaatgtaagctcaactttcattatgctttagcatgtgaatgaatgatttaaaagccaaccatcagtggctacagtggacttattatgtctattttacatgtttttaatctgattgtttgcatgatattcaagccactttagtttttgttttataatttcaacttttattttagattcgggggcacatgtgcaggtttgttacctggatatattgcatggtattgaggtttggggtatgattgatcctgtcacccaggtgctaagcatagttaccaataatttgcttttcaacccttgccttcctaccttcctccacactctagtgtggtccccagtgtctattattgccatctttatgtccatgagtacctgatatgatttggctgcatccccaccaaatcgcaacttgaattgtgtctcccagaattcccaggtgttgtgggagggacccagggggaggtaattgaatcatggaggccagtctttcccacactagtctcgtgatagtgaataagtctcacgagatctgatgcgtttatcagaggtttccgcttttgcttcttcctcattttctcttgccaccactaagtaagaagagccttttgcctcccaccatgattctgaggccttaccagccatgtggaactgtaagtccaattaaacctctttttcttcctagtcttgggtatgtctttatcattagcatgaaaatggattaatacagtaaattggtaccagtagagtggggcattgcttaaaagatacccgaaaatgtggaagcaactttggaactgggtaataggcagaaattggaacagtttgaagggctcagaagaagacaggaaaatgtgggaaatttggaacttcctggagacttgttgaatggctttgcccaaaatgctgatagcaatatggacaataaaatctaggctggggtggtctcagatggagatgaggaacttgttaggaactggaggaaaggtgactcttgttatgttttagcaaagagactggcagcattttgcccctgccctagagatctgtggaactttgaactcgaaagatgatttagggtgtctggtagaagaaatttctacgcagcaaagcattcaagtggtgatttgggtactattaaaggcattcagttttaaaagggaaacagaacataaaagttcagaaaatttgtggcctgactatgcaatagaaaagaaaaacccattctgggggggagaaattcaagccagctgcagaagtttgcacaagtagcaaggagcctaatgttaattccctagaccatggggaaaatgtctccaggccacatcagagacctttacagcagcccctcccatcacgggcttggaggcccaggagaaaaaagtggtttcatgggctgggaccagggtcactgtgctgtgtgcagcttagggacttggtgccctgtgtcccagctgctccaaccatggctcaaagggccaacatccagcttgggctgtggcttcagaaggtggaagccccaagctttgacagcttccacatggtgttgagcctgcgggtacacagaagtcagaattgaggtttgggaacct

SEQ ID NO: 4652 - DNA, 6000 bp, Homo sapiens
gcaatcagggttagtggtgctgttggataatgtaggaaacagaaaaggaccaagttgggaggtagaggctgggttcagccttgacaggttgagtaaaaggagcttctgagacctccacatggagctctcaggtaagcagtcggatacttagatctgaaactcaggcttatggcttggactagaaagatacatttgggagtcattggattagaggtagcaatttaaaccatggcacagatgagcaccctcccagggagagaaacactctcactaaaagggaaagtgaaaagagaaaagagcatggggccaggggatgaagaacttcttcatagccactagaggagggaggctgagcctgtagaggaacccgggaaggtgttactgggagagatagtaggaaaaccaggagagagctgcttcacagtggtttaaaatggagggagtaacccacagtaatgacattagcatgcacccaaaaaaaatgaggacaaaacctgtccattggatagaccagagatgtgaaggaatcacatgtgaagccaaattggaataggttgaagacgagtgaggagtaagctaacacacaccagtgcttgccaaacccttttgctttgtggaacatatagaaaattatagctcagtggacattggccagctgcacaaggctgcccccagctggaagtgtggccccacacagatgatctgagggccaaggaaatcaatattttataacacctatagccatttgagatacaccaatgtgtctcggaataccaacttgtaaggtctaccatagaccactttctcaactagagtggctgtgaattggggctcccagggggtgtggaatcaaggtgagcttgctggcttggtttggtttggttagaagagtttttaagatcttagcatctttcagaagcatctatggaaaaaattcggttgagctgggaggactgaattcatgagagagaaaagggtagtatagcattggtggtataaggctcctcagaagtcagaaaagaatccaatttcaggtggagggtcaaatgtacaagataccatgtgtgcaaaagtgtaattctctccacaatactagaaattggatgtcattattactgtgttacaaatttaaaacctgaagcttagtgagattaagtcactgccccaggttccttgcctagtaagctgcatagccaggactataacctatatttttctgactccaaaacgcctaacaattatacttaggtgctaggcctggagacgcaaagatgatgcctttgaagaggtcatatgctaaaagtgtagagagacactaaaataaacataacacagtgtgataaatagaataatggagacacgggggaaaatgctttaggaaccacgaagactataccccagtataggcccgtcaattcctgaactcatggaggcaggggtggactggacatacagcaagggctaaaaagaaatacaaatacctggatggatggatgggtgggtacacagagaataagagttcagtatgaataaagattccctccttagggcaagtgtggttcatgtggccacaagaggtcgctcagatctgacacaaatgaagcttttttccattggtgctgccatgctctctccagaagctttctggaaggaaggggttagaatggagagagggaatgagggtggtgaccagatgctccatagcgttttctgccctctgtaggccagacccagagcttcatgcccaggctggctccattttcaccctactcctggtcatttccactcctgtcctaagttctaggcttttgatatgtttctccaatgtgttctgtctttcagatgtaactcagaaatggtcttaggtttctcgttaggcctgtagttccagctgtggatgagactccaaccccaacaggctttctggctgagtgcctttgtacaaattacttcatctttctgggactcaccaaaaacactaaggttgggaggaagggtctggtctttaagtcttcctgacccacactgcttacaatagctcaccttcaccgaacacttcctacttgctaggcattggtctaagcctgcaatatccaagaaggcagacacttgtcacatgtagctgcttaaattttttaaatttcaactaaagtaaaaacaattaaaacttcagtttctctgtgtcatgagtcaatttcaagtgcttaatagctctctgtggccactgaactggatagcccagaaaacatttcatcatcactgaaagttctattagatcttgctgtctgagagcatcttatgtttttaatcttgtttaaccttcatagcaaccctatgatgcaggtgtaattatgtatccactttagagataaggaccctgagacacagactggttaaaaaacttacccaaggtctctcaccagattcatatccagagtgaggattcaagctcagatatttggctctagggcctaccatgcagagctgtcccctaccccaagctctcttgctctcccgtctcgcctccggaactggaatgacttatcctgttccccaaaggccattgtccctgactactgccgccctgacaactgactctttgagtgatgagagcacctgggcctggagcctcttctggatgaggatccacactctattttcatcccacctccttttagcccctgaattcccttagagtattagtgttagtatcatgggttttaatatctccactaacccatcccattctcagttcaaggtcagcctgagtcctggaagattccaaacctgggcagcagccctgttgctgttccctgagggtcaccttcatccccaagggaacaacatgcagccagctcagctcaggctcagctcaccaacacctttgaaggtgcaacagcatctcactctgcaggggaagtgcgaaaagtcagatgcagttcacactctcatgccgctagaacccggtagaagttgccagggcagaggcttcatccgttctgtgtgcaaaccacaaatgtttgcaagctagaccacttgcggttatcccctctgtctcctgccccagctgctgccctgcagggactccacacacccacaggacctgcagctgaacgaagttgaagacaactcaggagatctgttggaaagagaacgatagaggaaaatatatgaatgttgccatctttaggtgagtggacaagatttctacttcctactttacttcctcactacttttccctctttcctaaacaactgagtcaccgaaaaaaatgcctggcagtgtcaaattagtttcccacttccactgagtcagacaatctagggcaagaaaacttagaaaattctctctgtccattcctggcctcagcaataggcacatcaaattccatcagactatgtagaacttctcacttaaagatttccaggaagaactttactgtcagaaaatgcttagccaggcatggtggtgcatgcctgtaatcccagctacatgggaggctgaggcaggaaaatcacttgaacctgggaggcggaggttgcagtgagccaagattacactccagcctgggcaacagagcaagactccttctcaataaaaaaaagaaaaaagaaagaaaagaaacaagaaaatgaaaatgcttcctagtattttgcctgactctgtgtttcaccgtgaactcccatgttctgtccacagaggagatgagaatgtgtgacctctttttctgttgagggaacattgaataatttccagtttttatctattacaaatgatgctgctatgagcactcttgtatatgttttttcaggcttatatgtatacatttctgtttgacatttacccaggagtgaaaatgctgagccatcagggatccctgtgtttagttttggtagattctgccaagccattttctagtgactgtaccaatttatattcccactagtggtgtacaagagttctagtttcttcacatcctcaccaatactcagtagaggattgcatggggagggtcacgggctcccccagacccagctcagtctcagctggtatcactcccttattcttatggaaggtgtagtggtatcttattatggtttaaatttgcatttccacggtgatttatgatgtctagctccttttgctatgttgatttgacacgtggatatctgcttctgtgaagtacctatccaattatttttgcccatttttctagtatgttgtctgtccttttcttactgacttgcagaaattcttatatttcttctgtgggccctttgtcagctacatgtatttaaactatctcatcacaccacagcttgcctgttccttctcttaatggtgtcttttaaggaatagttctcaaaatcatactgacagtcttaaaagcctcagatgccgaagctccatctgtgttctactccagactcatcgatgtctgattccctcctgaactgaggatcctgtgaagcatcctcagggctccacttctccatcgcattgcagcatccacacacatttacctctggagacaggagctccttggaagctgggaggtcactcggtggtcaaggggtagatgatcttagttttacagtgctgcgctgtctcccaggctgaatgacgctgaagccaagcaaattcgggcagtctctggacctttctaatggaggtgtcccataaccatgttccatcctagttccctggcataggcttgttgaagctgcagaaaatgtcagggatttattagtgatttaccgactccttcatacttagtgttcaggaaaatttattcatgtaatacttcttcaaccaaagaggaaatatcaattagagctttgtaagtttcttttccacttcctattttggctatcaagctatagcaccacccagctcaggccacccacccaccttcggtcctgaggcctggttgctctctgccggcttcgccctgacctgtttctgacctgtgttccctccgctgtgccagaacaggccccatgctgctctggacggctgtgctgctctttggtaagtcaacgagcatgggcatcccctcttggagcactaaggaccgtaagtcatccctgagacaccaagttcctcatcttacctttcccaattccagtgggtttgtggctggagctcaagacaggtgtgtgcacctgggcatgcttgggagagatgggcactggggtaggagaaactcctcagtgtttcctaccccgtagtcctgggtccttggcagcgcagccctttgatatgtcagagataaattagggaggcagaaaatcacattacaaagtcccctaacttcccaatgacatttctaccttgtgacatcaggttaaaatactaatcagagctgtctcaaaaggaaatggaggttgcaggagggaaggaggctgctgggggcaacagggaaggagtcagggaaatgaggggaaacagtcccaggcattttgctcagcaatgggaggtggaattttacagggtgacatatttttatggagcctcagcattttcttagaaccaggtaacaatggccagacctctcacctggttgaaaggcctgtgctctgagtaaccaaagcccttttcaaattgactgtctctcttccgcctacatcttctctctgttgggagctgtttcagatccatggggctggtttgaagaatcaactccattgtctgatccatgtctctctctctcttctctccatttcttctcatgcaggctacttgtaactaagagagctggtctaagggtagaggattgcacgcagagggtcactgggctcccccagacccagctcagtctcagccagtgtcaccccccttatacctaaaagaaataatttggcatatattttgtttcactttacagtttccaagtggacctactttttgtttaattcttggtcccaatagcttgcttgctatttgtattccttgaactagaaaagcaaaactgttcctaaatataacctcttcctgga

SEQ ID NO: 4653 - DNA, 6000 bp, Homo sapiens
gagagtaatgatctgagaggtgttaacaggtctgggtgatcagatatggagtagcattgcacctcccaaacacaaagctctctgtacccagcccagtagcccaaggtagaaaaacttggttcagttacaacttagaagagactagggaagggataaaatgacctgctagaatcataggaggaagtttaaggagggtgtgttgggataggcctcaccctagtcctgtcttcttaaaagttttcttccctcttggtatcaaccttctcccttcccactggacaagaggagatgtggagaaatacggagagttacagcacagccttcctgccagagttccttcagacaggcactgttagttttcattaactatgtgtgaatttctcataaagctaaagacattcaatgtaaagaaatactctgctctctattctgaaattgtcctttgcactcctttggtatcgaaatgccttccttttgctgaaaagtttacattaaagaatataattttatgccgggcacggtggctcacgcctgtaatcccaacactttgggaggctgaggcgggcggatcacctgaggtctggagttcgagactagcctgaccaacatggagaaaccctgtttctactaaaaatacaaaactagctaggcatggtggcgcatgcctgtaatcccagctactcgggaggctgaggcaggagaattgcttgaatccaggaggcagaggttgtggtgagctgagattgcaccattgcactccagcctgggcaagaagagtgaaactccgtctaaaaaaaaaaaaaaaagaatagcaatagcaattttaaaaaatatattattatcagccctatcctgggttacagaaaataaaataagaataattttaaatgttcttatttaggaaaagaaaaatttgtttgataaaattacaaaggtaagaaacactgaatattgatgacaagagggaatgggagccacgtgaattgctggtgggtgtataagcttctgcagccacttttgagagtaatatcacggtattcaatctcttcctttgtttatgccacaaatacttacacagcacgtgctatgtgctgtcactgctgtaggtgatacatcagcaaaaaagaaaaaattcctgcctcaatggagcttacattctaatgggggaacctaccacaaacaaacaaatacaattccgggtggtgacaagtacattgaagagaaataaagcaaaatatggagccagcaaatgacagtgaggagatactattttagatagcacggttagcgaccatctctctgaggaagtaatatttgagtgaagtgaggaagtgaaacttacaaaaatctgggaggagaataagaatctttcaggcagaaagaacagcaagtgaggccctggagcaagactaagcatggaatgttccagcaactgttctaaacacaatgtggctagatcagagtgagtgagggggagagttgtaggaaatgaggccaagggtcagagaaaggcccgatttgtagggccctgtagaccatgggaaggtgtttggaacttattctgagggtacctatggggaattttgagagaaagtaacacaatatggttaacattttaaaagtatctctctagcgactcagtgaataaattactgtacaaaaagatcaatgtagcaggtagagtcatcaggacttgctgatgaattagatttgagttttggaatgagtgtgcatgtaactcatgaacataattctgcagtcttgctctcaggtgtgtatcccataaaggcgcttcagggctctgtagggaagcatcatgtccttaccagtactaacttacatgaaacttcctatgtgccaacccctgttctaagccctttacatatgttaattcatccagccctcacaatatgtaccaagaagtccattgtggaattgtctgtggtagctgagggtgggcagcaactaggatgttaggggaatggacaagtgcagtgtagcagaagcatagaatattagggcagtcatggctgggcgcagtggctcatgcctgtaatcccagcactttgggaggctgaggtgggtggatcacctgaggtcaggagtccaagaccagcctggccaacatggtgaaaccccatctctgctaaaaacacaaaattagccaggcgtggtgatgcacgcctgtaatcccagctactcaggaggctgaggcaggagaactgcttgaacccaggaggtggaggttgcagtgagctgatatcatgccattgcatgccagactgggtaataagagcaaaactgcgtctcaaaaaaaaagaatattagggcagtcaaaagcaataaacatgatgcatgtagagcaatctgaacaaatttgaaacatctgggattaatttttaaaagtagaagtgaatataatatctagaacacaatgccacttatgtaaattaacaacactaaatatttctcaaagctaaaaactgcatgttatacctaatgtaaatgacgagttaatgggtgcagcacaccaacatggcacatgtatacatatgtaacaaacctgcacgttgtgcacatgtaccctagaacttaaagcacaaaaaaaaatagcatgtatatgggaacacacagtaaacattttacagtgggtgcttatgtggaggggaggaggacaataatgtgggtgaaagtcaacaaggtaagacaataagagggggaacttgcaaagaccaataatgacagccggccatgagcagcatcttgaatccctgacaatcagagagataagagaacagattttggagacagacttctattcaaatcccagtttcatcatctcagtttcctcatatgcaaaattgggatattaataattcttcctcaaagggccttacaagaattaagtgcagtaatatctgtgaagcacttagcatagtgcctgccacatgccgagacactaaagtgagctgtcatcagcaacaacagcattagttcattactgtaattatcactgagaacactttatcaccagaatgcttatcaaatggtgacatatattgtccagatgttatgttgtgataggcctcaaataattgctcaagttacaaatgataatttctaaatttttctgcattgtaaaggagtgaagaattagaaattctggggaaaagtcctagatggagtaaaaagactcactttgggaaaaacttagaggagagcctagaataaataaatatttcgtgggaaatttttcaagtcaaattctgagcactgtataatatgaacagtatggatggttccagaggtttctagggacgactatacagttcacaaagttttggtgtactaaggtttcttctgaatcgagtaaaggggctgagatctgtgctctgggggatgagaagccaaaatagagccagcttgtgttgcctaagaggacagctgacaactgcattgcattcttaccattgaggtggtggcttggtgcagaagtcagacctctgtggcaggctgtggatcatgtgggaagccacacactggccctgagacgaggaattattaggatggaggggaagcacaagagtgctggtcagcccaggcactcctaaagcaggcaggtgatcatccctgttcccagtaattagttcttctctgcctcccctactcttgggcacattgtcaaatatgtccctactttgtttgaaatctacaggactctatctcttttatcaaaacctgcactcaaaacatgatctgaagtgaccagcataatttaaatgaccagtcacattttcctaagaggcatttgcatttttaaaaggggctagtccattaagcaaaatatgaggggactctcagagtggaacttcaggcatcagcaagaggggaagatactatcttcctgggagttgacagtacctgataattgatctccttcccatcagatttccaagggatcaaggtgccccggttctaaacaaccacaggtaaggacaggatagagtccaaggagacacactatcaggctggaaaattcattaagtatttacatgaaaattcaggttctcctcattgctcaggtacggtcacatggctcagaaagcacaagaagtagagccccgaggtcagatctgagaggcttctgaggggccgatgcagtgacttctctgctgcaggtcaggagttctggaactggggcgtggctggggaggggttgcagggaagggtgggaggaaggaagaaaagaacaagtgattggaagtgccacaggatgagctcattgggatgggtaggaaagaagagttttctaacttcttaagaatttaagaatttatgagaactcaagatttcaggaagggaggaagaagaaacacattgcatttctatccttgactggggaactagatgatagggatgtgaagggtggttggtgagtcatgccttttcgtctactcattgtggcaggatgtgagctctgggggcaggcaaccgaacactgacctctctaggtctcatgccaatgtctgtcatcaggagtgagcaggaaaaaggtccttaaggacatgaggccgtgtcttcctcagctgagccttgcagggctggctggaaggtggagaagggatgggatgggagtgggatgtcaatgggagcctgaagatggcggggtcatctgctggagcctggggttctatggggctctcttgtgctgtggagggcacaagttctgcaggccttcctttcagtagtcagggctggcctgagctgtgaggtggctgtagatgcggtagatgagacagtgcctggcacttgggatacctgatattcagcctgtctcccactggttctggtctgctatcttcaggaactaggagtgggtgggagaagcagcaatgtctcctagtactcagtggcatccactggccacattctttctctctgttccccatctcatgccagtgcatctccatccttctgcagctgctgcagtcagatccatcatgtggccactgacagcccttctgctcctgggtgagtccacagtgaggcagcagaagagctttgggtggtggagaatagggtggaccaaggtatggggagaggagggtgggtatccaatcctcagtttccaagtggttcattatctttttttggaggggtgaagaagaaggggctttctcagagcttgggaaaccaggggcagaagaagaaaaacaggttttgggaccattcagcctttcttgtcgtcaagagtctctctcctctcatcgccaatattctccttctccttcctcttccttctttcctgttctgcagttccaagcagtgggcaagctggtgagtcttataaatttctcatcccaattttctacagcttccactccaaccccctaagtgaccttttcaagtagactcctcacttcttggctgcgctgggatagtgtctcttcccactctcgtcaacccctgggactaaatttgcttgaaggcatttagaaatgggtgctggctgatggactggtagtctgtaacccaatgaatgtgatctcctctcctgcagggatgggttagtacatgggctggggcctgcgagctggggtttcctaagatttcccaaactcaggtcgtttctttgggcacctcaccttgattctctttgcatgctgccccctctcaccccactccccaccccagctactctggagaagcccatattgtctctacatccaccttggaccaccatcttcaaaggggagcgggtaactttgaagtgtgatggataccacccactgctcctggagctccagcccatcagcactctctggtatttgggccacctacttctgccctctcacaagaagagcattgaggtgcagacaccaggggtgtatcgatgccagacacggggagcacccgtcagtgaccccatccacctctctgtatccaatggtgagtggactgagcacgaggggagggggagcacgtgtctcctctggcaat

SEQ ID NO: 4654 - DNA, 6000 bp, Homo sapiens
cactgataagacctatattgtaataggagagcagagtcccaatgtgtcattgatgcagagaatgtctgatatgttatcaagatggtttgaagaagcaagtgaggttgcacaaagcaatagaggacgaggaagatctcgacccagaggtaatttttaatgttaattaaagtcatcagaaagctggcaaaaactacttattgaagccagtttttatttctatcatgtaaattataccatgttttacatctgtaataatcacaaggttcttattgtgtggtgtgaagtagtagagaataaaagatattggatataatttgtcccttctggtgccattggacctagtgcgtatcttttgcttttctcaaagtaaagtagaagaatctgaggtttcctattttaagcctttttttaatgcactctgagaatggaaatatataaaattctgtgtataaacaagttttatgtaataggaaagattgattgctttaacaagaatatgttgtagataagtttttatccctcttgactggcctattttgtcaaatgggccaaatcaccagtagttattatcactgaaattatatatttgtgtgtgtaaatataaatgtgttttctgagcatatctgtttagagttgttggttttagaaaatatttaaaatttgaatttgccttaacatgtgttttgaaggtggaacaagtcaatcagatatttcaactcttcctacggtcccatcaagtcctgatttggaagtgagtgaaactgcaatggaagtagatactccagctgaacaatttcttcagccttctacatcctctacaatgtcagctcaggctcattcgacatcatctcccacagaaagccctcattctactcctttgctatcttctccagacagtgaacaaaggcagtctgttgaggcatctggacaccacacacatcatcagtctggtgaggataagtatgctgtggttcatctaatgatttttgatagtgaaaatttctttactggctattttgaaagatactaaatcacatcaacttcttgttggaataaatgatcaaaatgacatgtaatatatggttatgtaacttaaacacaaaaattaattatgtcttacttgcatgaattttaacaaatagcaggaatcttcaatttatataaaacaattgttttaaaagtacaagtaccaaaagatagtgttttgacatagtttaatgtgcctgacttaaatattattttatagattattagagaccaaaatatctttctagatttatttggttttatgtctatattaaagtgattatgaaaatatcagtattagtttcactttgcttatattcttgattatttccctcaaataatgcagtacttttaatatactctctatggtggatttgatatggtcttttgtcaacaacatataatttaccaaaaaatttgtttctctagtatttacatgaaaaagaattattttaccaaatgcttatcttcttgatacttgatgctagtgaaaataacctctacgttctgttaaaatgctatttttttctcagtattataagtctttatggtcaacttttttcccctaactatggaatgtgctagtatttataatagtaattttcagcagatgtatctacagtttactcggtactttaaactatatacatgtaattataaaaaccaataagatatttattcatagttttctttggttcttctaaggaagaattttactcaatatagagccagaattattagcaactagaaatatagctggcaggcctaagctgaaacctataaaaaaatttctaacagcttagctgccaagctgtcactttattcttacatctctggaaactgatgccagattaccaaatatgggatgttttaatttaagcactcttttatcagtatataccacttttagtaattcattttcagtttctatgggaataaaagccagagtcagttacataactgttaacactgtatacattttatccataataataagctaaagctgagctacagaatcaaggttttcacactcagttgacatagcattttaatttatggaaaaataaaatattttggaagatttgggaattaaaagcagaagtagttaaaagtttgtttttcaaagcaggtaaaattgggaaaagcaagaatttttaaagtgatattcttgaacatattgatcaattataagtttttaggaaaacttagcaagaagactctagcttacattcagcttccactgaatctcaactaattctagttgtttcttaaatatatttatgagtaaagtatttggaactttattttttaaagctatctaatgcattttaattactgcatttcaaattgctaaattcctttcaatatttaatgtaagtattaaatgtgacaatcatttgaattattgaagaagaaaaaatatctttggtggtcatgtgatgattattgaaacattatgcagtacttttactcataaattatttataggaagtaaggaaatatttttaactgggagattattgagagaattttggttgactaagctatagataattagaatatttccatgttatcaagacattatcactattgagaaaaatgatttggtgttagatgtaacatctgaaggttatgactgtagttgttctgataacagctttttcattattctggagttcaacgtttcaggagtaaggacttaatttgtttctgtttttgttttttgtccaatctcttttgcatttgccatagcctaagtccaaatgtgtttgtgaatattgggaattgtccattgggtgaatgtagtagatggaaatgtcagcttaggaccatgatttctattatttccctgcatagagatagagaaaatgataaagtatacttctgtctatgcttgccttgctgtggatacctttttatgtaaatgtttatccctttacatgtcctccctcatttttactgatatcaaagaaacggacaatgggaatatgaaaatttgctacgctccatctctggttgaacctaattgtctgccttctcttagtctacagtggaatcactgaatgataatgaagaaagttatgaccacaaatttcaatgggtgctcaacactgtgcatcagagcagcctcacactgttgctctccagctgtacaaaatgactattttacactttcatgtctctcaaactttaatacttcccttcatccccgccccacttccagattctaacctttcattcacaatgaaaagtactcgttttcctactgtcaataatttcccagctttccaacatctgtactcacattgtgatagaagcagaaagctcctatcaaaagctagtcaatgtagttgctatccctttccagcttctcaaagatttcgccccttctcttgcattatcattgcctttttttgccaaattgtttcttttggccttaacatgctcttattatctcctttctttaaaaattttctcttaattatctcacattccccttcagctattgccttatttctctgctgctttcgtaatgagaatcctcagaagagttgttgatagatgctctctccattttcttgccatccttcatttatttattaaccaacccccatctgcttttcaacccccttttcctctgaaacttttaatcaaagtcactagtgacattcaccagtttaaaggatatttctctgttagtaccttactagatttttcgacccggttgcatttaacataggctgtcactccttcttgaaacactttcctttcttggtatctatgatatcatatttgcctatttactcttattaattctggtgggttttcagtaactgttgttcgtgtttcttgttctatctccttctgaatattataatcaaaccccttagtttgggctctcttctcttctctttacatacactctttctctgggtgattgtgtcagttcctcatagcttttaatatctcctgtaaattcatgactcacaaatatatatatcagcaatctgatcttctaccctgaattccagacccttatgcctgatgtctgactgctattttgacagtatgtttttgttattgttgtacatctttttttttttttttttttttttttttaaagacagtctcactctgtcacccaggctggagtgcagtgcacaatctcaggtcactgcagcctccccctcctgggttcaagcaattctcctgcctcagcctcccaagtagctgggattacaggttcctgccaccacacccagcaaatttttgtatttttagtagagatggggttccccatgttggtcaggctggtcttgaactcctaacctcaagcagtccatccgcctcggcctcccaaaatgctgggattacaggcatgagccactgcacccggcctattgttgtacgtcataaatctacatgttcaaactaaaacttaatgcagcctcctacccttcctgttccgtaattggctccttcttggtccatttgcttatttgaataacctgtgagtttttcttgattccttccttttcctcaagtcccatgccagctcatcagcaagttcttttgttcctgtatctaaactataacctgggtcttttcatctcaccatcatttcttgtctcctaattaatctgcctgtacctactgttgttccattataatgtattctccatgcaggagccagaatgagtattttaacatgttaaatcagattatataactttgctgtttaaatcccttcagaagttcctaattgcatttggaaatacaactacaaaagaaaaaaaaatcaaactcctcactgtggacgtataagaatttatatggcctgcccttccctgtctctctagcctcatctcattcaattttctcagtacttgatgattgttacactctagatgtactactgatttctttcggttatcagagaatttccgtgccaaattctgccctgccctgccctgccctcccccgccccaccccgcctccaccctgcccccaccccctcccctcccccctccctccctcccttcctcccacttgcttgctttctctctctctctttctctctctcttttctttcttttcttccttcttttcttttctccttccttcctttctttctttttcttctttttagacagagtcttgcactgttgcccaggctggagtgcagtggcgtgatctcggctcactgcaagctctgcctcctgggttcacgccattctcctgcctcagcctcccaagtagctgggactacaggcgcctgccaccatgcccggctaattttttatacttttagtagagacagggtttcaccgtgttggccacgatggtctcaatctcctgaccttgtgatccgccctcctcggcctcccaaagtgctgggattacaggcgtgagccactgtgccctgccattttcttttctttctcttctcttctcttcttctttccttccttcctcccttccttccttccttccttccttccttccttccttccttcctttctttctttctttctctctctctcttttgtttctttctgtctctctctctttctttctttctgtctctctctcttccttcctccctccctcccttccttcacttcttccctcccttccttccttccttctttcctccatcccttctttccttctcctctttctcctttttctcctttcccatctttctctctttcctgtcttttcttttctttccctctttccttcttacactttgttcttagtgttattctctgtatgcttgggaagcccttgtcctggcttatcacttggccaacttccttttccttgagtctcagctcaaatgccatataagacaagtctttcataactaccctaggtaaagtcctctttcctttttcttcttgctgaaattttattctcttctatataaccctgtttattttgtgaaaagcaattataaaaatttataat

SEQ ID NO: 4655 - DNA, 6000 bp, Homo sapiens
agttgcgagtagggacagatccacataggcagccatgctggttctactgctcagagggcactacctaattttgggagagagcatagtgaaagagttgccaccttcttaccaataccaagctcaatctgcatcagggatattaaattcaggaatgaacttgcttggcagagttggcagaaagaaacagaaatagccttttttggtgatctctgagaacagaagagttccccatccgtctttctgcaaaactttagtggtgactgctgggaggcagggagctggactatatgatattgggcagttaaaagtaacctggggccgggcgcggcagctcacacctgtaatcccagcactttgggaggccgaggtgggcagatcacgaggtcaggaaatcgagaccatcctggctaacatggtgaaaccctgcctctactaaaaatacaaaaaattagccgggcgtggtggcgggcatctgtagtcccaactacttgtgagcctgaggcaggagaatggcatgaacccgggaagcggagcttgcagtgagccaagattgcaccactgcactccagcctgggcgacagagcgagactccgtctcaaaaagaaaaaaaaagtaaccttaacatttcagacgtacaagaacagacactggaagggtggtggtggaaaacagcctcccagagggactaaagaatctctaggcctccttattccacctacccaaagtatatgcatccagggtcaccggggttgaaggtgatgtcactaatattttgaaattacctgtattccaactctacaaaatctttcctcttgctcatgctcttgagtgtgtcttagactcactctattagcatttttgtgaagaggcctctgagtctgagtcctttgttagctatagtcagattctggagccaggttgatctgatgaaatttccccagttctgcactgattccagatttggtgaggctctgaaggattgttcttggagagcagtggctttggtcagcagtgttctttcattgaacttccttccaacagtccctccagaggaggtgttctttgttttgtgactcctgttcctccctgttctttggaaggcctagatctatgagtcctagtctgatttctttttgccttttcaattgtccctccagttgttagaatgtgtgtatgacagtggggggagtggtattggggcagaaaaggctgtcataagtatttctggaagattctcaaacaattggaactctttgcttcccttataaaataatataagttttatgttacacacacactggttagtaaccttttaggtgatgaggattcaactagcatttcttttttttttttttgagacagagtctcgctggtcttgaactgctgacctcaaagtgatccacctgcctcagccacccagtgcactgggattacaggcatgagtcactgtgcccggcctcaactagcatatattgagtactactatgtatcaaagactgtgctagattctttcatacacgtgatggtatttgttccacatagcaacaatgagaaggaagtgttttttcccaatttgcagttgaggataaatggcttgcataagttgcacatttctgaaaggctgaatgaggattttcaaccccagcctatttgccttcaagtccagagctctttccattatatgttagcagccacggcactggagaaagagggtgtgatgtcatgatgtcagacaaccagagaaacggcacagcttcagcagggttgatgatggttgttttagagctgccttcttctaagtgaagcctggcatggtatttactggcctttattttctgggaacttcgagtttaaaagggaaggtaaaaaaatacctgtaaccagaaaaatatatcaagactttaattttatttatttatttatttatttatttatttgagacagagtttcgctctgttgcccaggctggagtgcagcggtgcgatctcggctcaccacaacctctgcctcccgggttcaagcgattctcctgcctcagcctcccaagtagctgggattacaggcatgcgccaccacgcccagctaattttgtatttttagtagagacgaggtttctccatgttggtcaggctggtctcgaactcctgacctcaggtaatccgcctgcctcagcctcccaaagtgctgggattacaggcgtgagccaccgcgcccggcctttttttttttttttgagacagagtctcactctgtctccaggctggagtgcaatggcgtaatctcggctcactgcaacctccacctcccaggttcaagcaattctccggcctcagcctcctgagtagctgggattacaggcgcctgccaccacgcctggctaatttttgtatttttagtagagacggggtttcaccatgttggccaggatggtctcgatctcttgacctcgtgatctgcccacctcggcctcccaaagtgctgggattacaggcgtgagccactgcgcctagccaagactttaatattaaataaagatggctgggcaaggtggttcacacctgtaatcctagtgctttgggaggctgaggcaggagaattgcttgaggccaggcgttcaaagctagcctgggcaacacagcaagacgccatctgcacaaaaaaatttttttttaattagctgagcatgatggcacacacctaaagtcctagctactcgggaggctgaggcaggaggatgccttgagcctaggagttcaaggttacagtgagctatgatcatgccactgcactccagcctgggcaacagagcaagacttgtctctaaaaaataaaaataaaggtgagatgcacaggacctgtgtgtagaatgttatatgagtaaggaaatatagtctaaagtggaaaataaaaaggttatagcaggcatttaaagggagacaggaagagcaagtggatagaaaagtatttgaagagttagggaacaagggagtaacacctgacttgcttctcagtctacccgaagaatctgtaaatcaccaggcatggtggctcatgcctgtaattccaacactttacgaggctgaggagggaggattgcttgagctcagttcaagaccaggctgggcaacatggtgagaccttgtctctacagaaaaatttaaaaaattaaccaggcatggaggcacatgcgtgtagtcctggatacttgggaagctgaggtaggaggattgcttgagcccagaaaatcaaggctacagtgagttctgatcgcgccactgcactccagcctgggcaacagagcaagaccctgtctcaaaaataataagattaaaaatttaaaaataagccaggcatggtggtgtgcacctgtggtcccagctacttgggaggctgaggtgggaggcttgcttgagcccaggaggtcaaggttgcaatgagcccagattgttcaactgcacttcagcctgggtaacagagcaagaccttgtctcaaaaaaaaaaaaaaaaaagaatttgtaaatgtaggccaggtgcagtggctcacgcctgtaatcccagcactttgggaggccgaggtgggtggatcatgaggttgggagatggagaccatcctggctaacatggtgaaaccgtgtgtctactaaaaatacaaaacaaaattagctggacgttgtggtgggcgcctatagtcccagctacttgggaggctgaggcaggagaatggtgtgaacccgggaggcggaacttacagtgagctgagattgcgccactgcactccagcctgggtgacagagcgagactccgtctcaacaacaacaacaacaacaacaacaaaaagaatttgtaaatctatataaatacaacatatacaaaacaacatttcacatatataagctaagaacagaggctaagctgagtaactacaggaggaatgacgagtaatgtaatcagaagtggaggtagtcaggaaagcttcctaggatatgtcttcttatctgattttgaaggagtccaggaagacaaaaagaggaggtgcctgggaaggtgtcatagcaaagggaagatctgaggatggcaccactaaccaatgtgtgtatgtgtctccctttctgttcttttctccctccctcttcctgtagcttggaagctcgaagtctggctgtggccatgggagatacagtagtggagcctgcccccttgaagccaacttctgagcccacttctggcccaccagggaataatggggggtccctgctaagtgtcatcacggagggggtcggggaactatcagtgattgaccctgaggtggcccagaaggcctgccaggaggtgttggagaaagtcaagcttttgcatggaggcgtggcagtctctagcagaggcaccccactggagttggtcaatggggatggtgtggacagtgagatccgttgcctagatgatccacctgcccagatcagggaggaggaagatgagatgggggccgctgtggcctcaggcacagccaaaggagcaagaagacggcggcagaacaactcagctaaacagtcttggctgctgaggctgtttgagtcaaaactgtttgacatctccatggccatttcatacctgtataactccaaggagcctggagtacaagcctacattggcaaccggctcttctgctttcgcaacgaggacgtggacttctatctgccccagttgcttaacatgtacatccacatggatgaggatgtgggtgatgccattaagccctacatagtccaccgttgccgccagagcattaacttttccctccagtgtgccctgttgcttggggcctattcttcagacatgcacatttccactcaacgacactcccgtgggaccaagctacggaagctgatcctctcagatgagctaaagccagctcacaggaagagggagctgccctccttgagcccggcccctgacacagggctgtctccctccaaaaggactcaccagcgctctaagtcagatgccactgccagcataagtctcagcagcaacctgaaacgaacagccagcaaccctaaagtggagaatgaggatgaggtaaaattctggggagggccagagacaaaaggtggtagagggctgcatggagacaggatgcctcctatatacacacagggttacgctgttctttctgtcctccctgtttcatttcactgataaaagcatggaatgttagaatggaaaggccttagaattcatgtattttgcctgccttagtttacaaaggaagaactcagacccagagagataaagtgagttgcctcaggtcatataggtcatggcaaggctgacgctcctgactgtgtcccaaatcatttttattaaactgcactggccaggcgcggtggctcacgcttgtaatcccagcactttgggaggctgaggcaggcagatcacgaggtcaggagtttgagaccagcctggccaacatggcaaaatcccatctctactaaaaatacaaaaattagccaggcgtggtggtgggcgcgtgtaatcccagctacttgggaggctgagacaggagaatcacttgaacctgggaggcagaggttgcagtgaccagagatcgcgccactgcactccagcttgggcgacagagtgagactccgtctctaaataaataaataaataaataaactgccattccattaacatctactatgttaatgagaactgtggcagaagccctccacaccctgacctgagacttgagatagctaccagagcctctcagagcagcatctgtgggaaaggaaaaggtactattgtctttctgtgtgctggggtaggggagatgttagaacatcggcttcattctcctggccactcctcctcataatctaatcccttttcactaccctctgaagatcctaccttttgttgacataagtgtaaggtttatttcttatcactgaggcatctggagaatgccttcattgcctgcctttccttagggggaag

SEQ ID NO: 4656 - DNA, 6000 bp, Homo sapiens
tgtgtgcagattgtgtctgtgtctgaatgaatctatatagtgtctgtgtttgtaggaaggtggggccatataggtatgtatctgcattttgaagccttgtaagagtgggccacgtgccgatttgtttgcctgtgatggtgtaattgtgtgtgtgcatgtgtgagatctctatgtgtaaacatggtcctgagccacatgatagaacagaatgattgctgagacctggggctgtgactccagaagacatgttgactcaaaaaagaacgcagacggagagtgtgtgaggcctggtgaggggcctgcagaggcagggttgctggagactgggaggtggagggcagagtgtccagggtggggccctggctacaccccccggtcttatccctctctaggtccaaccggttggggataggcctgcctggggcttcagggtagggagggacaagagctcagtcctgagctcctgggtcctgggatcctggctcctcacccaggattgcctgccactgactcagtggcaggaggggcctcactggaagccagcttgtgggggcagctgcatgcgagccacacaatcacataagaggaagcacacacagtacgcaatgctgtgtagtcaagaaagactcacaatgtcctacagatacctgtggccatagtcccaggcacacaccatcactcactatcacacacgaacacagccaggctcctggtcacagctgtccactgtcatgcacaagcacacactgtcacttttaagcacttacatagctcacatggtcacacatcactatacaaaaccacacagaggcatacagccacagactcacactgtcatacacagacacacatagacacacttagtctttggcttctcaggctggagaggagtcccagaagccattgtaaccaccccgctgcctctggacaggaggacttcactcagcccagacagagcccacataggtgacatttaatcagccaggctcttctatcagagcatttaacaactctgtgtgtaccacatgccttcacacacacaaacacatccacactatcatataaatatataagcagacacgctacgtggtcatgtacatgaatatcctcacagtacacataagcagccacaaatactcataagcatacaatgtacatacgtgtacatattcatacatgcatacacataatcatatatacatacaagcatacataacagctacatatataacagctatatgtatagctgttatatgcctgtgacaattcatgcacacacacatacacacccactacgagcagccctcctttttatgaaagcactgctgacctctgggtgccgtggacagagaatatgaagggaagggctgacactgactcctcctgaagccctgcttctgctcctaccaccccatcttctctgccctccccctagcactgctgtctgctgtgcggatcaacggggatggacaggaggtcctgtacctggcagaaggtgataatgtgaggctgggctgcccctacgtcctggaccctgaggactatggtcccaatgggctggacatcgagtggatgcaggtcaactcagaccccgcccaccaccgagagaacgtggtgagtgctgggcacaggggtctccttcctctaggcttcatgatgtctacctgttggacagccaacatcccaaagggagaagactgaccttgaacctcccccaaggcctttcagggaatgaggcaatggggatgagagctctgcaattgtgaattaagctagccagtcagtctacctcctcccatcccattctaaaaggaagataagttgtagtctttgccttcaaaaagttcccagtctgaccatatatctttccaagtgcttgatctcacctgatctcaccagttctgtaagaggtcagtggctcaggcatcattattctcattttttcagctgagaaaagagtctcagagaagttcagtgaattgcccaaagcagccaatccacatggcccttcttggctctgcctgtttcaccacctgttttcctctcctcttcacagttccttagttaccaggacaagaggatcaaccatggcagccttccccatctgcagcagagggtccgctttgcagcctcagacccaagccagtacgatgcctccatcaacctcatgaacctgcaggtatctgatacagccacttatgagtgccgggtgaagaagaccaccatggccacccggaaggtcattgtcactgtccaaggtatggccagactcctctaagctcctctccccctggcttaagagccaagggcagcttggccactttgagcctggctctgtctcttggctgggccctggcttacaattgtctgcctccttgcagcacgacctgcagtgcccatgtgctggacagagggccacatgacatatggcaacgatgtggtgctgaagtgctatgccagtgggggctcccagcccctctcctacaagtgggccaagatcagtgggcaccattacccctatcgagctgggtcttacacctcccagcacagctaccactcagagctgtcctaccaggagtccttccacagctccataaaccaaggtgagagggccctggatgagggcagtcgggggtgagtggaagatcagggactctgggacctgttggggtttccttgggttatcagtgccatcaaatcaaacctggaatccctgtgggagaccctccctctgggcctgccccagcagctgctatttttttttttttttttgagacagagtttcgctcttgttgcccaagctggagggcaatggcatgatctcggctcactgcaacctctgcctcccgggttcaagcgattctcctgcctctgcctcccgagtagctgggattacaggcatgcaccaccgcacctggctaattttttgtatttttagtagaaacggggttttaccatgttagccaggctggtctcaaactcctgacctcaggcgatccgcccgccttggcctcccaaagcgctaggattacaggcgtgagccaccgtgcctggcccagcagctgctattgagagcagatgataaggcaaatgtggagagtcagtcaaaagtactatggcgaatttggagggagcctggtctcagacagagctgggcttgaatcctggctgggacactgactggctccaagtttaaggcaagtggcttaccctccctgtgccttaatttcttcatatatggaaagggaatactaacatatacctttcatgggcatgcaaggattaaatgggggaggtgtgtaaagctcctagtacatagagaagctgaaaatattcagtcaaacaaagaataatagagctaggagggaccttagagttcctcttcccctggcttctcctgtcctcactgtacaaaggaggagaccaaggctcagagagcgtacatatttccctaaggtcagagtgaattaatggtgtccctgtcttgctgctgggagagaggtcctttcttgcatctctttcacagcagggggaaggtgactcacctggagagtggagtgtgtgtgtgtgtgtgtgggtgtgggtgtacacacatgcataagccttcccttcttctagagtgggtgtcccatcccccaccccacagggactgaggttggggtgggagctctcagagaccaggcctctctccacttcactttcaggcctgaacaatggggacctggtgttgaaggatatctccagagcagatgatgggctgtatcagtgcacagtggccaacaacgtgggctacagtgtttgtgtggtggaggtgaaggtctcaggtaggtgcagcagtcttgagggctgggtggttgggagggttgaactggaggaggctgggctctggtttggagcctcagctgcttctgcctttccactgccatccatttgccagtgggggctcccagcccctttcctacaagtgggccaagatcagtgggtacgatcttgaccctattgagctgggtcaagctcgcccagcacagcttccactctgagctctagagcccagagcagctggaagccctgggagaagcatgctgacacgaggggttaacttgcatctccccatatcttccccactgggtgttccagggctaagagaccccctgggtccctctccctctttcccattaacccctgacctggcacctcctggtgctgttccctcaggcacctgccaggctgtgagaaagcctgacctgcctccacttctctccacagactcccggcgtataggcgtgatcatcggcatcgtcctgggctctctgctcgcgctgggctgcctggccgtaggcatctgggggctcgtctgctgctgctgcgggggctccggggctggcggcgcccgcggtgccttcggctacggcaacggcggcggggtcggcggaggggcctgcggcgacttggctagtgagatcaggtaaaacctgatgcatgctgcatgctgctgtgcggcagggaaccggcgccctgcccacctcactcctgcctgccaccggccggctgggccccccaccccaaccctgcccgccatcgccacggagtgctgggactgcggcatgtcgacctgccacccaactcatggctttcccctccccctgccaccccagtcttcacctctgctccctgccttccatttccctcctgcctacgcacctgtctgtcttgtctagactgtaagctcctggagggcagggcctatgttttttcacgtttcccctgtactgcgccggtaagaactctgacattattatttaagaagagctaataataagaatagtgctaataacttatattagaagcaaactagaaataaaaatagaacaagtctagtagtgctaatgattgcaatgcctcggggatggagggaaagatggagaagactgaggggcaggaggtgagaaagagagagattgctcgagcaaggtcaggattagctaaggaaagaagaagaggaaaagcaccttcttctgggcctgcgaaacatcagaaagggattgcaggggcctggagggggctgcctgcagggctctccagatacgcgtggacaagccctgtctggaggatggggatgctggctccgggaccgctgcagggtcgccgacccaggaagggtcacaaaggacagtaggtcgaggccgagggagagagacgagggcaggtggagggaggcgcgggagacaagaggttgccaagagcccccggctctgcccaggccgtgcccacgccccgctgcggagcagcccgctcacccgcccgcctgttgttttccacagagaggacgccgtggcgcccgggtgcaaggccagcgggcgcggcagccgcgtcacccacctcctggggtacccgacgcagaacgtcagccgctccctgcgccgcaagtacgcgcctcccccctgcggcggccccgaggacgtggccctggcgccctgcaccgccgccgccgcctgcgaagcgggcccctccccggtctacgtcaaggtcaagagcgcggagccggctgactgcgccgaggggccggtgcagtgcaagaacggcctcttggtgtgagcgcgcgcgccgggccgggctgcgccccagccaggaggagggcgcggggctctctgtctgcagctggggacacgtcggggctggggacgacctcgctcgccccaggctgccaggcggctgggggtgaaggcatttccctaaggaaatgcgtagggaggcagagcctcctccccaaaagtgggaaggggcgggcgagggcggaggaaggcgatcctgagccttctccgcacccccgggaccgaaggcttgggggagagggagggaggaggaggctgagtgtcctagagcggctgaggccggaggcctggtgtccccagcctaagcagagggccccgggggccgggtgggtgggggtctgtctggacgaattgttctgtgtgtgaggtctgagctctgaggcagcag

SEQ ID NO: 4657 - DNA, 6000 bp, Homo sapiens
tgttctttatctcaaatatcgcctgtcattggcacttttgccatgacgttgctattaatcaaaatttcctggatttttgttaaggctggaggaatcaatgtttggtagtaaatacttagaaatagtattataaattctattttaaaatatgcccagggtacaagattagaactaatgcacatagtaagtgctgggtgctgtggcttacacctgtaatcccagctacttgggagggtaaggcttgatgattatttgaggcctggaggtgggatctgcctgggcaacatagcaaggctccatctctaaaaaatgccaaccaaccaaacaaaaagaactaatgaatgtaatacattcgttgaaatccaagttctagataccatacatatgtcttttaggaatatttttggcctggcacggcggctcacacctgtgatcccagcactttgggaggctgaggtgggcaaatcacctgaggtcgggagttcgagaccagcctgaccaacgtggagaaaccccatctctactaaaaatacaaaatcagctgggcgtggtggctcatgcctgtaatcccagctactcgggaggctgaggcaggagaatcacttgaacccaggagtcggaggttgcggtgagccgagattgtgccattgcactccagcctgggcaacaagagcaaaactctgtctcaaaaaaaaaaaaaaaaaaaaaaagaatatttttatctataattcactgataaatatctaatcaacccttccatcagaaatgggttacattttaatgcataaaatgaagcagtagatcaataattatttaagaaatttgagctgttgtacagattatatatgtataaaaagcaaactctacccaagattgctggatactgtgctctgatttataagataatgatcaacaaaactctacacttttgtgaactgttaaacctagaaactggggtcaggcgcggtggctcacgcctgtaatcccaacactttggcaggccgaggcgggcggatcacgaggtcaggagattgagaccatcctggctaacacggtgaaaccccgtctccactaaaaatacaaaaaattaactggtcatgatggcgggcgcctgtagtcccagctactagggaggctgaggcaggagaatggtgtgaacccgggaggcgaagcttgcagtgagccaagatggcgccactgcactccagcctgggcaacagagcgagactctgtctcaaaaaaaaaaaaaaaaaaaaaaaaccaaaaaaacaaaacaaacaaacaaacaaacaaacaaaaaaacactagaaactggagtggacccagaaatcaagagatgtcttcgggtcaggcttgaattaaaaagtaaatatttaatcacttttaccagaattcatcagggctacagtgtacgggatacgtgctaaacaaatgaagaaaacaatcttcagggagtttgatgatgagtcagtgttaagaactttgacatgtatataatgagttggaagtaatgacatagacagcatgagcactggaaggccacatataacctccaaaccatcatttattgaaggattccagctttctgtgaggacgattttgggtagtaaaattgacccaacttgagtttttttcaatttaggaaaatttattaaacaggtaatatctttaacatcatgctaagcctgtttgagaatataaagtaattttaacatatagtacctctctttaagggacgtatgctacctgcagggaagtgcattatatgtatacgtgacactgtgaagatagcaagtataatatctaataatgcaaaatatgaatgctatgtggtcaattcatatatatttatatatatcttaaagagaacttgacagaatcagaaagcttggattgatgtttaggctgcaatttaccagctgtgtgaccctcactttcaagccaaagttttcccattagtaaactgggtgtagcttcatctatctcataggactgttggaaggatcaaatgaaacagagcatttaaacagagactgcacaaattatgggagggaaggaggaaatatgtaacacttgtggaactgcacttgagggtagagaccatgtcttaattgactttgtgcccccagtgtctggcactgtgcctggctctgagaggaggctcagtaaatgtttgtaaatgcatgcgtgccaggcgctgtggtaagcccttgacatgtgttattctttaaaacttcacaaaaaattgtgtatggtagttatagtgtctccatttcacagatgaggaaacagaagttcggagatttttaagcaaactccaacctcatgtaggtagaaagtggtagagataggaagttagatctacttggcaccagagcccagagtctattcattacattatgtggactctcagatgtaagggaattatcattattcctaaacaatagtgtggccaaaatgaaaagcaaacaccttggataattcaccaattgcccaggcagctcctgggctggctttcagataagtaagggaacattctcccgtgctacctgacacatttaacatggtcttttgttaaactgtcagttctgatttctggcctttgaaataaaaagcacaatagtgaaaaataccatataatataccataacctggacttgtcatagagacagaagagaaaggaaggacagtgaggaactcacagttaatgaagtggttaaccaatgacttgaattaaatttgttactgccactagcagccgcccttaccttctgtctctgtctctctctttttctctgtctcttactctgtcttaactttcactactacagttggtaaggtctagaattttcactctcttctatgttaaggatgataataaagaaggtgattccactgctaaacagtggaatatttcatgttcttcattgcttgtctgttcctaacatctctatagctcattacaacagttggttctgttggagtgaagttttgcagccatccccagtttctaaagaacaatactaaaatggcccctgacaacacagtaatgttaaaactccagcctctgcattgggagacagaatgcagaggttgataccagactacccgatcttacattattttgtcctcagtttatttctgaggaaaaacagaggaaccttacatacaaaggtttctataagaagcagagggaaatgcattttaaaaaatcctgattcattttaaagcttctgttaaaatatagtacactgtaggtcaggacagcagagacaggaactacgtataagtcccgagaataccttacactgttgtcagaatccagccagtaacagtgtgtggtttcccagggactgcgctaacatacctgagatgaaacctggtggggagatactttccacattcctttctgacctgtggtgagtctgctggggtgaattgtgtgaagttgtcaaaggttgctctgctctccagcacttggcaccagctctgctgaaatgtgatgccattggttttcagtaaaggttcctttctgcagggctgcaaatacagatcagctgctactgtgtatacacaaccagggagcaaatcaaccagcacatttaaagcagcctttttaaccctgagactttccaagatctcctcttcacacaggaagtttccttctctgttgtcagatttagcactgtgctcttgtcatcagatccgagccaggctccctgctgcacagtagagaggcttccttaagacatttgtccttgaaactgcaccaaactcttggaagaacccagaacgtgtaagtatgtatgatttaggcagcaatagtacagggcaaagctgcaatcaaccattatacaatatccgattagcagtgcaggagggatttttccgacgttatgttacattcattttcaatttgttctgaggaaacaaatcaattctagcttctgatacagtgactttgcagtagatggggttgtaatatgttagctttaactatttgctgttctcatttagcatttagatgtgacttgtgggacaattactgtgggcattaaactataaaacttctaaatttttattaggaattgtaattgttggtcatgtccatcttgagaaacaagttagctttggggaatgtttttaaagaattaaccacataaattcatggacaaaagaatgaatttgtactgttcttgctctcaaaacatattagtttgcagttttaatttactcgtaaagagcattccactgaggttttgtcttaattgaatcctacccagtgctgtctgtttggtgttttactgtcttgtatatatctgtttaagttacttcgctaggattgcagtctggttaaacctgtatttagccactacctagattctaagaacattcaggtcagtaaatgctcacagaattttggaaagtggtggatttgttttcaagggtggtcgtattacccttgaaagctttttaggtgcacaatgtgaatggctgtcagatggagaccacagactgaacactctaaggctctaagtcaaatctcggcttgtccactttcataactccaattaactccaaccaataaaagcccatgccccctttctatcaatttttaatatgcaacaatacttatgtttatgagattaatttctctcagattagtctgattgatagctggattgtggtttcttaagagcttgctccctgaaacccacagcagagctgcattccatttaactagtgaatgtaaaaacgggtaaccatggattcagccaccactaactgccagtgcaatgacttgttgtaaacaatacaaatgagccaggagagcagaggcaaccagacatgaaatgattttaatagaaattacggtaaaaggtcatgtgatttggtatcagcttctgttcagttttaaagggaaagtctttattttctcccccttcttccccccttacctatttccaaccaacccaagtaggtatctccacaaacttggcaggtcccactctgtgcttccatggagaagggcggccaatgtgattctgggcaaagtgtggtgacttgtggattttcactggtaagtacctttattttagaaacaaaaaggaagtctgtatttcagggcttcctttatggaaggtcaagctaattgcgtactagaagttctcaagtcttgacataagaggaataggtcatttcgttccttagcttttaaatggtacaactgtcttttctctctctctccctgtctccagattaattcgtaaactcagtctttctgaaaactgttatttgctttagaaacaacttctgccatatggtaataagcacatgcagatactgtgagaagtgctgtgtcctaacttcagagttttcatctacccagatattttctgagttctacgaggaccagatatcacaataatatttgcatttctctggtagaggtggtttcagtgtgtgaaaatgattgtattcataaatttgccttcaaccgagaaaaatgagcaaattgtacctgtgttaagtgctaacctcgtggtttgtttggtgtgctgttatctgctatgcttattttaaaaactaagtgaggaatgtctagtagccaaatctggggggaaaggggacatttggaagcatagccgtgtctttatccagatttggaggtggatctagtcagtacacagcatgcatgcaggaatgaagatgctcagagtcacagtctcaaggaaccacaggcactttaagcaaaggactctgtctaggtgtgctgagcttcaaggtgaaacagacctgaactggtttcttgagccatacttccttccacatacagatggtataaataattgcatcatcctggaacaaaagataatggctcttttaactccttttaacatatagattcttctgaatagatgcatcattgtacatatacaggtgtcatactgaatgatagaatttcaggtgtgtatttttctattaatacctctactgtaa

SEQ ID NO: 4658 - DNA, 6000 bp, Homo sapiens
gtgctgtgagtgtgagatcgtgtgtgtgtatgcagtgcatggtgctgtgtgagatcagcgtgtgtgtgtgtgcagtgcatggtgctgtgagatcagcatgtgtgtgtgcagtgcatggtgctgtgagatcagtgtgtgtgtgtgtgcagtgcatggtgctgtgtgagatcagcatgtgtgtgtgtgtgcagcgcatggtgctgtgtgagatcagcatgtgtgtgtgtgtgtgcagtgcatggtgctgtgagatcagcatgtgtgtgtgcagtgcatggtgctgtgtgagatcagcatgtgtgtgtgtgtgcagtgcctggtgctgtgagatcagcatgtgtgtgtgtgtgtgcagtgcatggtgctgtgagatcagcatgtgtgtgtgtgtgtgtgcagtgcatggtgctgtgagatcagcatgtgtgtgtgcagtgcatggtgctgtgagatcagcgcgtgtgtgtgtgcagtgcatggtgctgtgagatcagcgtgtgtgtgtgtgcagtgcatggtgctgtgtgagatcagcatgtgtgtgtgtgcagtgcatggtgctgtgagatcagcgtgtgtgtgtgcagcgcatggtgctgtgtgagatcagcatgtgtgtgtgtgtgtgcagtgcatggtgctgtgagatcagcgtgtgtgtgtgtgcagtgcatggtgctgtgtgagatcagcatgtgtgtgtgtgcagtgcatggtgctgtgagatcagcgtgtgtgtgcagcgcatggtgctgtgtgagatcagcgtgtgtgtgtgcagcgcatggtgctgagagatcagcatgtgtgtgtgcagtgcatggtgctgtgagatcagcgtgtgtgtgtgtgcagtgcatggtgctgagtgtgagatcagcatgtgtgtgtgtgcagtgcatggtgctgtgagatcagtgtgtgtgtgtgcagtgcatggtgctgtgtgagatcagcatgtgtgtgtgtgtgtgtgcagcgcatggtgctgtgagatcagcatgtgtgtgtgtgtgtgtgtgcagtgcatggtgctgtgagatcagcatgtgtgtgtgcagtgcatggtgctgtgagatcagcgtgtgtgtgtgtgcagtgcatggtgctgtgtgagatcagcatgtgtgtgtgtgcagtgcatggtgctgtgagatcagcgtgtgtgtgtgtgcagtgcatggtgctgtgtgagatcagcatgtgtgtgtgtgtgcagtgcatggtgctgagtgtgagatcagcatgtgtgtgtgcagtgcatggtgctgtgagtgtatcagcatgtgtgtgtgtgcagtgcatggtgctgtgagtgtgattgtgtgtgtgtgtgtgcggtgcatggtgctgtgtgagatgtgtgtgtgtgcagtgcatggtgctgtgtgagattgtgtgtgtgcagtgcatggtgctgagtgtgagatcagcatgtgtgtgtgcagtgcatggtgctgtgagtgtatcagcatgtctgtgtgtgtgcagtgcatggtgctgagtgtgagatcagcatgtgtgtgtatgtgtgtgcggtgcatggtgctgtgagtgtgagatcagggaccagggggctagtactctttcctgcacatgagcctgcgtgggctggtcagggctgaatgattttgtctgaagatcccaaaatagctcatgtcgcctgagctccctccctggctgggcctggggcctcaatggccctttgtctttctgaaggcatctgggcctctgtggggggctcagacactgactggggctgggtggggccaggctgcctgcctggttccccttcccctggcccagcccaaggggccctaagcctcattccagtgtcggcctggggcagccaggccccccacgtgactttcagcttgttgggccccctttgctggcagatcccagggtctctctgtgtgggggcaaacttcccaggcagtgtttgaggccccctctgccagcccgtacctggggctcccccacccctcccacattgtggtacctgtcctcctcctgcagagcccgcccagagatcccatggctgaaggtggtggcagcaggcgggctggcgcgtgacctggtagcacggcctgggtttgaccctggcactgcccctgggactcagagctgggaggtgagaaatggggaatgcatgtgaaccacctgcctctgcacacagcaagtcctgttctgggttttctcatccctgggtcacaccctgcgctggggagataaaaagtcagaccctgcccggggcacccacagtcagcaccgccggaacactgtcagcctggtgtggacagtgccaaggtccagcagggtggggtggttggggtaggagctcccctgaggagagagtgaggccagcaggggtgggtctccaagtgcttcctttgacagctgctctggatgggacgtggcttggggtgggtgagaacccttggctgagtttggattttcctgcagggtttcattggaacaccaggttccagggccgtagagatgtggaggcctcctgtctgggtgatggggcatggtgctggtccctggctgtggggtggaaaggagtcccaagagagggagctggcaagacaggaccttcccagctaaggtggggttggtgggatttggctggggcccttggaggagcctgaccaggaggtgagacagggcacctggaaggaaggaggcgttggggagagtccagatggaggccatggggttgaggggcccagacacccggctgggggactccaggaaggcagcaggtgtgggcagtgggtcctctggggtggactgaggtgaggcctgggtgtgaccacgcggtggcactggtggctgccggcagctgtcgtctgcagagtgggtgagaccgagtgtggcagatggcttggtccgcggtgctggaggggactggcggagcagaagcgccctggcgccgggtccttgctttcctggagctggggcttggggaatggggtcggtcattgcagggacagaggagagggcagggtaatgggtgcgcaggggtcccttccaaaggctgcgggtggccaggggtgtgcgggggcgctgaggtgcggtcgccgagagattctggcctccagggtggtcgggcctggcatggactctaggggatggtgcacacaccggaccggacgggcccctcccttacccccggatcccccggctgggcagcggccagggagaggggcgacctacgggggcgggtgtggggacgccggactacgcgtcaggagtcccagatgggcccagacccccattccccgccccgggccgcagtgacgtcagggcccggacgttcccggaacggcctcttgggggcgttccagccccacggacccgcagggagtccccgccgcaatttgcatggggctcatttgcatgaccccgccccgcgcgggagtcgggggcgccggcgactggaggagccactgtcaatccccaggggaaagtgggcgaggcgatttctgggccgctcacctcactccaccctccagctcgcgccgcacctggggccctcccccacctacgccccgccagggcggggccgcgggcgcagacactcgcgggcacacgcacgacgacgcgcacacgcggtcgcacgcggccccccgagccccctgcggcgactccgattcacccccgcgggtgcggggcgcggacccgcccggcccagctcctgctccccaggcgcttcctcctcccgcgacctgccccggccgcacccgcctccgctccagcacgcgacgctgcccggcgcgacccctgctcccccggcccagccccaccgctgccctcgactcaatcccagttgaacgcccgcagcctcagtcccacccccggcccagccccagcgcccccagtcccacccccggccccagcttcagcctcagcgcccccaggcccagccccagtcccacccccagtcccaacaccttcaggcccaccctcggccccagcctcagccaccccagccccagtcccggcccagccccagccccagcgctcccggccccgggcccagccccagccccagccccagccgagcacccccggccccgcctgcccggcgttcccttttgtgcggcgctctcccgtccgcatccgcccgatcctctggaactccccgcggacgccggggtccctggaggcggcttcctttgtctctgctcccgccctccctccgcggcgtcttcgcccctcactcacctccccagccccgcggggacgaggggagctggagggagcccgggacccggcgcggcctccgcaggcggcgctttcttctcgctcccgacgcggccgcccctcctgcctgcccgctcctatcgccgcttccgcctctgccggggacggggacagcagaccctcggcgcccggcccccgcgcacctgccgcgcgcaccgcctctccggcctgcgcggctccgggggctccgggaagaccgagcgctggcggccagcccggggaggctgtgggcagcaggggtggctgcgggctcccagtccctcctccgcctacctcggagcccacatttgggatttctactccgggagaattctgccctcctcccacgatgagcctggaggactggagccgggacctggcacccccagggctgtgactgggtgaactctgagggcacagctgctgtccgccgccccaggggtcccaggatggggcgagcagccctgaagaggcccaagggcaccccgtgaggagcccccacgctctgagagtggggcgcagagccggagccccgggccatgcctccgctgccgctggcgcgggacacccggcagccgcctggcgcctccctgctggtgcgaggcttcatggtgccctgcaacgcctgcctgatcctgctggccaccgccacgctcggcttcgcggtgctgctgttcctcaacaactgtaggtggccgcgggcggggcgtcgcactggccaagccccaaccccgaggcccctgcacatagaggctggaggccgcggcgggtccgcggggctcccggcagcttcccggggatgggatgggtcactctgcggacccctcggtccctggaggccgtccttgggctctcagtgggcctggccctcacccaaagctgcagaaacactttctgcgggagctggggagggaggggcagccggctacactgagagccggcagttgggggtagggcaggacctgcggtggactcttccagggaagggggtcctgcctgcacccctgtggctggggccccatctgacaggggtcaggccatgactatttggctggaggggcagagaaaagcaggggcctctgtctcagacctcagccagcccatggggtcagggctggacccttcagcagcctggatccctggggctagcggtgggggggggggggtgggcaggggtgcccctttccaggctgggcaaagggatgggacagggaggagcctgctcagaggagcctaacttggggatttgttttcttccagataaacccgggacccacttcactccagtgcctccgacgcctcctgatggtgagtagggctgagttcgggggacctggatgggctgtggcactcttgggagtcaggggccatttggaggtgtgcacccagacgtgtggagtgtgtctggagtgaggaggaggctggacaagggcacctgcgtctgtcctgggagtccgcagcggtgggccgcagtaggaactcggggtctagaggccgccgcctgacggcactggacctcggctctcacttctctgggcctcagccccctcagcctcaaaactgggaacaagtcctgggacccacaggttgtgaggtgatgtcagacctgtagggcagggccagagtccggtcagggggctccgctctattgtcctcccttctccctgttcagcaaggggtggggctggacagaggctggaagtggacaggagcttgcagggaaggctgagctgggggagggccctgacc

SEQ ID NO: 4659 - DNA, 6000 bp, Homo sapiens
aacaaattccttgcaagattagtcaggaagagaaacggaaatataccaaaatataacaaagtatattttagaaaatatcaaagcactataaataccaccctcttctccatcaggtgcagactgtgattcctccctaaattatagatctgtgagtttgaaagaacagaaggaatttgataacatttcattgcagcaaagtttttgccaaaccgcttttcacagagcccttgtatcttacatctcagtgtttctgaaagagccaaaattagttcttattgatgctcaagcaactgaggaattatgagcattccattaaataagggtaccagtttgtaactatgtcattgcatgttaatactttttgattcccctaatgactaaatatggttctcaatgtgtgtgatttccatctgaatcaaagggagtcatgtacacaaagctagaacttgatgtagtgctactttgaaatataaaagagtatttccacaacacatgccttcaaactttaaatgaaacccataacagatgtgaaaaaagaattatgacaaggacaacctaatataagttttataaattttaggaaatgtcatctttttactggtttcagagactttttcaaatgttttaaacacaattttcagataacaataatgaaaagctgagccccaaaccagggacaggtgaaccagttttaagtttgcactacagcacagaaggaacaactacaagcacaataaaactgaactttacagatgaatggtaagttaatatttttgtaaagatgttcttagccattttgtaggattgtattagattttaatttttaacacttcgtcatctttatgttttgttttgctataaggtattggttttcaaacttgagtgtgcttcagaatcactgggagagcttgttaagatgcatattactggaccccactctcagaattaggtttggagtgggggtctgagaatttgcatttttaaaaactttccagatgatgccggtgctgctcatcctagaatatttcttctgatagaaaatgcaaaagataatactaataataataattaaaattagtgcaaaaatataaacattttgggactttttgcagtcgtggtcctaggtaggtgtatatgtatgatttttgttttgagttttagaatataattttagtgatactaaatatactgtattctcccctgcatttgtttgactttataataaatattcccatgttactacttagttttaataaatattattttactagctgtgtaatagtccatcaagtagatgttctatagtttacttagccattttcatttaattgggcagtaaatttgtttaccattttttaccaaataaggctttaatgaatatctttgcttataaagccttttcctgccttcaagattatttgagagatatttctgaaatgaactatatctagattaaaagatattgccaaattatttccaaaagaatctttacttactatagtcctactagacacatgtagaagtatacgatttactgtctccaggctagtgttcaatatatttatttatttttaacttctatatttgatttaaaaatacttttagtatttaattgattattagtaaggttgaactttttctttatttaatggtcatatagcttctctttaataatgtttctgatcatatttattgctcattaatctaatgaaactttacatttgagaaaagcaagttatgtaagctttttatactctttcccactatctcatgaccatttgaatgagagagcatacaaaatttttaaacttaggaatagtaatctattagttaatatattgatatagtatttcttaatatataatatagttgtataatatttgttaatatataattataccaattgtttaatgacaatatattaattattcataattaatatattaatatattaatatattaaatatttaattgtatattaatatatgatcatgttatctgttactataatatatgtaatataatatagttatgtattgtcttaatatgtaatgaattatatgttgatatgtgatattacttttatttaaattcactggtttccatttgtgtttatgtatgtgtgtattttatattaaaatatttgattaagtaggatcttaaaatactattggatatcttctatgttccggggactattctagacattggaaatacatcagtgaaataaagtacttaaaacccctgccttattggaacttacattctagatggaggaagtttattataaacataattaataagtgtaccatatagtatgttagaaggacaatggaggaaaatagagcaggtaaaagtgattgggaaacctaggcatcattgagaaggtgacatttgggcaaaatgtcacttgaagagtgagaaggagtgagccacgtatttatatctaggggaagagcatttggggcagagagaaaaccagtacaaagactctgaagcagaagcatcagacctagtatgttcaaggatcttaagaagaccagtgtagcgggagtggagtgaccagtggagagaagagtagtagataaggtcagccaggaaattgaggaggatatttaaaaggaaaaggttatttctggttattgtgttgagcatatgccatcagtagaaaccagaagaacagttaaaaagctatggcagtaagaaaggtgagaggtggtggtggcttagacaaggatgggagcagtggaggtggtttaaaaaaaaaaaaagtgatgggattctagatatatatttgaaggtgcagccagtaggactttataagtcttagtgcctgaccatttaaaaattgtgatgtttgtggccctttttcttaatacataatttaagatgacagtaggtcatcgtacttatcacgtcttttccattctcatgtttctgtacacaaggagctggcatcttctgaagaatcttatctaaactttttgggctttttttttttttagagaaaatcattagtcccattcttcttttgaatgctacttttccttctctaaaaactgaccatgaattatattctcattcatcaatttcttatttctttgtcagaaaagcagttagcattttttattattatgcaagtattcaacattcattgtaaaaaaaaaaaaaaaaccaaacaggcagaacttaaaaaaaaaaagtatacagactttttcatctatatcaggattgtctcttgcttttattttagtttctttggcaacagatgaggcaatagaacatgctaagagcttggactgaaattgacaagtttttgaatctctctaaatctcagttttctcccttgaaaacgggcatgtttaatagaacctacttcataggtttagtatgaagatttaatgagatcatgcagagaaagtacgtagcacttactagcacattgattggcacctgagaaggccctcattgattgttagctacagttctcatcttttgtaaattgtctttcagatactttgcccagttttctatggtgtttatctttttcttattgcgttattagagctatttatttattatagaattaaatgaggattataccatttgtctttcatttgttgcaaatatttttcccaatttggtgtttgtttttcagtttacttacagtggttttgccttatggtttctgcctgtgatagcatgcataggaaagccttgttattcctagaattaagggaaaaggttcttatattcctctcatattttctataatttagtatcaaaaactgtatattccttctagaatttattttcccataaagtataacgtgaagccatagctttggttttaccacatggctgttttcttgtctcattaccatttattgaataatctttttatttctgtgtgatttaaaatgccatattaacgtatgttaaatatatttactcggttgctgtgtcttttccactaatatgtctctattcctactcagtaccataatattttaattactataatgtatacactaagcgttttattcatgcctgaatcatagctttctcaatggaaaaaataaatatatatataccaccttagcttttttttgccaaaatagctatatattcctttctggtttaaaagaaatacatgtttgtcgcgcacacacacacacacacacacacacacacacacacacacaaattcagtataaaaaatttacctgcagtaattctactgacatgacactcaacactgatgcatagccttcctgacatttttctctgcatatatacacccatatgaatatacagttttagttaaataatattatatatgtactctcttttttttaaaaagtcaatttgacttctgcagtcagcctaaaagagtttttgtcatggcaaaaagtccatgatcgtttgtattgtttattgagttactggtatttgtctataattaatgtttttttaagttactgtaaatcttactttttttcttgttcacatttattttaaacttaaagaattgttgcatttctatgaacttaatttaaatctcagtcagattgttatacatgtcctctttctcattcagtcctcttgttacacatatgccatgatttgtcacagaatacttattgaaaattatttctttaaaaattggcctcgtattccgctatagctagaaatgctaatagaactatagtcatcatcaggtgagtattaaaactgaagcagaaaatattaccctgtccttctacagaactatgatgctcagtcacctgccatgtttgaacagcagatcagaactggaagtgatccacagggagcagttcaaaagaccaaagaactggccaggcttttgttcaaatactaattttaaagtagcctggaataacagagtctagaagggcatatgataaaaatctgtataaccattaaggttttggatatggtgaaccatctgtagtgaagacaagaaaggagacaatgtagttcacttaaaattcaatagagagacatgtagaaatacatactagataatgaaaggatccaaacagtgaagaagcagtccctttatatttttgaattttttttcaagagtaaagtgtgttatgatagtcatcttgatttgtttgaaatgatgtttacaaatgctattaaaattataaatcctacattttacttgtgaattttttggtctacctttctagttgtaaaatataaaaatcctaaaagatcatattgattaacttcttggtggaatcacttatcttgttttgatgataggagcagtatagcatcaagttctagaggaattgggagccattgcaaatctgagggtcaggaggaatctttcgtcccacagagctcagtgcaaccaccagaaggagacagtgaaacaagtaaggtgttattttgcttttgttgttataaaattgcagcattggatgtttatctactttcctgttcccttcgatgctgtattttgtttcttgtttttaataaattacttttgcttctatagtccagctgttaaactgatagatagcaaatccaaaagatggggaccttaagcagttaaaatgaggagacacagtgaagcacaatcctctttgtggacacagtggccaggatagttgttcatcatactataaatggatgagatataaatgttagtttgaattagtctttatcatttttatacctagcaatgaaatccactgtatttgttttggttgtatatgtggtttatagagggggaaaaaggaatagaatctaaacaagttacgagtgaatctatttaatacctgaagtgccacttaagggatttttcagaacccttttctaatagaatatttttatatgacaattacatgaaatttaatgtctagcacagagactagaacacagtagatgttcaataaatgcttgattaatgaaggaataaatgaattatatttcttataaatgtgtaggtaccttagtataaca

SEQ ID NO: 4660 - DNA, 6000 bp, Homo sapiens
tgactgaactgagtcagacaaaataagaattgaattttttttctgattccaatttgacattgtagttcctgtggcttacagaccactggaattctcagagaatcagacacatgaaatacagtattggtaggattcagggcagacaattgctgtggatgttagacaatggcccctgtaccatcatacaatgtctgggaaagcaaacatcttccagaactgctgttgtgctctctgacatcatcactacatgccgacatgccaaggtcttagctaccttccttcaaatgtattacctccatcaagtatcaaaaagtgaagactgatggcataaagaattatctaatgaaaagttcctctggaatgtctctaagcaaatcagaaggacattgatgacagtgcctttttttgactacagagttgaatcatcaaggcctctttctctagataattattttattatatttcatacactgttaattcattattttgattttaaaaagtaaccagggaggctacttacttcaaatattccaaaatcttccaaagaaataggttgttacaggccacttaggtgctgagggcctgaaggaaacaggaagatttacacatctttaaagtctatatggttttcctataagccacttacctacttcctttgagaaagacagaagggagaaaaaaagataaatgctcacaggaactgatgatataacaccgtgcagctgctaatgcatatggatgtgtcatgcaaatgtccccagcagaaacacattctttagtttaaacctgcaaccatattcagcaataagagtttccgaaacaaactgctgactccttttttttttttcctttttcttatcagaacactccagcatacatcttaccaggcagagtaaatcaaaagaagaatcaactggagttaccaactcttgttttcccctggatatcaggtgtgggctccaattttgcagatcaatttgtgagctgaaataagtagctgtggcccactaaaactcaaaataaagctgggtttgggtgatacttgtgctaactttccaaaggccttatctttgcaaagggacattgtaatttaccagctgattggtttttccctgtctaaagatataggttgattacacctttatctgaatataaaaagatgtggaggagctgagaggaatactgagtaatagaactttgttttcttgtctttatcttttctattcttttagtctcaaattttgcagattctctgataagtgggtaggaaaagtagactcaagagaaggacaaaaaaaggagaataagaataaggaaaaaaagaggtggaaggaatttggggcgcaatcttgtcacattaaattttccaaagcatcgacatagttagagcatatagctgtgaatttattgtgacataggcttctcctcacgctagcactgcttatttattgaaaagttctgtattggggaatgaaaaatgtcaaacaggaaacttcaactgttacctggaggggacgttaaatggtgacttgggagtgattcactccaacttctttatggctgggagaaggaataccactctgacatttttatataggcttgtgtgcagaagctaagcacttagaagagcgaggcagttgagattagatgcgaaaagagaaaatgagtacgtatttggggattaacccgcatttgtgctctacagggaagcaagctaggcactcactttgaaggcatcactccagtgaaacgccatcaatcctgaatgaaattacttagggtgaaattgcatatctgcaggcggcatcatctctgctgtgctccaggtttatttatccctccaacatgagtttgactggcctttgctaaatatcacccctgaatagcctagacctctgggaaagggcctggagtcctaaaaatagccactcatttccgttaccctatcttgactacagcgtgctccaagcagggatacggcgaaggggtgggggaggggggaacacaagtattcctttttctgggacccggagccctagagtttgtggcttagcctcggagagcctccggcaaaggcgaggaggttggaaggaggaagagcagaaccgcaaaaggcaatcagtggctcgttctctccttccaccaggatcctagggcattcccatattcattagtagaattcggtccactccaagagcccaggctggagtcgtcactcaggcccaaggcaggttggttagaaaatagctctagcaggccttccctcccattcctccaagccccctgcctggggtcaagtcacgcctaaaggatgtaagaagcctgattcaggagccggtcatttactctttttctttgttgttttcctagaggtgaggcgagaaaaaacgctcacagaaagagagagaaccgttgcaatttgcaccccctcccgcccctcgacgcaggcaattccttgcttgcatctggcggcgcgggccgagccgcctccgcgtggctaatatacatatttagagggggaggctgggcggctgcttcttctccgggtcaatgtgttaattaaaagttggtctgagttggtcagcacacagtcccagatgtgcttaacagcatgcaattaacacataaggcaaatctttttgaagataccagaattgaaaaccccccaaagaaactccaccccgcccccgcccttaacgtggaatagcgatggcaaataagggaaaagtcattaaaagacgtaattaaatgtgggccgccattcttgaagggggtcgagctggaaaaaacattccctaaatctatatatttcaaaaataaatagcaaattgattttttttttctgcaggacaggcaggctcggagatccgcttcgctccgttcccaccccatgtatattaaatagccggcgagcggcggtcgcccggcgcggtgacctagcaagcgcccgaagtccccggcctctgcgcgggcccgcgcaccgccgccgccgccggcaattgcagaggggcctctcccagccagattggtttctctatccagggataattaccgcaagctcacttgcctagcgtcctttatattttcaaaaagttcaggggaagagtacgtatgtattggagggggagtgatagtcattctagatttaaaaatatttatatgaaaagtaacagtattcgcggagacacctaatatcatcatcgacctcatcggaggagcaggtccaggttccactggcccaaggctgcatctgccagctcccgcctgcccgcagttttctgccttatttagccctttgccctaggttctcaggcctccatgtgtcactttgcttctatttgtgttttcatttgggttgactgtgtgtatgtatgtgtgtgtgttacacttctcagaatccaccaaagaccttgagtaagagctgttgactgcatcttccctctctctgaaatctgttagcaccccccggcccaacccgcctcattctcctgcctatacacattcacaggggcaggcgctcctatgcacgcccacattcacccacactcccacacatcgttcattgcaacttccccacttgcagaagccagatgaggacttggtgccgagttgggcaccttaaggccacaccgatctctaagtcaacttcttggttatcaacctagacttttgtcttaacatggtttcagggatgccacatgatcccatcaccaacaccacccaaaaggaggccagggatagcaaatctaaccaattaattatgtgtgtcgtatctaaagggcgtgccttattgatgacacctaatgaagcaaataatggatttgcagtatctcgctattcatctggtccttccagaataccaagtattaaggagagatggatatgatggatggagagagagacagagaggagagggggagggggagaaggggtcggctacagatccttggaaacagaccagatttgttgagtgtcggcttgaagaaagcagtctgagctatgatttaaacaccggaggcatcattgttaactagtgtccgacgactgtcccccgcccccactgtgccttcctcccgctcctttcttttctcccttttgtaggatacagaaggtgaataatgaaaccattttgctaatagtttatgagccatgagattggaaatgtatatggatagaccgtagcaccaggctaaaatcatttgaaagaagcgtgaggcttggcagagacagaaagaaaccctcggtgtcctgtctccccagcccgaagcggaaagggacgaatgaggtggcctcgtgcctctccctctcctctccatccgaggacagcggcttggccggtcctcctgccagcgcctcgccctcctcgtctccccaaggggctagagccagagggagatgaattggggcgatggcgagatagcgcgagcgggagataatcgttatcaccagggtttttcttccagtgatggatctgaaaagatctatcacgcggggtagctctcccggaggcataaaacaatagacgtgaacctcgcgctgcagacagccacagagacgctgttcgtgcgtctgtcatttctgcccccatagggcctgttcccctagttacgaacacccagaaccttgagaaatgccgcgagtacccacccacccacccacccgacctccacattcggccctctaggaggttttcccaaaggctttctttgcggagttgctgcagtttcaaagcctggactctggaggagggatgcgggggcacctaaggggactggaggtggaatagggtgcaaggtgaggcgctggcctagacccacaaaggggccgcaaagcctggggaaatcctaggagctgactcggaacggtggcccaagccaatggcccgcgagagaccgccccgcatttggccaggcgtcccagagagcggaggcgcgcgggggagggcgagggcgggctcctctggaggcggcgggctccaggccgggctccctaaacgggtcagcaattggagcgggaaggccggacaggtaggtggcgtggggcgcacaagcccggcagcgataaccggggacgtctgtactgcttccaaccccgtctttgagaactcttaagcaagcgcgctcgggaccgggaccgacaggcggtaccgcagcctcccaggcccttggggcagcctggaaagggcagtccgtcagctctcgagccccaggcgcggtcttcgcgggggctggaaagggagacgcgcgcaaacgcctgcgtggagccatgggcggtgggcacaccccgcagggggagctactgcctgagcccccttagtatttctgcatttttccactctttccaaactggattctgggacagagtaacttttgcgtttaagaggaggtaactagtgggaagcggtcttaggaggaggtaactggtgggcagcggtgttaggaaaggcgcgattgggtcagcaacgccactacataaactgcatgggggaccctgtttggtttttgccctttggggtactagtagaggttaggcgtttgacctcttgtgtagtgtactggctgctggcattgggcagaggtggggcactggaaagaaaaagcaccactgtcctccggctccctcccccccagctactagtcgctttaggcccacgggacgggcttgactcccatttcgcaggcctgacactgaggcagagaacgtccaaagaggagcagagcaacgtccctgcatctgcggactctcctctcccggtacctggcgtcagctgcaatatctccaatttcctcaatccccacacccatccgtgctgatcgtcctattgaccctggtttctgtgcgacattcaggataaatttagcgtagcaacctcaggaactgggaagtttggtgtatggagcgagtgtctgttatattcggggggctttatttttaaggaagcacctagaatgaaaatgaaaatcctactgagccaatcaccacccacaatccggcctggcc

SEQ ID NO: 4661 - DNA, 6000 bp, Homo sapiens
ggttcgtggtctcgctggctcaggagtgaagctgcagaccttggcggcgagtgttacagctcttaaggcagcgcgtctggattttttgttcctcccggtgggctcgtggtctcgctggtttcaggagtgaagctgcagaccttggcggtgagtgttacagctcataaaagcagtgtgaacccaaaaagtgagcagtagcaagatttattgcaaagagcgaaagaacaaagcctccactgtgtggaaggggacctgaccgggttgccactgctagcaccggcagcctgcttttattctcttatctggccccacccacatcctgctgatgggtagagcctagtggtctgttttgacagggcgctgattggtgcatttacaatccctgagctagacacaaaggttctccacgtccccaccagattagttagatacagagtatccacacaaaggttctccaaggccccaccagagtagctagatacagagtccactggcacattcacaaaccctgagctagacacagggcgctgattggtgtatttacaaaccttgagctagatacagagtgccgattggtgtatttacaatccctgagctagacataaatgttctccaaggtctcaccagagtagctagatacagagtgtccactggcgcattcacaaaccctgagctagacacagggtgctgattggtgtatttacaaaccttgagctagatacagagtgccgattggtgtatttacaatccctgagctagacataaaggttctccaaggccccaccagagtagctagatacagagtgtctgtctattggtgcattcacagactctgagctagacacagggtgctgattggtgtatttacaatccctgagctagacataaaggttctccacgtctccaccactcaggagcccagctggcttcacccagtggatcccgcactggggctgcaagtggagctgcctgccagtcctgcgctgtgcacccgcactcctcagcccttgggtggtcatgggactaggcacggtggagcagggggcagcgctcatcggggaggcttgggccgcacaggagcccacggagggggtgggaggctcaggcatggtgggctgcaggtccccagctctgccccgccggaaggcagctaaggcctggcgagtaatcgagtgcagcgccagtgggctggcactgctgggggacccactacaccctccgcagccgctggcccgggtgctaagcccctcattgctccgggccggcagggccggccggctgctccaagtgcggggcccaccaagcccacgcccactcggaactccagctggcccgcaagagccgcgcgcagccccggttcccgctcatgcctctccctccacacctccctgcaagctgagggagccggctcccgccttggccagcccagaaaggggctcccacagtgcagcggtgggctgaagggctcctcaagtgccaccaaagtgggagcccaggcagaggaggcgtgaagaccgagagagggctgtgaggactgccagcacgctgtcacctctcagcaccatctcagctcactgcaacctccgcctcctgggttcaagcgattctcctgcctcagcctcccaagtagctaggactacaggcgcctgccaccacaccggccaatttttgtatttttagtagagacggggtttcaccatgttggccaggctggtctcgaactcctgacctcccgtgatccacctgcctcagcctcccaaagtgctgggattacaggcgtgagccactgcgcccggcccatccagctaatttttaatttttttgagagatggggtcttgctattttgcccaggctagtctcgaacacccggtgtcaagagatcttgctgcctccgcctcccagagtgctgggatgacaggcgtgagtcaccacgcccagcctagacacagttctgaagggacaaagggggcctccgctccctcctttcaatcttcagctaggccaggctcccacttgggtcctccagccctcagtttccccctgcacccagccaggccaagctgcagaggcgcccggcccagagctgggaaggggcgtggcgggacccgcgcttgcagccgcgggacggaagggggcgcgaacctccccgcggcggggcctgggggggcggggccgggaggggcggggccgcgccccgtgctggccaatcagcgcccgccccggcaccgggacccgcctccgcgccgcagctcccggggggtccggcccggccgagcctcggtgtccggccccgcgggggaggggcgcggcctgcggagcgggatcggggccgggtctggggcccctcccggcggccttcgagccctgccgcccggctccgcgccgcccggagcccctcggcagtcccgtcacgtctcctccagattaggcattaactcgggtgcagccgcacttccggggggccgcggcgggggaggggcgcctgcgggatccagacccgccccccactctcctctccccgccccctcccgggccgcccctttcccgccccacggccgcgccgggcgctgcgtcccggggctttgttcgcggcggcgcgggtcgccggcctccgggcgggccgggggagggaggagggagggggcgggagggggaaggaaggaggagggggaggaggagggcgcggggagggggtaggggggcggggaggagagagggggaggggcgccgccctggccccgcccccccccgcccgcccgcccgcgctccgccgcctccggagctgcgtcccgtcctgtccagtcccgtccccggcgcggcccgcgcgctcctccgccgcctctcgcctgcgccatggccggccggtcccacccgggcccgctgcggccgctgctgccgctccttgtggtggccgcgtgcgtcctgcccggagccggcgggacatgcccggagcgcgcgctggagcggcgcgaggaggaggcgaacgtggtgctcaccgggacggtggaggagatcctcaacgtggacccggtgcagcacacgtactcctgcaaggtgcgcccacccggaccccggcctcccctcgcgacgcctgccgccccgccgggacccccgccccaggccgtgggaaccagccccggtcgctccgcagcccccgctccggctcccttggcgaccgccaagccccgggagggggggtcgccgggtcccgggaaactcgcgggcgccggggaaagttgctgcgccgccgccgtcctccgcccgccgccgcctccctcctcgcggagacaagtgcacctcgcccacggactgcggctgccgcgcgccctccctaccggccgagaaggagaggggcctggggagggggggcctttgcccgggcggggagcgggggctgggcctgggatccgcttgttcccctccccagaggcctttcccggggcgagaggggttggtcaggagagaaaaaggggcgcacagcctgagctcccaaccccgggagccaggtggggggtgccgcagtggtgcggggggggggcgtgcaggagcagagaggtgggcggggccgtcaccgggcctcgtgtgcttgggggcagggccggtgccccatcgcgctcctgcgggaaccggggctccccaccccggggaggggaagtttccctggtttctccttcaggtgcttctgggagcccccggggtaggtacgctgggacccccaccatcttctcctagtaggggctcgggggacccagagccggcgcccgtgtacccccaaaaccatctcctgggaccagaaatccactcatttccctccacggaggtggagaaggtggcagcttctttcagactggccggtgcgggctacagctgggctcccccgccggcccagtctcctccacagcggccagggcactttgccaggcccctgcaggattttcccgacttcctccccgctgctcctgggtgtggctggggtgggggaaggcgatgaaagccaccaggccctccccctgcctgggtcatctgcctcctggagcctactgttggggggcgtggaagaggctctgcctgcgcaactggagggggtccctgcggatgccgcagtcctgaggctcccagcaggggctgcgcagtggacaggccaaccattgtctctccccccatccggcagccccagccccccagatctgaggaaggggctgcttctcccggctttgttctcaggggagtgcgtgagtgcgtgggtccctgtccccgtgagggccgccaggtcggctgtagcctttaccacaggccaccgtcagagcagctgccctcagggccccaggagctgagaaggtggagggtggggcaccctgcactgcccaaacttgatttcgtggttcacaggctgccctgagtgcacagactgtagaagcccgaggaaggggcgtctcagcccagccacagggccaagctggccccttaccccaacgccccatccccctcctccactgcccaagcttgctgggaggtgggccctgagcactgggcaggtggggagaagtgtggaaggcaggcaccccaagccaggtgggcccccttcccaaattcggccttagctgatagggacgttattggagctggggtggctgaagttggttagacctgggggaggggatgtgttcacaggtgacgcatctctgagcgttcccgcatgggctgtggtggccagtgtgggcttcccccagcttccgcccagcgggctgactcagaggtctccccacatctctgcccagggcttgagtctactgtggacatttgccctaaacacctaaagcccccagtctagccccttccccaggagaggactaatgacacctaccgccatgtccaccccaggttcgggtctggcggtacttgaagggcaaagacctggtggcccgggagagcctgctggacggcggcaacaaggtggtgatcagcggctttggagaccccctcatctgtgacaaccaggtgtccactggggacaccaggatcttctttgtgaaccctgcacccccatacctgtggccagcccacaagaacgagctgatgctcaactccagcctcatgcggatcaccctgcggaacctggaggaggtggagttctgtgtggaaggtgcgtggtggggggctcgtgtgggggcctgtgggggtcagggcagtggccaagggggacaggttgcaggggtcgctgtgcggggtcctttcgtgctgtgccggaggctgcagcacacggtgtcttgtggtccaacctcattctctgcttctccgtccctggctccccagctgcatctccaagccctcacattagacatctttggccctggggcccaaggcaagtcccagccctgcaaacagatggcctcctgcctcctcccctcctcccagctctccatacttccttctggaggccccttctagggagaagctggacaggtgaatgtccccagctgttcaagcccctgtgttagcccagacctccgtctagacgggcccgcgtgtcgagcactcctcgccgtggagatcgggcgggagggcgaggctgtgcggcgagggcttctgcggatgtggagggtgtggcatttgccatcgtgaggtcttgcttgctgttcccatggctctgccgaagggccgaggagtggccctccctgaccccagcctggtgggggcagaaatcccatggcagcccccgcaggacaagtcccagttggggactgagatcgttggctggggaatgtggcagggaaaatataggaggtccctgtcgcccccacatcctgtctgctccctcatggctgcctgggaagggatgtgtcggtgggggggtctggagagtgcttcctcctcaaggcaacggtaagggtcctgacttcccgtctctccgatctgctccgttggccggcaggaaactttgctgccctgacactagcctggctcttgaggggtccttgtggggtcctggactgtccact

SEQ ID NO: 4662 - DNA, 6000 bp, Homo sapiens
aaacgaagtggtgagagaggacatccttgtcttgtttttgatattctacaggttgagtgtctttaatttgaaaatctgaaaattgaaatgctccaaaatttgaaactttttgagtgccacatgatgctcaaagtattttggatttcagaaatgctgtaaaatttcctctgagaactactttgttgcacctcacagattttaattagtcttgttttgatttcattgaattcagaatcttttaaaatttctcttgagatttcttctttgaccgatgtgttattttgaacttgtgtgtattttgggattttccagttatctttctgttactgattttagtttaattccattgtggtctaagagtagacactgtttgatttttattcttttaaatttgataaagtgtattttaaggcctcaagtgtggtctgtcttggtaaatgtttcatgtgagctttagaggactgtatattctgctgttgttgaatgaagtagtctataaatgtccgttatattcaggtaattgatggttttgagtttaactgtgtccttactgattttctgcctgctaggtctgtctgtttctgatagagggaattgaagtctccaggtatcatactagattcatctgtttctctttatagttctgtcagtttttatctcacatatttcgatgctctgttgttaagcacatacatgttagggattgggaaactatgttgtcttggggaaactgacctctttatcgttatgaaatacccttctttttccctgataatttttcttgctttgaactctggtctgtctgaaattaatgtaactactcctgttttcttttgatttgtattagtatgatatatttttctcaatccatttacttttaatccatatggatctttatatttaaaatggatttcttgtaaacaacatatatttggatcttgttttttgatccactctgacagtctctgtcttaatttttaggctgggtgcggtggctcacccctgtaatcccagcactttgggaggtcgaggtgggcgatcacctgaggtcaggagttcaagaccagcctggccaacgtggcaaaactctgtctctactaaaaatacaaaaattagccacgcatggtggcacatgcctataatcccagttacttgggaggctgaggcaggagaattgcttgaacccaggaggcagagggttgtagtaagcggagatagcaccactgcacgccagcctggcgatgaagcgagactccatctcaaaaaacaaacaaacaaaaatgttgccaggcgtggtggctcacatctgtaatcctagcactttgggaggccaaggcgggtggatcacctgaggtctggagttcgagaccagcctgggcaacatggtgaaaccctggctctactaaaaatacaaaaattagccaagcatagtggctggcaggcacctgtaatcccagctactcgggaggctgaggcgggagaatcgcttgaactcaggaggcggaggttgtagtgagctgagatcgtgctgcttcacttcagcctgggcaaaagcgtgaaactctgtctcaaaaaaaaaaccaaaataataatttttaatttagactattgacattcaaagggattactggtatagttggattaatatttcctatatttgttaactgtttctgctttttgtctttgttccttgttcctatttttgttttccattcttctgccttttgtgttttttttgtttctgttttttttttttttcccttttgagatggagtctcactctgccacccaggctggagtagagtggttcaatctcagctcactgctacctccgcctcccaggttcaagtgattctcctgcctcagcctcctgagtagctgggatgccaccacacccagctaatttttgtgttttagtagagatggggtttcaccatgttggccaggctggtctctaattcctgacctcaagtgatccacccaccttggcctcccagagtgctgggattacaggtgtgagtcaccatgcctggaccttttgtggttttaattgagcatttcatatagttttttttttctccttccttagtatttattagttacacctattttttaaactttttaattatttgccctaaagttttcactatacatgtacaacaaatctaagtccactttatttcaaataacactataatgattcacagggagtgtgagtacaaagtaattttaaatcttccatcttataccttgtactatttctgttattcatttcacttatttataagcactcataagcatatttttgtatatgtgctagatataagcatagatgatcaaatacattgttgctgttattttgaacaataaaataatttgttagctcaattaagaataagtaaaatgaaagtttgtgttttatcttcacttattcctccttcagtgctccttctttctttatgtagatatatgtctctgacctatgtttattttccttttctttaaagaactccttttgtaatttcttgcaaagtaggtctgctggcaacaaattccctcaatgttaatttatctgagaaaagttttatttctcctttagttttgaaggataattttgcggggtacagtattctaggttggttttgctttgttttgtttccgttactgctttaaatatttcactcttcttgcttacatgatttctgaggagatgttggatgtaattcttatctttgctcctctatagataatgttttttcctccagcttctttcaggattttttcttatctttgattttctttagtttgaaaaatgcttgcctagctgtagttctttttgtatttatcctgattattgttctctgagcttactggatctatggtttggtttctcacattcatttggaggaaattatcagtcattattatttcagatattctgttcttttctccttctcctctggtattcacattatacatgagttatgccttttgtagttgtcccacattccttggacattatgttttgttttgctttttttcagtctttgttctttttgcttctcagttttgtacgtttttattgatatatcctcaaggtcagagattgtttcctcaattgtgtctagtctactaatacgcccatcagaggcattgttcctttctgttacattgtttttgattgctaccatttcctttttattcttaggatttccgtctctctgctgacattgcccatctcttcttacatgctgtctactttatccattggaactcttagcatgctaatcatagttgtttcggattcctggtcttacagttccaacagtcctgctatgtttggttctgatgctggctttatcccttcaaattgtatttttgccttttagtatggcttgtaatttttcttaataactggacatgaagtacttattaaaagtaatggtataaataggtccttaggaatttactggtaaagtgtaggaggagaggaagtgttctacaggcctatgattaggtgtctgtcacttaaagagcctatacgtctgaactgtgggcttcacaagggattatcagcacctcctattcccaactgaggtggaacaggttagtagattaggctggagttatgtattttccttccccaatgcggaaggctggaattgggtatttctgtttgtctaggtcagttaggctctaataaaacctcagtgggtaggctgtggtgaaatagcttttcttaagggcagatcttgttaagaaagttagagtactctgggatacccaaaatggtttctttttccctccctctgctggatgtacaaggtgattttaatctgaaatttattgtgaaaatctggttgagctctgaagttaaaatcaaatcacaaaaacaccctctgcaccatacccccaccgcatgactgggttccctggagtttttttcttttttgagacagagtcttgctctgtcgcgtaggctgggtgcagtgacacgatcttggctcactgaaacctccacctcttgggttcaagcagttctcctgtcgggaggctgaggcctcccgagtagctgggattacaggcgcatgccaccatggccggctaatttttgtatttttagtagagacggggtttcgccatattggtcaggctggtctcgaacctctgacatcaggtgatccacccgctttggcctcccaaagtgctgggattatagacgtgagccaccgcgcccggccttccctggagtttttaacattcagacttaacgctttctgaacctccaacaattcatcaattatagttcaggttttcctaccctagctctgtttctcacagaggtttctgctcatgagtctgtgctctggtaagccaagactccttgtgtttacctgttcatctctgcaatctagggggtagcattttgtcctgtgtccttacctctctgaaggatccaagatcagttattgattttacagtttgttaactttttatttgttgttagtatggagtggcaactgctaagcttcttacgtgtggaactggaaactggaagcttgtttttttaatacatcaactattaaatcaagcttgtctaacacacggcccgtgggctgcatgaggcccaggacagctttgaatgtggcccacataaattcataaactttcttaaaacattatgagatttttttgctatttatttttagctcatcagctattgttagtgttagtgtattttatgtgtggccggagacaattcttcttcttctactgtggccaagggaagccataagattggacacccctatgttaaatactttttaacgtataacctcattagtggtaaaaattttgtaccgccaggtgagtgaaagatggcatattttcttttatgtccaatttgcttatatttcttttttgctttctctttaggttaatacaatctgttggaatgacactggagaatatattttatctggctcagatgacaccaaattagtaattagtaatccttacagcagaaaggtaaagtagtttaaaaaatctgtaatttaatgagagaaaaaaaatcaagaaggcagaaatgaagaaactgtgaacagtcatagaatgggcatttatattagaatatcctccctattttgctgaggtttattgtataatttagaggttcttaggtacatgtgggtctcttagattacttagggaaacaagattttattcagccttgggatctagaaaatttaaatatactttatttaaatggttaataattggtacaagtgacattatttcaataacattttttgggggaaaatgtgccataaataaagtatgagttaatgagaaaattacttttatgtgttaccttaatatattatcttaacattctaaaaagttacttattttaatgttaagaatagtgtgggtaaagctgccaactttggtcattgtttcgttttcttaaaaatttgaaatttagtcttttagaaaatttacatttaaaacttttaaagacaaaaacagccaaatgactgcggtgtgaatagttcttgaggtactgagaaaattaaaatggtttcaatgaagaaaaaaattaccataagctaataaactccctcactagaaggcaagagatatctaagaattaaataattttctaactctcaagtaactttaattactgtttcaaatagcattccattttatccacagaatgtttcctttacaaggatggtttcagagaaattaagatactgaatgataaagctataaacagctgactgattgtaataaaaagaaagtgtgtgatgttctttacacttgacataacagttaaatgagaaaccttctgttttagaaatatgactaaatagttattttaaaatttgtaagatcttaaacattcaacacatcatttaaagttccagttaagaataggaatatgtatatttcctagctgcctcccaactcacatgatacatttttctctcctga

SEQ ID NO: 4663 - DNA, 6000 bp, Homo sapiens
gtatttttagtagagatggggtttcatcatgttggccaggctggtcttgaactcctggcctcaagtggtccgcctgcctcgggctcccaaaatgctgggattacaggtgtgaaccactgggcctgactgacccagtcctttttttaaaaaaattacttacttttcccagggtcatactctcagctaggctggagtgcagtggcacaatcaccgctcaccgcagcctccacctcccacactcaagtgatcctcccgcctcagcctcccgaggagctgggattacaggtgcgtgtcaccacacctggctaattttgtatttgttttgttttgtgtttctttgagatggagtttcgctctgtcgcccaggctggagtgcagtggtgtgatctcggctcactgcaagctccacctcctgagttcaagcgattctcctgcctcagcctcctgactggctgggattacaggtgcgtgtcacccggctaattttttagtagaggcagtttcaccatgttggtcaggctggtcccgaactcctgaccttgtgatccactccccccttggctgcccaaagtgctgggatcacaagcgtgagttaccgtgccctgtctgtatttatagtagagacagagtttcaccatgttggccaggctggtctcgaactactgacctcaagtgatccgcccacctcggcctcccaaagtgctgggattacaggcctgagccaccacgcccggcccgtcgactaattttttttttttgaaacagtctcgctctgtcacccaggctggagtgcagttgcactgtgtccagaattggtgggttcttggtctcactgacttcaagaatgaagccacggaccctcgcggtgagtgttacagctcttaagtcggcgcgtcttcagttcgttccttctgatgttcggatatgttcggagtttcttccttctggtgggttcgtggtctcgctggctcaggagtgaagctgcagaccttggcggcgagtgttacagctcttaaggcagcgcgtctggattttttgttcctcccggtgggctcgtggtctcgctggtttcaggagtgaagctgcagaccttggcggtgagtgttacagctcataaaagcagtgtgaacccaaaaagtgagcagtagcaagatttattgcaaagagcgaaagaacaaagcctccactgtgtggaaggggacctgaccgggttgccactgctagcaccggcagcctgcttttattctcttatctggccccacccacatcctgctgatgggtagagcctagtggtctgttttgacagggcgctgattggtgcatttacaatccctgagctagacacaaaggttctccacgtccccaccagattagttagatacagagtatccacacaaaggttctccaaggccccaccagagtagctagatacagagtccactggcacattcacaaaccctgagctagacacagggcgctgattggtgtatttacaaaccttgagctagatacagagtgccgattggtgtatttacaatccctgagctagacataaatgttctccaaggtctcaccagagtagctagatacagagtgtccactggcgcattcacaaaccctgagctagacacagggtgctgattggtgtatttacaaaccttgagctagatacagagtgccgattggtgtatttacaatccctgagctagacataaaggttctccaaggccccaccagagtagctagatacagagtgtctgtctattggtgcattcacagactctgagctagacacagggtgctgattggtgtatttacaatccctgagctagacataaaggttctccacgtctccaccactcaggagcccagctggcttcacccagtggatcccgcactggggctgcaagtggagctgcctgccagtcctgcgctgtgcacccgcactcctcagcccttgggtggtcatgggactaggcacggtggagcagggggcagcgctcatcggggaggcttgggccgcacaggagcccacggagggggtgggaggctcaggcatggtgggctgcaggtccccagctctgccccgccggaaggcagctaaggcctggcgagtaatcgagtgcagcgccagtgggctggcactgctgggggacccactacaccctccgcagccgctggcccgggtgctaagcccctcattgctccgggccggcagggccggccggctgctccaagtgcggggcccaccaagcccacgcccactcggaactccagctggcccgcaagagccgcgcgcagccccggttcccgctcatgcctctccctccacacctccctgcaagctgagggagccggctcccgccttggccagcccagaaaggggctcccacagtgcagcggtgggctgaagggctcctcaagtgccaccaaagtgggagcccaggcagaggaggcgtgaagaccgagagagggctgtgaggactgccagcacgctgtcacctctcagcaccatctcagctcactgcaacctccgcctcctgggttcaagcgattctcctgcctcagcctcccaagtagctaggactacaggcgcctgccaccacaccggccaatttttgtatttttagtagagacggggtttcaccatgttggccaggctggtctcgaactcctgacctcccgtgatccacctgcctcagcctcccaaagtgctgggattacaggcgtgagccactgcgcccggcccatccagctaatttttaatttttttgagagatggggtcttgctattttgcccaggctagtctcgaacacccggtgtcaagagatcttgctgcctccgcctcccagagtgctgggatgacaggcgtgagtcaccacgcccagcctagacacagttctgaagggacaaagggggcctccgctccctcctttcaatcttcagctaggccaggctcccacttgggtcctccagccctcagtttccccctgcacccagccaggccaagctgcagaggcgcccggcccagagctgggaaggggcgtggcgggacccgcgcttgcagccgcgggacggaagggggcgcgaacctccccgcggcggggcctgggggggcggggccgggaggggcggggccgcgccccgtgctggccaatcagcgcccgccccggcaccgggacccgcctccgcgccgcagctcccggggggtccggcccggccgagcctcggtgtccggccccgcgggggaggggcgcggcctgcggagcgggatcggggccgggtctggggcccctcccggcggccttcgagccctgccgcccggctccgcgccgcccggagcccctcggcagtcccgtcacgtctcctccagattaggcattaactcgggtgcagccgcacttccggggggccgcggcgggggaggggcgcctgcgggatccagacccgccccccactctcctctccccgccccctcccgggccgcccctttcccgccccacggccgcgccgggcgctgcgtcccggggctttgttcgcggcggcgcgggtcgccggcctccgggcgggccgggggagggaggagggagggggcgggagggggaaggaaggaggagggggaggaggagggcgcggggagggggtaggggggcggggaggagagagggggaggggcgccgccctggccccgcccccccccgcccgcccgcccgcgctccgccgcctccggagctgcgtcccgtcctgtccagtcccgtccccggcgcggcccgcgcgctcctccgccgcctctcgcctgcgccatggccggccggtcccacccgggcccgctgcggccgctgctgccgctccttgtggtggccgcgtgcgtcctgcccggagccggcgggacatgcccggagcgcgcgctggagcggcgcgaggaggaggcgaacgtggtgctcaccgggacggtggaggagatcctcaacgtggacccggtgcagcacacgtactcctgcaaggtgcgcccacccggaccccggcctcccctcgcgacgcctgccgccccgccgggacccccgccccaggccgtgggaaccagccccggtcgctccgcagcccccgctccggctcccttggcgaccgccaagccccgggagggggggtcgccgggtcccgggaaactcgcgggcgccggggaaagttgctgcgccgccgccgtcctccgcccgccgccgcctccctcctcgcggagacaagtgcacctcgcccacggactgcggctgccgcgcgccctccctaccggccgagaaggagaggggcctggggagggggggcctttgcccgggcggggagcgggggctgggcctgggatccgcttgttcccctccccagaggcctttcccggggcgagaggggttggtcaggagagaaaaaggggcgcacagcctgagctcccaaccccgggagccaggtggggggtgccgcagtggtgcggggggggggcgtgcaggagcagagaggtgggcggggccgtcaccgggcctcgtgtgcttgggggcagggccggtgccccatcgcgctcctgcgggaaccggggctccccaccccggggaggggaagtttccctggtttctccttcaggtgcttctgggagcccccggggtaggtacgctgggacccccaccatcttctcctagtaggggctcgggggacccagagccggcgcccgtgtacccccaaaaccatctcctgggaccagaaatccactcatttccctccacggaggtggagaaggtggcagcttctttcagactggccggtgcgggctacagctgggctcccccgccggcccagtctcctccacagcggccagggcactttgccaggcccctgcaggattttcccgacttcctccccgctgctcctgggtgtggctggggtgggggaaggcgatgaaagccaccaggccctccccctgcctgggtcatctgcctcctggagcctactgttggggggcgtggaagaggctctgcctgcgcaactggagggggtccctgcggatgccgcagtcctgaggctcccagcaggggctgcgcagtggacaggccaaccattgtctctccccccatccggcagccccagccccccagatctgaggaaggggctgcttctcccggctttgttctcaggggagtgcgtgagtgcgtgggtccctgtccccgtgagggccgccaggtcggctgtagcctttaccacaggccaccgtcagagcagctgccctcagggccccaggagctgagaaggtggagggtggggcaccctgcactgcccaaacttgatttcgtggttcacaggctgccctgagtgcacagactgtagaagcccgaggaaggggcgtctcagcccagccacagggccaagctggccccttaccccaacgccccatccccctcctccactgcccaagcttgctgggaggtgggccctgagcactgggcaggtggggagaagtgtggaaggcaggcaccccaagccaggtgggcccccttcccaaattcggccttagctgatagggacgttattggagctggggtggctgaagttggttagacctgggggaggggatgtgttcacaggtgacgcatctctgagcgttcccgcatgggctgtggtggccagtgtgggcttcccccagcttccgcccagcgggctgactcagaggtctccccacatctctgcccagggcttgagtctactgtggacatttgccctaaacacctaaagcccccagtctagccccttccccaggagaggactaatgacacctaccgccatgtccaccccaggttcgggtctggcggtacttgaagggcaaagacctggtggcccgggagagcctgctggacggcggcaacaaggtggtgatcagcggctttggagaccccctcatctgtgacaaccaggtgtccactggggacaccaggatcttctttgtgaaccctgcacccccatac

SEQ ID NO: 4664 - DNA, 6000 bp, Homo sapiens
taacttgcctgaagtcacacaattagtaaaaatatttcctgggctgggagcggtggctcacgcctgcaatcccagcactttgggaggctgaggtgggtggatcacctgatcacctgaaatcaggagttcaagaccagcctggccaacatggtgaaacctcatctctactaaaaatccaaaaattagccaggcatggtggcgggtatctgtaattccagctactcgggaggctgagacaggagaatcacttgaacccgggaatcagaggttgcagtgagccaagatcatgccactgcactccagcctgggtgacagagtgagacttcatctcaaaaaaaaaaaaaaaaaaaaaaaaaaaaaaaaaaagaagaagaatatttcctatggtgcctctggcagagtaagtcgtaagtctctcaaaagtaaaattttttttttcttttcttttctcttcttttttaatagagacagggtctccctatgttggccaggttgctcttgaacccttggcctcaagcaatcctcccgcctcggcctcccaaagtgccaggattacaggtgtgagccattcccagccaaaagtaaattttttttttttgagacggagtctcgctctgttgcccaggctggagtgcagtgccgcaatctcggctcactgcaagctccacctcccaggttcacgccattctcctgcctcagcctcctgagtagctgggactacaggcgcccgccaccacgcccagctaattttttgtatttttagtagaaacagggtttcactgtgttagccagggtggtctcgatctcctgacttcatgatctgcccgcctcaacctcccaaagtgccgggattacgggcgtgagccactgcgtccggccaaaagtaaattttttaacagtgattttgtaacaatctttttgttcagcctagtttctcatttcaacccatcatatagtagattttttgattctcaggtaatagtagggaatcagtgggtttaactgtgtcttataggtgttagcagaaaaacctctctgtacaatgacaagtggccactgagaacactttctcatttctcatgaactgcccaatattcttagctgtggatggggcaatgttttccaggtcttcaagtcattttacaacgaaacctactttgagcgacacgcaacattcatggacgggaagctcatgctgcttctatggtcttgcaccgtctccatgtttcctctgggcggcctgttggggtcattgctcgtgggcctgctggttgatagctgcggcaggtaaacagaaggtgcactgctcccacttaaaattcatgctagtaagccacactgtctctgggcatttgtgcacctggtggggagacgtgtgaccctgaaaatcaggagatctgaagtctagtctccgcttggccacagtcatcatgaccttaaaccagtccctaaatgtctctgggatttctttcctaggtagttgcatgggaaaagcattcccttccgtcacctgccacagaggtggtgcagcctttgagatcaaggttcttgacggtgcttagcttagtgccttgtaagcacttccagtgggtgttcagtaaatgctcgtttatcaggtttcattccggggtcaggtgaccatggctccaagttctaagcgctgcagcctctccccgcgtgtctttgccagagtttgttactgaggctggggtcaggctgagtcacgctgccggccactgtctcatagatacgagattatttggaaatgaagactgggcaggtctttgaactttgcttggcttacacagattcactaatcattcttcctaagcccaggtgctccaaagacgtgactccacagataaggaaagatgcacaggccaaggttcccaggagggcaaagcgtgagcctgggctcaggatgaggcctggtggcattcccttaggtcagcccactcattcggactcacagttacacttgggcatggtgtgccaggttagacagcttgcaggagtgactggaaggccctctagtgaaaagtcactcaaaaaaccagagcaattccattttcaggcatagaaaaaaatagcgctgattgaaaattaattatctattaattaatgcaagattcataggacctcttcttgcatatacttgatcgacaattaatttgccatacattatgcgctggaaagaagaaacaattcactctaatgtaactataccataattcaagcttttttttttggtcatccagactgtgatgttctcagccagaccaagagtgtttggactgttctggaagcccagtcttggcctccacttccttgtctgaacccattttccagatgaagagcctgagtccaggaatgtggtggtgccagccttgcccagtggggtcctgacagccccagcctccccttatagtcatcaggaagggctgggagtccagagaagggtgggaacgtgtcggggctgcttagtctttttgggcctcctggctggctgaccctccccgtgatgggggatgtgctctggtggctgctcctgaaggctgtggcagccccagggagagaaaagtggcctgagaacaccagcctgcttgtctgtggactccctggccagtcctcagtgttgccgacctgggatatcttcatagagtcctcaccacccactccctgctcttggcaccagaacctcgccttcctggcttcctcactgagtgcactcactcagggtcccagcggtcctcaaagatgtgtgcaaagtgtgagacaatcacaaaggtagtcctggggctgctgacagcttcatcacccccagacctgtaggggtgtgaggagggagcacctccacctggaggtggagagagaagaaataaaaaatgaataccaggctgggcacgggggctcgcgccagtaatcccagcactttgggaggctgaggtgagccaatcacttcaggctaagagttcgagaccagccaggccaacatggtgaaactccatctctactaaaaatacaaaaattagctgggcatggtggcgcatgcctgtaatcccagctacttgggaagctgaggcaagagaattgcttgaacccgggaggcggagtgtattagtccattttcacgctgctgataaagacatacccgagactaggcaatttacaaaagaaagaggtttaatggactcacagttccacgtggctgggaaagcctcacaatcatggcggaaggcaaaggaggggcaagttacatcttccatgaatggcagcaggcaaagagagagcttgtgcagaaatactcttccttataaaaccatcagacctggtgagacttattcactatcacgagaacagcactgggaagacctgccaccaggtccctcccacacatgtgggaatttaagatgagatttgggtgaggacacagccaaaccatatcacggaggtttcagtgagccaagatcccaccattgcactctagcctgggcgacagagcaagactccatctcaaaaaaaaaaaaaagagagaatatcaggatgcaccagccagcaaccccacagctcgggagctctctgccctctttctggtccactgcccattcttctcctgtgcaaaacccaagccaaaggcgggggggtgggggggggcacaggagccattgctgcaagttggcaggggacctagagcacagagtcaagcagatgagtggatcatgaaggcagcaggacgcacctggcatagcgctgtttttcaggcactccctctccttctcaggcttgtggtttttcagccttggaagggatcttagaaatcatgtagtcccattctgcaccccactgattgtaagaattccctgttcaacgttcctgacagtcatcgtgtctagtctagaaaccaccagcgacagcttgaataccaccagtgatgggaagctctctacctcctgggacagcccattctttgttcctgccctcccctttgcaggcagctccgatcgttagaatgctcccctccccagcttctacccccactgaccccaagtcttccttcctgggacgtctgcccattcgccccttcttcccatctgtcttaatcagttcaggctgctacaaccacagacttaaacaacagacatttatcttctcacagttctgcaggatagaaattcaagatcaaggtaccagcagatctgtttcctggtgagggccttctttctggcttgcagacagctttcttctggctgtgtcttttttctttttctttttcttttttttgagttggagtcttgctctgtggctctggatggagtgcagtggcacgatctcggctcactgcaacctctgcctcccggattcaagtgattctcctgcctcagcctcccgagtagctgagattacaggcatgtgccaccacgcctggctgacttttgtttctttagtagagatgggatttcaccatgttagccaggctggtctcgaactccagacctcaagtgatccgcccacctcagcctcccaaagtgctgggtttataggcttgatccaccatgcccagcctggctgtgtcttcacggggcagaaaaagagagtggtttcttgtatgtctcttcctatcccatcgtgagggccccacatgacctattcacctcccagaggtccctcctgctgatcccatcacactggggttaaggccttcaacataggaatttgggggacaccattcagtccacggccccctgcttcagctctttctcgggcacattccccgcgcctctgtagtgactgcccgcagaataggagctggtgttgggagggcttccgcggcctccacgcacccctgccctctgggctcactgtctttgcagaaaggggaccctgctgatcaacaacatctttgccatcatccccgccatcctgatgggagtcagcaaagtggccaaggcttttgagctgatcgtcttttcccgagtggtgctgggagtctgtgcaggtacctggggcccaggctccggctcagccttgggggaagggtctgtttggccaaggctggaagcaggagcagatgaggtgtctgcctggctctgcctcttttcatttcaagacgtcctcccatctgcatccccaggcccttgcaagcctcatgcttgtttttcttaattaattaattagttaatctttttttagagacagagcctcactgtgttgcccaggctgatctcaaactcctgggctcaagtgatcctcctgtctcggcctcccaaagtcctgggattacaggtatgagccactgtacctggccaagcctcacgcttactagccccttccctttatttatggatctttagaaacactttcaccttgaagtacaaataaccaataaggttttacaaggtatcgtcccaggaagatggacaatttaaactcagtagtttcttaactacagtaatttcttctatgaataaaagttagacaagcaatctgtgctttagaaaaatcagaaaatagaccaaagcaaaagttttatcgttaagtcccagggacacacggaggcctaggctcctcccctgtaacaagcggcccagcccggtggctagaaaggaaaaggtctcctcatcacatcctggtgactcccccgtgggggctgaggattctggagggattttggtgtaagtccaaactaaacagtcgaggttggccgagctccatctccacggaggggctgacagcatggagaagccccgggattaggaaacggaattgaattgcatctcagattctgcgtttgcggtttgcctgccctgatttctgctgtgcccaaaccaggcatctcctacagcgcccttcccatgtacctgggagaactggcccccaagaacctgagaggcatggtgggaacaatgaccgaggttttcgtcatcgttggagtcttcctagcacagatcttcagcctccaggccatcttgggcaacccggcaggtaaccggcagccgcaga

SEQ ID NO: 4665 - DNA, 6000 bp, Homo sapiens; identical to SEQ ID NO: 2673

SEQ ID NO: 4666 - DNA, 6000 bp, Homo sapiens
gaactttttgtagcaaatttggtagaacagggagtagaaaaaaaaggtatgcaattagacgaaaatctctgaacaacttccttaggatagatctatacagatttctcatagaatccatatcccaaaaagcaatattagtattcatcagagacgaggaagccattaattactataaaagaaacacaaaactagcacctaaagtgacagaattctctcactttatgaaaataatgaggaaatattgtcagttgaagtggaatctctctatcacttgcacagtccaacgtttcttttcttttctttttacatgctggtaggagtatatattcgtatagcattttggaaaggcaatgtgacattaaaacacacaatttatatgacttttcagcaatttctttccagaatcaaccccaaagaaactgaaatagtcaaatgaaataaccatccataacagagaatagttggtgtggtgtgtatgtgtgtgtgtgtgtaggtatgtgtgtgtgtgtgtgcgtgtgtgtatatatatatgatggaatactacacagccactaaaaaggaatgaattggctgcgcatggtggctcacacctgcaatcccagcaccccaggaggccgaggcgggcagaccacctgaagtcaggagcttgagacaaggccagccaacacggtaaaaccccatctccaccaaaaacacaaaaatcagccaggtgcaatcatgcccgcaatcccagtccaacatttctattacatttggaatgcctcttgtaatccctatagtgtacatttcattacagttattttataacacttcaagttgaaggcaatgatgggaagtcttaaccaagttcataattactagttatccagcatattttaggtatttaaaactttttgtagaatgcataaatgagtggtaggttttgcaggtactgagaaaaaatacactgaatgaagatgcaatgtgttcttcaagaaaagtataagaaaaatggaagtctgcataacccaataatgggaacagacaatggtaggatctatctagaaaataagctgcataacctcagaatagctagaaatattttctttcatctctaagcagctactatatttaactaaaatattttcactgttattatttttgtaccacactaattgctaaatacatccctgttcttagacagaagaagtgccttgcttttcaaaatgacagtttgagatatagcagaatcctcatttaagtttctcacggcaaatggagttctttgttgtccttcagctgaaagaatcaatgtaattttaaaaaatgatttgttgcccactatgtgcaaagcactgttccagggacaaccacaagcaaagcacaatatttatcctcaaagaactcgtagtttgtgagtaaaaaggcacaagtgatgcttgagaaatgccctatgacagatatacataaaaggttttgagatgtataagataaggaatccatcaggtctgagaggatccagagagtttcatcctttaaagtaggcattggaaatggattttgaatgatttattttctaggcaagcaagaatcagacaggtgttccagagataaggaagtgtctgaataaaggcatagacacaagtttctgatattaaagagaataaatagtatagtgaatggctggaggaaaagagggagaaaatcagaggatgagaggcaaaaataaggagatttatttcttcatttaaaatggaaatgaaagaaaataaatgttcaatatttgatgtatatttattttatgtataagaaaatttaaaatgttcaatatttaatgtatatttcttttatgcattactgctcagctaaaatgagtaagtgaagtgaagaagaataccatgctcagtagacacacccagaccaagtcttagggttttgtttaaaggttgaagtttgtagttttgagatacccagaagttccaggcctccagaaaaccagtatttaatctacttttccctactattcagactcaaatgctaaaccaacgtgagcaaaagaaggaaggatcatatgatgagctgaaatatacaggaacaatgacagaatagataataagaggaagtctgagcagaaatgaaacttagaaaccagaaaagtatacactgaacacatgctaaatttataattacagctattcaaaacactcgaggataagttgtcaagttaaggacacacaaaaataagaggtatatttcactgtgatcttttaacattcaacattcaaaatttttccaaatggcacagattttgtttctcaaggttttatcattgttagtaacatttttacattttcactgataaaaatgaaatatgaaataatttaggaaagagaatcaaagagcagtgacctaaatatacactatactgattcttacacttcctttttataaagctactgtgactaacatccatttctctatcttatctgataaaacaaatcctttgtacattgtgagatttttataaaaatatataacttaattctcagtttatcactgaaacttaaataataataaaataacaccaataatatacaataagtaataatactgataaattgtgtttcttatatactaacacatagaaaccatcaacattgccatttaattaacttagaaataaaaagtgacgtataagtgctcaaattagaaggaaatcttattttttttttacttctaggtatataaatatacaaaataaagtagaatataataaatagtaaggccagaacaagtagtaccaaataaatggtataggaaaaacgctaggtgtttaaaatgttaattccaatcaaggagacttagattaagtcaaatttcactttgttttgatatttttcctattaattattcaagcacacagcatttaaattgattcatatatttaataattttacacagagtgaaatgtcaattggtattctttgttttcttccatattttttattaggaaaagaagagaaacctggaagaaaattttcctggaaagaaagagagcattgttcagcagcaagaacactgaccatgagaacaattcttctactcagaagccacctgaccttgggcctgtcactcaggttttctgagccacagttccctgaccactcgtcttgcttattttataggggctttagtttctttactgataaaattgctgtgctttgtaataataacacctatgtaagaatcaaattagttaaatatggaaatatgcataattgtaaagtatcatacccagtttctggaacctagctgatattttattagtgaatagaaggagaaaagcttgtcccattgatgctcagtaatacaaaacatttaaagaataaattcaaaatcttggctataatagaattttttaaagtgttattatccttcaatgtttgagtttgtaagtgaaaagtcacattaggaatcagctttgattaaaacaaaggaataactcttatagcaagtaaaccatttgtatgataataatccattggatatataataaagttcaaattctccagccaggcttttacctctatctactgctacactatctacctctcctcaactttactttctcatttgttttgcaatttagattgtaaaagtgtgttcagtatggttttatctctgcagaggctgtggcagttcaaacccacataagtttgggactgtgattacttcttttttttttttttccatccagagtccagattgagatgagaagcttcttctttgtcatctttctctgcttctgggtagatttttctatccctccttttcactgagagagtaattttttgagggtcaggagaggatgaaattcattctaagtctccattttgggttattcccaaaggctttttcctctctaggacttcttcctgttaagccaccttgtatctttttgtctggagggatcatacaagagttgtgcttgttcgaaaatcggtttatcccagttacaccaggtatttaattacgcaatacaaattaagtactttataagctgattaaatgtgacttcaaaaaaaaaaaaaaaagtaaaagtgatcctgtggaaaagtttttccttttgaaaatatttgctgaaaatgcacacataatgtaggcatgcagatatggatgagacaacttgaaaagattaggagaaaataatcattaaagccttaaaagatttagtgcccagattgttttacaattgtctttaaatccagacaccttattaaagaaaatgaacctggcacttacatatgaggcaatagaggtatagtttatgaaagcaataatacgtgaaaccccaatctgcaaatcgtatcggggggaaagccttattctaagtcaacagattagcttttcacttcaaataaaaattttagatacatataaatgatactttgtggttcttctctgtgaccaatattctgatttgtccaattgctactggatcgaatcaaatcaagtatgatggattttattgtattatcttaggacaatactcaccacaaacactgaataatataaaatgcatgtttaaattattttaacttaatcccaaaacctacagttatagtctatttctatcatgattactactactaaaattactaattgtttagtcaccatagtaagatcttcctggaacttcaacctacagcattacttaagagcagcacaatgcccaaaagaaatctttttattccagtcacctgagaccttgggggaaaaaaatccttagtccaccatctatgcacaaagctagggaatctctttcctaacaaaagattaacacgttttctccaagcagataactgaatcactagaaacaaataaagaaaaagacctgaaacaaagtactgcaggtacaaagagcaaagatcttgttacttaaaagaaaaactcagtaaacatgtcaatgtttcttggaagattagggaaaccaacattcttaaaaggtctcttattcattatttataagtagatgcaacacctcatttatacctccttatctcatacagaagagctaagattggcagaaatggtaagttctcaatttatgcacattggtttaacttgtttttctagattccaccttgggctttccttgggacccagctatccagcccaataaagccagtttgaaacagctgcatttggaacttgctgttgacacaataatctgagttatatgttaatttctaaaagaataaatgaacccattacttcccagatttcacagaagccacttgcttggagcagactaccatgacaagccagtctcaggggatccaccagcttcttcaggcagaaaaacgggccaaggacaagctagaggaagccaagaagagtaagtctcacctgtgaggggtctgtcacgaaataaacaaagcagtggaatgcagggataagcatagacttttggattaggcagaccttgtttcaaactttggtttactgtactccctgtgagaccttcacccattcattaaaattacccagccatatgttccttatttctagagcagggatgaagtttcctcattcagatccttttgagaggtcatgtgttcatggacattaagattatagagatgtgggcttaagccttggctatgccatgcctgttttctcaacattgttagggggtagaaaacctctggattgaatctacttattagtgagtaaacctgagcaaattacttattttttataagcatcagttttcatttccataaaatcagaataataatggctcattctcatccctctcttggtagctttttaacatctaatattttaaaatattttcattttattctcattttctacctctctttttatttttattaatttattttttaagagatgagggtctcactatgttgccctggctgaactccaactcctggactcaagagatcctgctgcctcagcctgccaagtagctgggactacaggcacttgccactg

SEQ ID NO: 4667 - DNA, 6000 bp, Homo sapiens
tccatttgatagacatggcccaaggtcatgtgcctaatgaattgctgagccattcatggattcaaatccatgtgattacaatgctgtggcatattccactctgcagcactgcctctcaaagattacttttctatccccagttatagttcaccagaccattttgtttgctgtcaaggcttcccagctatactcagtaaattcagagctgcagctccaaatacctggaaccatcctgcctaagggaatcccagggtgggtatccagggggctttggggaaagggagctcagttatagagaagcaaagggaatgatgacagtgctgagcacagatggccacacttccctatcccacccccatcactacatcctcctaaaactgaatgaagccggaaggggatgtcacctcagctctgggcagcaggaaagaagttgacctctgggagggagggagcagcggaggggtcacagcaaggggaaaaatgggagggggcaccctcccccacagaacaaaagatagaaaagtttccagccacgtcaggctagtcttacaactagccatgctggttagggggtccaggatctatggggctctggaattttatgatgtctcaagatgagtattcaggtagtctatggagaagccattggtagacagtacttggcccagaaggaaggccatggggctaagagaacctcaggatagaggctaaattaaccacatattaggacaagtgccaagcaagactgaagaatgctgccccacagaggaccttcccacacaggctcctccacaggcccctgcctgtggagtgatcaacaattccttttgccacaacactctttcccaccccacacccaacatatgctcatattctaaatgaaaacactgtgcttgctatacaaatgatgtttcatgacaagtcacccagcctctctccaactagatggcgtccccaagctcagtttatataaaaatttggggtgctactactagcttctagttaaatgccacattatgttctgaaagacatgaggaggggatgctgtgagtttgttagggtggtgcaaggggaaatttctgtctcccagagtaacaggaatcagtgagactcttgaccagagctggtcaaggatgctggagagaaacacagcaagagaaaaacgctgtagaatgcaacaggcctatgaaaacagtgcatggagaagaggctgattcggtggtcttccatattcaggatggacattacaggccatgaggaagttaaagctgattttaaaaaaagagttgcccaatgcaggttaggaataagaccctccaaccaaagtttcagggaacctcctttggagaaagaaatgtgtttctaggtgtggaagagctctcttggctaacaagctcaaagactgggcatgtcttgaggcaagagagagtccacatgacctttggaggttcttgtcatacaaaggtccacagtgatgctcagagaccctcactatctttttgatacccccaactgcgtctctccttctgaagtatctggctggcctgctacttgctggtagttcctgtcttttcatctgtgacctccgctccctacatctgtgctcatcatttcacagactgtagctatttctgctctttcagtagagaagggccaggatgtcttcctcttcctaaggtcacagctggctaagccagaggaaatctgcttcccccaggtcctcttggtgtttgactctagggatcagcacaatacagagcaaagtacctacatcagctttatccacctcatccatcattcattcaacatatttattaagtacctactatgtgccaggagctgggtttacactagtgatcaaaatagatatagagattatattcttgttccagtggccctgacacttcagaagacaccaaaaccaagggcttttgtatttatttactcatagaaatatttgcaatacctataaccaacaaaggactcgtatctgatattcataaagaactcctacaaagtggtaagacagggctgggctcagtggttcacacctataatcccagcactttgggaggccaaggcgggcggatcacttgaggtcaggagttagagaccagcctggccaacatggtgaaacgctgtctctatcaaaaatacaaaaattagcctgtcatggtggcatgtgcctgtagtcccagctactcaggagactgaggcaggagaatcacttgaacccaagaggttccagcctaggcaacagagcaagataccatctcaaaaaaaaaaaaaaaaagtagtaagacagaaggaatagaataatagaaaatggacatgatacttgaacagatatccaagggtcaaataaatgcatggaaaggtggtcaacttcattggttatcaggataaagcaaatttaaactacaataccactatacacccaccagaatggctaaattttttaatttttctagattgacaatatcaagtgttaatgagaatatagagcaactggaacactaagacgctgctggcaggagtgtaaattaatatgagcactttgaaaaattgtttagtcgcatttgctaaagctaaaaatatgcatatccttttatgacccagtaattctattcctaggtatatatctagtataaatatgaacgtaagtgtaccaaaggacatgaacaaaaacgttatcgcagccttattcataataaccccaaagtaggaacaaccaaaatgtccgtcaacagaataacagataaattgtggtatatttatttaatggcataccgtacggcaatgaaaacaaataagctactgctaccacaatgttttggatgagtttcataaacatagtattgagtgagagaagccagacacaaaataatacctactgaatggttccatgtatataaagttcagaagtaagcaaaactaacctgtagtgttagataaacgttacttttgagaaggagtgtggcatagtcaccaggagcggatagaaggagggtatctgggatgccaataatgatctcgttctagatctggatggtggtcatatgggggtgttcactgtgtcatcatttgttgacctgtacacttaggtttcgtgttcctttcctaaatgcctggtatatttcaattaaaaaaatacacacaggagaggggaacagttttcgagtaagtaaaaacacggaaggtagaaaggaaataggagagagatcaagattttatacacaggtagctgagctgtggccagattaaatggggtagtggaggggagggaactgttgaatagaacagggcagaagttgcctccagcccaaccaaagttcctccagatacatcagccttaattccccacccaaccccacaccccgtattcacaaacctcatctttctggacaagtcccagcatttcctagactagcagctacttctcctggcagaaaaacccagtatttgaggccaaaactggggtctgagacactgatattttgctctagtaggtcctgtgagtctgcaggcccttgatgcaaatgctccagagctgatctggaatcatcctgggggtactggtttggggtgggtgaggggaacagggtttggtatgtgtatttgtcatccttatcaaaaggaatgacctgctcaggttgctgtgtgtgctcttgtgagcacgtgcccaaagcttcatacacagcactgcgatctcttctccccaggcacatctccgctccaaaccctattcaggggtctagagccatgttcgaatgcccccgggctactttcagggaggaaaaggacaggaaggaaccgttggtcacaggttccactgacaagaggggaaaacttgggagtgggggttcctttatgagggaggtcacaccccctgcacaaaaacatcccaaagagaactggcattgagcttgtgttggagaggtggagataccccagggaggaagtggcgaaaggtgagcatgggaacacccctctttgatcccacaaggtgcgtcagggaaagttggatttcatttagtccgggatggtgacatctctccgcacgctgccaccaggctcagtgggtcagaggaagtgaggctcccctcctctccgacctcaggtgatgcgtgtgcgaccccagccatgggtctgacctcctttcgctcccgcccgccagtctccacccctttcaaggccgggacttttttaaggccggattcgtcaggggtgagccatttgctcaaggaacgcggaatctggagggagcctaaagtgacgagccggcgggagaagagcaaggtagggactgttctgtccgggtaccaagtgggaggagggagcacgcggctggctgcttgagcccgggggtcagaggtggctggctggctggctccacagggacgtttaccggtcttcccgaaggccagaggctccaaggaaacatccagaggcaggagaggacgcgcactgtcgcacacgcctctcaaagtctgctggggctccgacgcggcgcagcgggcccgggggcggtagcaccacgcagcgagcccgggcagcgggcccctcggaccccgggccgatgggcgctgggacccgcgcgctccaggcgcatggagccggctcccggttcccgtcactcctcctactgcgtttccccggcgccccgcctcctgggcacgaagcgaaggaagggggccgggccgaggttgatcccgccccctccccagtccctgattggctgctgctgttgtccatccgagaatctatttttgatggagcggggggggtgccacccagtctgccccagatcacgtttgccaccggcagccaaccagttgggcccgagtccgcgggcaagaagcgattgggggcgcgtgagctcggctccccggtcccccgtccgggtgcccccccgccgggcccgaagcgatatatcctgccctccccggccacctcccccgcgtggaagcggagcggcggcctcgctgtaacgcagaagcgaaatgtagcgagccgggtgtcgcggctggacgctcgccttggctgggggtgtgggggggcacgccgggggccaaggaggactgtcgaggaggagtgatgagaagagggggtgccctgcaccccccgagaccacgggccacgctgccacttgccaggcgccccccttcctcccaggcgaggggcaggtcagtcctgtggggtcctggggcggggagggggtggtggagggcggcagtcctggcgcgcagcgcatttgctgaatctgagtggtggagagactgaggaggccacccagttactttctctccctcctcggggttggggatactaaaatgggtcttttttgtccccgcctgggaggaggggatagggcgtcctggttcacttttgcttctttcgtcccagggccttaggcctgtctgaagtctctttacagggggagtggtgagggaggactggcttcccctcctgggagccccctctcaggttcagtggcctgccaggaacacaggagggaggcgggggtgtcagcttttagcggactcagaaacttttctggcataggggcactggactcagaggtttcctcctggatctctggtgagggagtttgaaagaaccacagtactgtgtttaaggagattggaaaagggagtcctggtgggtgactgaattgatagaggaaacagttctcctgggccagttcctggggtttgatacctcctttcctaaactgaacttgactaattgtgtgtgtttggaatacttaaggacctgttcctcttacctggtggaactctctttaaatttattttttacgaataagagctcttctggtgaaatggaataggatgggagtccatcaggaattaggaagcctggggattcctttaggcagagaagtggagccattacagctaaagagatgcatttggagcaagtgcatattggcttacggtgctttggtttttgttttgggttttttttattgctactttt

SEQ ID NO: 4668 - DNA, 6000 bp, Homo sapiens
acttttatgacaaccctaggaggaaagtgctatcactccaatggatgaagaactggagctcagagagttatagtgacttgcccgtagtaacacagctaggaagtggtagagctggacataaaacctctgaaaggccgggcacagtggctcaagcctgtaatcccagcactttgggaggccgaggtgggcagatcactgaaagccaggagttcgagaccagcctggccaagatggcaaaaccccatctctactaaaaatataaaaattagccaggtgtggtggcgcatgtcggtagtcccagctacttggaaggctgagccacgagaatcgcttgaacctggaggcaggggttgcagtgagctgagatcgcgccattacactccagcctgggtgacagagcaagatgctgtctcaaaaaaaataaaataaggccgggcgccatggctcacacctgtaatcccaacactttgggaggccgaggcaggtggatcacctgaggtcaggagtttgagaccagtctgacgaacatggagaaaccctgtctactaaaaatacaaaattagccagccatggcgggtggcgcatgcctataatcccagctactcgggaggctgaggcaggagaattgcttgaacccaggaggcagaggttgcagtgagccaagatcccaccactgcaatcttgcagtgccaagactgagccaagatccagcctgggcaacaagagcagaactctgtctcaaaaataaaaataaaaaacctctgaaagatgacactactatcctggcagaatgtgatttcttgattatctcagcatgcagtcactgggaccctccttgctgggtattatggtagatggtgaggatgccaagacactggaacaagcaagtaatactacactgggatgagcccaacagttacaaggtacaacagagcagaggggagagaatgcttaatgttctctgggctttttggaggaggggatagtctgaattgtattagccacttcctaggtgaacaagagaggaaaagggtgtttcagttagagaagcaggcaaatgtaatagtgcacatgcagtagcacatagatttggaacatcctggtgtgtttcggggaaggtaaacagaatgtggatcttagagcaggaatgatttaaaaaaaaagtggaatgggaaaagtcaacagaggctggatcagggaggaccaatagtcctaggctagcaaaggtgtatgagcagggtcatgtgctagagtagaaacagctgcttgtaggtcactgcctcctatgggcataggatggagggttcaggctgaaaggagaggaaacatggacactcagccattctcatctattcagcccacgttccctgagcccttcttcgccataaggtatgcagacgagctcacaatgctatatgggagacacacacctcaacaaatatttttggtgcctctactgaggcagacaccgtgctgaacactgggatggttacaaagataaggaagatactgttccttccatagacaaggagagagagacacacattgtgagcaaatttgggtgtgaaatgctaaggaaaattagtgtccatttcttcctgtagtagcagagaggacaggtgccctatctggaaagacaggcttccccaaagagctgatagctgagttcagtcttgaaagcgagtagttctcagagtcaggcgcggtggctaacgcctgtaatcccagcactttgggaggctggggcgggtggatcacctgaggtcaggagttcaacaccagcctggccaacatggcaaaatcccgtctctactaaaaatacaaaaattaggctgggtgccatggctcatgcttgtaatcccagcactttgggaggccgaggcgggtggatcacgaggtcaggagttcgagaccagcttggccaacacagtgaaaccctgtctgtactaaaaatacaaaaattagctgggtgtggtggcaggcacctgtaatcccagctactcgggagactgaggcaggagaatcgcttgaacccaggaggcagaggttgcagtgagccgagatcacgcccctttactccagcctgggcgacagagctagactctgtctcaaaaaaaaaaaaaaaaccaaaacaccaaaaaaaacccaacaacaaaaaattagccgggtgtggtggcgcatgcctgtaatcccagctagtcaggaggctaaggcaggagagttgcttgaacctgggaggtgaagtttgcaatgagccaagatcatgccattgcactccagcctggacaacaagagcaaaactctgtctcaaaaaaaaaaaaaaaaagtgagtagttctcatggttaagtggggaaaggagggcactgcattctaagcagagggaacagcatatgcaaaggcacatgagaagacaggcgcatatttgaagaaaagtggttctccaaatatggttggagcctgcattgcctggtggggagtgtcccaagaagcaggtaaggaccagtctgtgccagattaaaatgtctgggcattacctaagggcaggcagtaggaagttgctaagcagaagagttacactgtaaggtttctgcttttttttttctttttttttttcttttttttttttttttttaatgagacaggtttctctgtgttgcccaggctggtcttgaactcctgggctcaagcaattctcccacctcagccttcccagtagctgagattataggtctctgcttttcaggagatagtgggtgggagccggagagtctggaggcaggaggccagagaggaggcaggcaaaacagaacagggcaaagtgatgaggtctcaccttaagcaggggcagtaggaagggaaataaagtgcgccccttcctgaccttcatcctagagttttccttttgatttctttgcctcaagaaaatgggccaggcgcacaactaaagttggcagtttgttgtgacaggcccttgttctgcttccagaagatagatccctctgtgtcttgaagatatagcctggctctgtgtgtcgaggtgggggacaggagggctgccatgtcatggaaaaagaaaggcctgatatgtactagccatacgtcccgtgattgaaaaggcatatgaacaataaaagcctcaatttcctcatctctaaaaggggagatcatgtcccttgctctgtgtaactcaattttttgttcattcctttgtttattcattcaatagttatttatggagcacacacaatgtgccagattctgtgctaggtgctggagatacggtggtaaacaatatagaacccacccctgccttcaaggagcttgctgtgaggataaatgaaatgattatgaaatcactctgttaactatactgcatgggtctcattgtttttcttttttttttttagagacgggggatcttgctatgttgcccaggctggtctcgaactcttgggctcaagcaatctgccgcctcagcctcctaaaatgctgggattacaggaatgagccaccatgtccagcccatttctttctctctctctctctctcttttttttttttttagagacagggtctcactctatcacccaacctggagtatagtgacacagtcatggcactgcagccttgacctcccggactcaagtgatcctctcgcctcagccgcccaagtacaagtgctcattaccatgcctggctaatttttttcttttaatttattttttgtggagatggggtctcactgtgttgcccagtctggtcttgagctcctggcctcaagtgattctctggcctcagcttcccaaagtgttaggattatagacaagcgtgaaccaccacacccagccctatttttctatttctcatctcccaataagattgcaacctcaactagggctacctacgtaggcctaatcagaaaacctgagtttagtcttacttctttgtttccttctctccatagcctcattgagcaaggcacttcccctctctagatgattcgttgttcatattcagcccaaggtctatgattgctgtttttgtttttagagacggagttttgctcttgtctcccaggctggaatgcagtggcacaatctcggctcactgcaacctctgcctcccgggttaaagcaattctcctgcctcagcctcccaagtagattacaggcatgcgccaccacacccagctaatttttgtatttttagtagagaccatgggcaggctggtctcgaactcctgatctcaggtgatccgcccgcctcggcctacccaaagtgctgggattacaggcgtgagccacagcgcccagccgattggtttcaactattagaagaagggataaactggcccggagcggtggctcaagcctgtaatcccagcactttgggggcgggcggatcacctgaggtaaggagttcaagaccagcctagccaacatggttgaaacaccgtctctagtaaaaatacaaaaattagccaggcgtggtggcaggcgcctgtaatcccagctactcggggggccgaggcaggagaatcgcttgaactcgggaggcagagtgtgcagtgagccgagatcgcgccatcgcactccagcctggggggacaagagcgagactgcgtctcaaaaaaaaaaaaaaaaaaaaaaaaaaaaaaaggagggataagcttctgggagaaaaagttccgggtaaagaaatctcactataaaaaagaaatagtagcagaaacagctgggaactcctagacacacttaactttcttaggtatcccttccagtctcctcccaaccactcctttcctatttcatttccactccccacctttagtagctgcggtctctttaagtgcgcactttcggtgtaatgataggcgattgggccaataaagcgtttcgtcctggagttaactggtttgtccctttcgggctgccgtcctacagatccgccatattgtctactgaaagctgccgctgaagctgccgccgttgcctccgccgccaagagtgagcgagcggacccgcgatgggtgagtgaggaaaccacgcagtagggttcttgggctcagggagtgtcggggcctgggatttggcgagagcctgtctccggtctgcggaagatgtctgcatcccctctagctaggtctgaggggaaaagtcaggccgggagtgcccctcttgccagttttgggccgagctagggcccgtgctggaagcagtcctttggtgctggtttcggggacaccttggcacgcctggagccccccacatggtggcctcgggcaggagcccacgtgttcctgggaggtagaaaggggcctactctctgtcctgcgcccagactggggctgggggacgggctcccggcggcaggcctgggcggcgctaaggtagctttctcctgggttgtgtttggccaacgcgtgtcttgactagattcagtggctcccctgaactcagggaagtcctacctacgtagcgaggtggagtcctctagtgaggggacgtcaggcgagccagcactaggccggtaagcatgggcagccaggccgagggcagcttgcgccgctgaaggccgggagaacggaatcaaggcggaaatagtgtggttcggttgggctcagagtggcatcgcttgtgatggtagaacaccaaaggccaagtcctcttggccatctttaggttgaggactttaggtttctgggctggccctggtaaggagaaaaggagcgacctgttgatctttctgaggggactccggctggcaaggcctctgttcagagagaataccatggcgaagtctttggatttagagacagaaccaacagtggtaattcctctaaagcagtaaaaattgtgaaatttgctaagctctttctacgtacgggcattgttctgattgctttacatgtcttgttttacttaatttgtacaacctaaggaaatagatgctaccattgccattttacagatgtggaagctgagctttagagaggtaaa

SEQ ID NO: 4669 - DNA, 6000 bp, Homo sapiens
ctgaatatatgaagtgcaggaattgttagattatagatggcatttaaaaccataagaatgggatcaacaagggagtaagtgtaatagagaagagaggaggacttctgcagcaattcagtgtttggggaggtaaggagaaactataaaggactgggaagaagtggctactgaggtattatagaaggagagtcaagagaatgtggtttctagacacagggaatgacaactgttttaaatgctgcttcagggtcaagtgagatgaggagttagaactgacgatcagattttgcaatgcggaagtcattgcaaaatccctagattttgacaagagcagtttctgagaaatgatggggtgaaagcctgattagagctagatcaagaagaatgggagaagtagagatagtaaatgtttgcatcctgtatggcaccaatcacattgtcaggcataaaccaggcacagaaatatttgttgaaatattgtcaaacctataaagtactttacatacttttttgttatggagtattaaaaataaacttaagccggccaggcacagtagctcacacctgtaatctcagcattttgggaggctaaggtgggcagatcacaaggtcaggagttcaagaccagcctggccaacatggtgaaaccccatatctactaaaaatacaaaaaaaaaaaaaaattagctgggcatggtggcacacacctgtaatcccagctactcaggaggctgaggcagaagaatcgcttgaacctgggaggcagaggttgcagtgagccaagatcgtgccattgcactccagcctgggtgacagagcgagactgcatctcaaaaaaataaataaataaaaataaaaataaaaataaacttaagccatattgtttaatgctttttcctaataacattgaattatctatatatttacatgtatatagtaaatttacatatatatatatacacaatatatttacaagacttgaaaggaatgtttcccaacacttttaaaaatttgttttaatagcttcattgaagtataattcacatgtaactcatcatttaaactgactgattcaataatttttagtatattcacaaataggtgaaaccatcaccctagtcaattttagaacatttccgtctcctcacaaagaaaccctacatcctttagctatcacccctccacctcactgttacatggcccctagccctaggcaaccttgaatctactttctatctatagatttgcctattttggacattttatataaatggaatcatataataagtggtcttttgtgactgactcctttcactctgcataatgtttttaagtttcatccatgttgcagcatgaatagtacttcattcctttttattgccaaatgatatatcattttgtttatccatttatctactgatagacatttgggttatttctactttttggttattgtgagtagtgctgctatgaacatttgtgttcaaggtatatagttaacagtggaattgctgggtcatatggtaattctatgtccaactctttgaggaactgccaaattgtctcctatagtggctggaccattttacattcctaccagcaattgatcagggttccaatttcttcatatcttcaccaattattattttctgtcttctttttaaatttagtcatcctagtggatttgaagtgatatctcattgtggttttacccatcactctttacttcttcaatatgagcttctctttcttgtgttataaaactggaacatcattttctcctactacatcctagcattgcttgaaaaataaatctttgaatttattcacaataaaggtaatgtgtacacttcacaataccactctggatcccacagatatcttttaaatattatggttatcttttaaaaaacagaaactccagattcttacaattccccatgatctcttctaccccaggatttagttatttatgtaataactaaataagggaaatgctgaaatagataatctgttaattatcttctctttactggattatatgattttccttcaatatccaaaaccagttttttttgtttgtttttgtttttgttttgaggtgaagtcttgttctgtggcccaggctggaggtcagtggcgctatcttggcttactgcaaactcccgccctgggttcaagagattcttctgccttagcctctggggattacaggtgcgtgccaccacacccagataatttttgtattttttagtagagactgtttcaccatgttggccaggctggtctcgaactcctgacctcaaatgatctgcgcgccttggcctcccaaaccagttttgatatgcgatttttctcttaatctaatggtgaccaatgagaggatttatgaactgaataaccaccatgcaattgaaaggcttagtgcttcattcagagtcaaatataggcaattagaatgcaacagggggccaggcacagtggctcactgtaatcccagcactttgggaggcctaggcaggtggatcacttgagcccaggagtttgagaccagcctgggcaacatggcgaaaccccgtctccacaaaatggagagaaaaaaaaaattagccgtgcatagtagcatgtgcctgtagtcccaacaacctgggaggctgaggtgggaggatcacttgagcccgaggaggtcgaggctgtagtgagtgagccgtggactgcagcctgggtgacagtgaaaccgtgtcaaaaaaaaaaaaaaaaaaaagcaacaataacaagtaaaaacaacatcagaggtaagatcctactaaaaatctttaccttcctctccctgacttggggtggttgtcttcctttaaaaaacaaacaaaaaactgttttgccaagtaccaaaactatgtgtttgcatctgaagcaataaaacaaggagaccaggtagggatgcaggttgttacagaagttgaaatctatttcctgacaaaggagtagctacaagttggaacacctggggaggcctggggtaaatgcatatgcaaataagtgctgggaaagtgctcctgggattcacctcccttaaatactttcagaagtcattacaggttatgaaacttagtgttctaatcattacatttatgggaaagagtggaaagcagttcaggtaacatagctgtagttgaacaggctaggggagtggtggctggagaaagaaaagaaatatagttgatccaggttttggaaagttgagatcttgggatgtgctactccaggagagttaggaaaaatacccttttcctcgactatggtacagtacagtaagtattgactctgaaaatgttcgtaagtactggcttccttggatctagagggagtcacattaaaatggctacatttgtatcagagctgtcttttattctttttggcatggtcaagtcatttctaatcagagtagggggaatactggtagatcagacgtcactcaaactcatgagaattatctgtttaacatccacaaagcaagtagcccaacaagcaaggtccccaggagcctactttatcctcaaggaatctgcttagtcaattgacgtattcacagggctggagaggtatgagtggtggttaccttcgtgccagagcagaacatgccttgtagttactgccatattctagccaagttactccatttactgttcctttgttcctaaattaacaaggagaaaagactgtgtgttcaacacatgaccacaatagagaggttatttagagaaagcttaaaatgtacttgtgttttctgtactaggcctagggcaccccagttatgaagccttggcctgagtttctctctagacggtgctgaattgccatctagttacctattctgacaccaggaacatgattcttcaacaaacattgacggaagcttacatgggaccggatcacagcgctgagaagcactggggctaaggggcggcacaaagtctagatatggtggcagcacctgctcataatgaaatgcccacagtttagtggaacacagctgctattactcacctgtctatcattttgtttgggagagccctggtgggagaggagtatggtatttaatatttaattgagcagttatatgtgaaagagcgttttcacgagacttaactcctttcatcctcaaataaccctacaaggcgggtactattctatccctatgttacagataaggaaactgaggcagagaagttgcgtgcttcatcaaggtcacacaaccactccgtggaggcaagttgaacacaggctgtccggcttctgagagccagtggagaggagggagacggtgggagacgggcagggggaaaaggtggaagtagacccgaagggcaggcttgatcttcataagagaaaacagtactaacaccatccactgattgactcgcatatttccatcacttaaagctcctggcgtcactgccaggaatggaaagttaaaaaactcccagctctgtaaggttctgcctggatcctgaaaaaaaccttcccacatgccccgaggaaactcgagggctcgcttctttctcacatccctggcccggggcaccggaggtcccgctccggcggaggaactacaacccccacagcaccgcgcgcgaagctgggcccccctgagggaagggtaaggtgtcccgaaggtgccttcagaaaaaaattacgtacgtttttcgtcgctttcccacgatcacacagatctcaggtccaggaggacgcatcgtctttttagtaacagtgcatgctgtgaggcttgtagagtcgcctctctcttcaggcgcagcagagggcggccgcaatagtacgctcgcgcggcggtggcgggtggtggtccttggaccacgcggtgggcggagccagcggcgacggcctcccctcccctccggacgcaggccggaagtacgtgagaggagacttccggccactgcgttgtagtcggcccggctgcaaagcgtttttctgcaggctgttttcccaggttccctcggcctgtacctcgcgcactcctcttgctccaggtccttcagtctccgctcgtctcaccgtaggctgtgacgacatgagcaacaaagaaggtggcgtccttaacaacacggggcgttatttatccggagggggaggttctccagtctttctatgcagttttccccttttcacccttgaaggatgccttcgtcccttgtagactcgggggcggcccctctgtttctctccccggccagatcggccctgtttacacctccttttttcttaaatttttgaggtgtgattttatcctagttcagtaattgctgtaatgccagatcatagcaccagttggtggaaacttggatgatttgcttggaaaggcctgggcagcgtctctgtcagtctgcggagaaagcctctaaggcgagggccctgtgggtatctggttttaaagcaaggagtaggtttgtctatgttgtgttttgcaaactcttggtgatggaagatccctctctttttttcttctctatataaggatcaggagggttcaggaaaaggaagcatgacaatttcccacataaccaaagaagagaagggaaggatgttaattcatcttcacccgtgatgttggcctttaaatgtaagttctctgcaatgtaagttgaagaaggggagagaacaaaattatttagccatggttatgcgcaagaaaacagtccctaagaatttaatgtgaaactttagctggaggttttgtgatggcgctagatgtaccctaaaagtctggattacaaaggccttcacttttatgtcccattaagagaaatattagtaatcaggtaaacatgacttaaacacaagaaacagtaaacattaattaatatttgacatgtcacatactcaagaattgtgtacctgataatatttactcatctgttatatgctaaaatatattttcatttagtgtgtatttgtttcctctactagacttgaagacag

SEQ ID NO: 4670 - DNA, 6000 bp, Homo sapiens
gaaagacgacaggatgaccagctgcagagaggagctaccctctccagggcctcctctctactgagagctgaacactcgatgggacaatctgcctacagagaggagctacctactgtgggcctcctctgagctgttctaacactcaataaagctcctcttcatcttgttcaccctccacttgtctgcatacctcattcttcctggatgcgggacaagaactcaggcaaaggctgccaccggccacagaggtttctggccagaaaatcaacacttcaaagatcagataacaatgctaagtccctgtgatgggatcaaggtcaggacacttggcaggtgagagatggagctgaagagggttcagctgaagaaggttcagacccgtttgctcaccactgtgtccaccatgcctggaacagtgactggcacagagtaggaattcattcagtgctttttgaatgaatgagtcttggtaaagaggattttaaatggttgacagcagagtaagaaagagtggatctggggaggagttgtcagcccccaggcgacatgttcataagccaaattaggcagttggaaggtaggtttgaccagcgtttttcacacttccagatgtcacataccaaaatttggtagactaacatcgggctgcctctttccattttgcaaataaaaacattttttaaaaactggccaggtgcagtggctcatgtctgtaatcccagcaggattgcttgagcccaggaatttgagaccagcctgagcagcaaagtgagactgtgtctctaatttgcatatatatatatatataatttttaaaaaatgaactcccatcaccaaattgaggaaacaatgttttaaataaagggcattttactatctagacaggatgtaatcacagaataaatttcagtcttttaaattgaatagatttttctttgtgaaaatctcactccattgccctgtgtcctggtattgcttagtggcttaaccaccaggacagaaacatcaggaacaagggcagggcagtgcatggtgcactggccatttccattacagaagggcgctcagaaaggagagctgaagttccaatctggaatgttagttagactgagtcttgcccccttcaatctgctttctccaggattattttttagttcctgcaggaagaatgagaaagcaggtagttggcatcctgacactctcatctgaacatttcctttcccctcctactactctgcagtgaattgagtgctttttttctccctttttcatgtgtttgcttttttttttttttaagacagggtctcactccgtcacccaggctagagtgcaacggcactatctcagcaatctgcaaactccaccactcaggctcaagtgatcctcccccttcagcttccctagtagctgggactacagacacatgccaccatacccagctaatttttgtattttttgtagaggcagggtttcaccatgttgcacaggctggtcttgagctcctgaacttaagtgatccaccagtctcggcctcccaaagtgttaggattaccagcatgagccaccacacctggccctaacagtgctgtttgaggggctgctcttgtcatcctacattctgcacagcactgggacatgcaagtgatacatacatggcatcttctgtctttaggaatttacagtgtagccaggaagataaacaccatgcatgccttttccctccttgcacccttgaactccaagtgggtcaccagagccatctgtgaaaatttggctagggtccctgctcttaccagatgtcttagttcattttgtgttgctataacagaataccacagagtaggcaatttataagcaacagaagtgtgtttggctcatgattctggaggctgaagtccaagattgaggagctgcatctggtgaggaccttcctgctgtgtcgtaacatggcagattcctttattttagcccagtgagacccatgtcagacttatgacacgtagacccctaagatgataaatatgtgttgttttaagccactacgtttttggtaatttgttacaaaagccatagaaaactaatatagagattttggtattgggaaatggagtgctgctgttaatacctaaatagctaaaagtatgtaaatggctttagcattgcacaatgagaagaggctgggagaatttttagaagcatgctataaaaagcctagattaccttgaacagactgttagtaaaaatatgaatgttaatgaccctgctggtgaggactcagaaaggagggaggagcagagtggagaaaatgcctatccctttagagaatacctacaacaggcagggtgcagaggctcacacctctaacaccagtactttgggaagccgcagtggacagatcatttgaggccaggagttcaacgccagcctggccaacatgctgaaactccatctctattgaaaatacatggtcaggcaaggtggctcacacctgtaatcccagcattttgggaagccgaggagggtggatcacctgaggtcaggaatttgagaccagcctggcctatattataaaatctcctctctaccaaaaatatgaaagttagccaggcatagtggcacacgcctgtagtcccagctactcaggaggctgaggcagaacacttgaacccaggaggcggaggttgcagtgaaccaaggcatatgagaccacatgcctctcacccccaagagcgcctagccctgtgccacctcctcctcctggccactgcactccagcctgggcaatagagtgagactctgtctaaaaaacaaaaaaaatgcaaaaattagctgggcatggtggggcacgcctgtaatcccagctacttgggaggccgaggcatgaggattgcttgaacactggaggccggaagcgacagtcagccatgaccacgccactgcactccagcctgggcaacacagcaacactttgtctcaaaaaaaaaaaaaaagagagagagagagaaaatacctacaacatagtcaggagcaggagcaggataaacataaataaggacctttcattctctcagtcttgtcatttacccacctgttaccacccatgggcaaacacattttcccccaggtatcctttttttttttttttttttttttgaaacaggttctcgctctatcacccaggctggagtgcagtggtgtgatcatgcctcactgcagcctcagcctcctgttttccagtgatcctcctacctcagcctcccaagtagctgggaccacgggggcatgccaccatgcccagctgatttttgtatttttggtagagatgaggtttcaccatgttgccctggctggtcttgaactcctgagctcaagcaatcctccacccactcagcctctcattgtgctgtgcttataggcatgaaccaccgcaccctggccttccccaggtatactatgtgtattctgctttgatcacttctcttaaaggtcatgttaattaaaaaacatgttaatgtttccatgttcccacatttcataattatcctttgaaacagaagtctggcattccaatcaattagttactcctaatttattcaatcattctctactttaaaaaaaaaatgctagtagaaatgattctgaaataagcacctttgtccaatattttattgacttatttaacactatttagtgtaattagaaataataactgtgtttttctgaaagtgtttaatttgttctttcccccaaatggacaattagtccaaatgcacaagaggaggcatatatgaagaacctaggaacacacagaaaggaacagcaaacactgggatctacttccggctggagggtgggaggagggagaggagcagcaaacaaacactgggaagtgggcttaatacctgggtgatgaaataatctgtacaacaaacccccgtggcacgagtttacctatgtaacaaaccttcacatataccctgaacctaaaataaaagttaaaaaaaaaaaaaaagccaggtgcggtggctcatgcctgtaagcccagcactttgggaggccaaggcaggcggatcactagaggtcaggagttctagaccagcctggccaacatggtgaaacctcatctctactaaaaacacacaaaaaaaggctgggtacggtggctcacgcctgtaatcccagcactttgggaggccgaggcgggcagatcatgaagtcaggagatccaggccatcctggctaacacggtgaaaccccgtctctactaaaaatacaaaaaaaaaattagccaggcatggtggcaggcacctgtggtcccagctactcaggaggctgagacaggagaatggcgtgaacccgggaggcagagcttgcagtgagctgagattgcgccaccgcactccagcctgggcgacaaagcgagactccacctcaaaaaaaaaaaaaaaaaaaaaaaaaagctgggtgtggcggcacgtgcctataatcccggctacttgggaagctaaggcaggagaatagcttgagcccaggaagccgaggttgcagtgagctgagattgcgccactgcactccagcctgggcaacaaaggaagaccctgtctcaaaaaaaaaagaggcatacatggaaaaatgacacagaaaaagcatcctagatccaggtcacagcctcactgggtctctgaaagtcctcatttctgcggaccaatgtcaggcaatgttttttctctctccttggtgcaactagggagctttcggcttggggcttggtgggtgcaaagacgaaattcgtgctgtgtatgatttgtgcactggcaacgtgtgtcttatcaacatttccaaggagaatttgctcctggggaaagtcagcagggtccagagagcaaaaggatcataaagccaggtaggcccaggggagaaacagccggtctttaggtggctggcgcagagcaggtgtcacttgggaggtagagcacacctgttctcccacctgaacaaggatggagaacaaagaggcgggaacccctccacccattccatccagggagggggtaagtgccaagactaggaacctgtcactgtccctctcccaccagctgtgcagacctgtggagggaggtgaaggccgtggaatgcttttagcaaggagcgggtagcgtgcttcctttttcttcaggataaccaggcctgggagagccatgtggagaagcagctatgctcaaacctcatggctcagacatgggccagggtggctgagcgaatgctgggagagcggatggtgctggagatgcctctctcccttccacccctgctcccctccgcttcccctacccttaaagatcgaggggagatggcctctgaagaatgcccgaatcctgcccttctgtctggttgttcctggatgtgcagagctacgggctgtgggcagccaggcagctaagtgtgagggttggggtgaggacatgtggaacaggagtgaggggtggagggggcagtggggagggggcatgcaccagggccttggctctaggacatggtcagagaccctgcccacctgctcctcagactttggccctcaggccagttcccctccaagctgccctgggtgttgtggcaaccatggaaagcctggccctgagcacaggcgactgccgggattttcctaagggcctgttctagaggcagaggcaagcaatgagtccctctgtctgggatgctcttccccccgatgcttacacagctgctccctctcatccattctggtcccggctcaaagggcgcctgctcagagaggccttccctgccctgcccaccctactgaacacagtctctcattcctcacaggctgctaccccacccatcaccctattttattgtcctcacagcattctagctatttggaattatcatctttgtctttcttggacggggtgggctcccctcactagaaagtgagcttcttaaaggcagtgctttgctgggcctttttcctaaagcatc

SEQ ID NO: 4671 - DNA, 6000 bp, Homo sapiens
cgtttcttttcttttctttttacatgctggtaggagtatatattcgtatagcattttggaaaggcaatgtgacattaaaacacacaatttatatgacttttcagcaatttctttccagaatcaaccccaaagaaactgaaatagtcaaatgaaataaccatccataacagagaatagttggtgtggtgtgtatgtgtgtgtgtgtgtaggtatgtgtgtgtgtgtgtgcgtgtgtgtatatatatatgatggaatactacacagccactaaaaaggaatgaattggctgcgcatggtggctcacacctgcaatcccagcaccccaggaggccgaggcgggcagaccacctgaagtcaggagcttgagacaaggccagccaacacggtaaaaccccatctccaccaaaaacacaaaaatcagccaggtgcaatcatgcccgcaatcccagtccaacatttctattacatttggaatgcctcttgtaatccctatagtgtacatttcattacagttattttataacacttcaagttgaaggcaatgatgggaagtcttaaccaagttcataattactagttatccagcatattttaggtatttaaaactttttgtagaatgcataaatgagtggtaggttttgcaggtactgagaaaaaatacactgaatgaagatgcaatgtgttcttcaagaaaagtataagaaaaatggaagtctgcataacccaataatgggaacagacaatggtaggatctatctagaaaataagctgcataacctcagaatagctagaaatattttctttcatctctaagcagctactatatttaactaaaatattttcactgttattatttttgtaccacactaattgctaaatacatccctgttcttagacagaagaagtgccttgcttttcaaaatgacagtttgagatatagcagaatcctcatttaagtttctcacggcaaatggagttctttgttgtccttcagctgaaagaatcaatgtaattttaaaaaatgatttgttgcccactatgtgcaaagcactgttccagggacaaccacaagcaaagcacaatatttatcctcaaagaactcgtagtttgtgagtaaaaaggcacaagtgatgcttgagaaatgccctatgacagatatacataaaaggttttgagatgtataagataaggaatccatcaggtctgagaggatccagagagtttcatcctttaaagtaggcattggaaatggattttgaatgatttattttctaggcaagcaagaatcagacaggtgttccagagataaggaagtgtctgaataaaggcatagacacaagtttctgatattaaagagaataaatagtatagtgaatggctggaggaaaagagggagaaaatcagaggatgagaggcaaaaataaggagatttatttcttcatttaaaatggaaatgaaagaaaataaatgttcaatatttgatgtatatttattttatgtataagaaaatttaaaatgttcaatatttaatgtatatttcttttatgcattactgctcagctaaaatgagtaagtgaagtgaagaagaataccatgctcagtagacacacccagaccaagtcttagggttttgtttaaaggttgaagtttgtagttttgagatacccagaagttccaggcctccagaaaaccagtatttaatctacttttccctactattcagactcaaatgctaaaccaacgtgagcaaaagaaggaaggatcatatgatgagctgaaatatacaggaacaatgacagaatagataataagaggaagtctgagcagaaatgaaacttagaaaccagaaaagtatacactgaacacatgctaaatttataattacagctattcaaaacactcgaggataagttgtcaagttaaggacacacaaaaataagaggtatatttcactgtgatcttttaacattcaacattcaaaatttttccaaatggcacagattttgtttctcaaggttttatcattgttagtaacatttttacattttcactgataaaaatgaaatatgaaataatttaggaaagagaatcaaagagcagtgacctaaatatacactatactgattcttacacttcctttttataaagctactgtgactaacatccatttctctatcttatctgataaaacaaatcctttgtacattgtgagatttttataaaaatatataacttaattctcagtttatcactgaaacttaaataataataaaataacaccaataatatacaataagtaataatactgataaattgtgtttcttatatactaacacatagaaaccatcaacattgccatttaattaacttagaaataaaaagtgacgtataagtgctcaaattagaaggaaatcttattttttttttacttctaggtatataaatatacaaaataaagtagaatataataaatagtaaggccagaacaagtagtaccaaataaatggtataggaaaaacgctaggtgtttaaaatgttaattccaatcaaggagacttagattaagtcaaatttcactttgttttgatatttttcctattaattattcaagcacacagcatttaaattgattcatatatttaataattttacacagagtgaaatgtcaattggtattctttgttttcttccatattttttattaggaaaagaagagaaacctggaagaaaattttcctggaaagaaagagagcattgttcagcagcaagaacactgaccatgagaacaattcttctactcagaagccacctgaccttgggcctgtcactcaggttttctgagccacagttccctgaccactcgtcttgcttattttataggggctttagtttctttactgataaaattgctgtgctttgtaataataacacctatgtaagaatcaaattagttaaatatggaaatatgcataattgtaaagtatcatacccagtttctggaacctagctgatattttattagtgaatagaaggagaaaagcttgtcccattgatgctcagtaatacaaaacatttaaagaataaattcaaaatcttggctataatagaattttttaaagtgttattatccttcaatgtttgagtttgtaagtgaaaagtcacattaggaatcagctttgattaaaacaaaggaataactcttatagcaagtaaaccatttgtatgataataatccattggatatataataaagttcaaattctccagccaggcttttacctctatctactgctacactatctacctctcctcaactttactttctcatttgttttgcaatttagattgtaaaagtgtgttcagtatggttttatctctgcagaggctgtggcagttcaaacccacataagtttgggactgtgattacttcttttttttttttttccatccagagtccagattgagatgagaagcttcttctttgtcatctttctctgcttctgggtagatttttctatccctccttttcactgagagagtaattttttgagggtcaggagaggatgaaattcattctaagtctccattttgggttattcccaaaggctttttcctctctaggacttcttcctgttaagccaccttgtatctttttgtctggagggatcatacaagagttgtgcttgttcgaaaatcggtttatcccagttacaccaggtatttaattacgcaatacaaattaagtactttataagctgattaaatgtgacttcaaaaaaaaaaaaaaaagtaaaagtgatcctgtggaaaagtttttccttttgaaaatatttgctgaaaatgcacacataatgtaggcatgcagatatggatgagacaacttgaaaagattaggagaaaataatcattaaagccttaaaagatttagtgcccagattgttttacaattgtctttaaatccagacaccttattaaagaaaatgaacctggcacttacatatgaggcaatagaggtatagtttatgaaagcaataatacgtgaaaccccaatctgcaaatcgtatcggggggaaagccttattctaagtcaacagattagcttttcacttcaaataaaaattttagatacatataaatgatactttgtggttcttctctgtgaccaatattctgatttgtccaattgctactggatcgaatcaaatcaagtatgatggattttattgtattatcttaggacaatactcaccacaaacactgaataatataaaatgcatgtttaaattattttaacttaatcccaaaacctacagttatagtctatttctatcatgattactactactaaaattactaattgtttagtcaccatagtaagatcttcctggaacttcaacctacagcattacttaagagcagcacaatgcccaaaagaaatctttttattccagtcacctgagaccttgggggaaaaaaatccttagtccaccatctatgcacaaagctagggaatctctttcctaacaaaagattaacacgttttctccaagcagataactgaatcactagaaacaaataaagaaaaagacctgaaacaaagtactgcaggtacaaagagcaaagatcttgttacttaaaagaaaaactcagtaaacatgtcaatgtttcttggaagattagggaaaccaacattcttaaaaggtctcttattcattatttataagtagatgcaacacctcatttatacctccttatctcatacagaagagctaagattggcagaaatggtaagttctcaatttatgcacattggtttaacttgtttttctagattccaccttgggctttccttgggacccagctatccagcccaataaagccagtttgaaacagctgcatttggaacttgctgttgacacaataatctgagttatatgttaatttctaaaagaataaatgaacccattacttcccagatttcacagaagccacttgcttggagcagactaccatgacaagccagtctcaggggatccaccagcttcttcaggcagaaaaacgggccaaggacaagctagaggaagccaagaagagtaagtctcacctgtgaggggtctgtcacgaaataaacaaagcagtggaatgcagggataagcatagacttttggattaggcagaccttgtttcaaactttggtttactgtactccctgtgagaccttcacccattcattaaaattacccagccatatgttccttatttctagagcagggatgaagtttcctcattcagatccttttgagaggtcatgtgttcatggacattaagattatagagatgtgggcttaagccttggctatgccatgcctgttttctcaacattgttagggggtagaaaacctctggattgaatctacttattagtgagtaaacctgagcaaattacttattttttataagcatcagttttcatttccataaaatcagaataataatggctcattctcatccctctcttggtagctttttaacatctaatattttaaaatattttcattttattctcattttctacctctctttttatttttattaatttattttttaagagatgagggtctcactatgttgccctggctgaactccaactcctggactcaagagatcctgctgcctcagcctgccaagtagctgggactacaggcacttgccactgtactcagctctcttttcatttggtcatgcattcatgtacttacatatagaatgtcctcaatgaacttcaacaccttttctattctctttgatacaacagccaaatgaataggatattaacattattcccaatgtatgcagaaatggagtcactgatttgttcaaggttatattttaaaaatagaaaatattgtgccaggcaccatgctcattgcttatctttattcctcacaacctttactgaaaaagcaaaagtgatgcttagagaaattatacaacttgtct

SEQ ID NO: 4672 - DNA, 6000 bp, Homo sapiens
gccacagtcttaattcagagcctgttcagaaggagagttgctgtggctgaggcccaaagcccttggagatagaaaccaaacaaactctctaatctccccagcctcggccccagccctgtggagcccaactcttcacagctgagacaacagagaaactggactgaaggcaaaggggccagggattgcaatttgaggggggattgcaaaggatttctggggtgtcaggcagcccagggcagctcagctgtgtgggtccccattacccttccccacccacctccaggaaaacagaaaaggtagggccagactgagagtctcccaaccggcagaaaccctctccatctccctggttctgggtggcaggaaggggggttgtgttgtttgaagaatcatgggcttggtttggttccaaggttcttggaggaaaggtggctggcgtgctcactccctgctgattctatttcctcctcgagcccctgatctcagactacctgttgaacctcaatgcccgccctttggggcactgaaattcctgggttctgttttcacctcgtagcactgggaagtcttccagaaggtgacagaggtcttcatcctagtgcctgcgctgctggggctcaaagggaacctggaaatgaccctggcatcaaggctttccactgcagtgagtatcctggctgggaggagtggggcacagagaggactctgggcagcacagagccagagactgggagagggctacgagcccttctccactgcccaggcctggagtgtggggctggggtgggaagggagggcctggctgggcaggtgtagggagatcccaggctgggtgtcctgctcctgggcaggggctccctgcccaaagtggttcccaggcttggtttctggatgtcccagccacccctggactcctgccccaccccctacctctcaaccacctcgtgactgtttgtgcagctttgacaggcaggcatcatgctggttcctccacccgcacagatgggggcctcctctgatctccagcccctgctttgcagctgggcgggagcagagccaggccctcccagcacccccagccccccggccatcccattccctttacccatggcagcttgctcttctttaaggaaacagacagagaggagctgctcgtcattcctacctcccacagttgtgagccgtgacgattccgggcctgaacagatacagggccctgggctggaggtgggagatgataaaactcaggaggccagggatctccctgcagggtcaagagtctagagaaggtgacagacagaagtggcatccaagttaacccaccctgacttgccatacccgacttctggcccatgccacccactccttcccaaatactcttggagcctcagtcctgcaccagcagctgacctttccttccctgggatcgcaggctggcttcagagtcagggactgggttgttctgacccatgcaggaatgggctgcccagataagcagggcaaaggatagaatttgcctctgctcagctggtgtcctgagaggaagagaggcgactgcctaggggacccccttccaaccccccacccagctgcaggagcccagctttagctccttccctttcacctcagtttccctgatcctgcttcacctttccgggactgtcaggtcctgctctcagagtcttaggccacatgtactgcctcatgatctaggcaggagcctaatggatggagcttcaggccttttccagcctgaagctccagccccttgccctccctttcccaggccaacattggacacatggacacacccaaggagctctggcggatgatcactgggaacatggccctcatccaggtaagaaggcagggaccagagagggtgggctaagcttccccttagtcaggaatctctgaaaggcttaggtcagccccagcaggctcctgagtgaatctccagtatcccactgagctggcttcccccagagtagctctaggaggtaactaggttacccaggaaaacgcccaagatgaggagggcccagcatcacccattctggttctcagttcttggtggtgcacgtgcctttgagtcccagcagatcctggcaatatgagcagactcaggagtgctgagatgtcctgtgccactgctgtcccatctccccatgagaccacacaggttcagactgggagccttcccccttgaggcccaggccttgactctgggtggaagtctccggctctgttgaacctcactcccatccccagaggcacactcattcagccagtaacatgttctgggctcctgcagagtgcactgcccagtactagtggctggtgtgaacctaaataaataaagacatccttccagcctgggaggactggaccatgcagtccagcctgcctcctggggctactgccagccaggaagaggtctgcccagatgcttatgacctcagcttaggaagcccactgctctcagggctttctgagttaccactcctgtccccaggtgcaggccacggtggtgggcttcctggcgtccatcgcagccgtcgtctttggctggatccctgatggccacttcagtattccgcacgccttcctgctctgtgctagcagcgtggccacagccttcattgcctccctggtactgggtaagaaagggagggcatagaggagtaaggagtgccgccccagagaacactgcacctggcacttccactctctctttttgtttgttgagactcctttatctcttctcaccctgcctgcccctcctcccacttgctcaccaggtatgatcatgattggagtcatcattggctctcgcaagattgggatcaacccagacaacgtggccacacccattgctgccagcctgggcgacctcatcaccttggcgctgctctcaggcatcagctggggactctacctggaactgagtgagccaccaagagtgtggcttcttggagtcctgggtggggttgggagagatggtagtagtttgcaaatgtgcaagagtttcttctgtgttcttaaactatttggtttgaacacaggttgtaataattcctgatcttagagatttgaagctaagtactgatctcaaattcaagcaggcatcaggggcaggggaaaagtatcagaagtatattcctgtgtggtcctgcagattcttacttctcttggagggatgaggtggaaagggtaaaggaaaggaaccagaggcttagatctgcttgcaaaatgaagaagcgggtgggagatggtgttttctgggctccaatcaagagacctagagtctctgtcctctggtctctgtccctaattggctcagtgcctggctagctctctcccttggtttcctcatccataaaatggaaaaggcttgtcccacctacctcctgagctgccagtgaagatcaaatgggataatgtgtttactggcatttagtgtagtcttgctattgatctgttgggacattttcaggctgagccagggagaaacttagggtagggaaacacagtgcttatctccttctgacctctgccctctcagatcactggcgatacatctacccactggtgtgtgctttctttgtggccctgctgcctgtctgggtggtgctggcccgacgaagtccagccacaagggaggtgttgtactcgggctgggagcctgttatcattgccatggccatcagcaggtaggctggggccctgagtatccactcctaccccactccaacccttccacagacttctttttaaaccctggagagatggggtgggggtcagaccctagaaatgtgttcattagtgtttcagtcacatgtccttctgttgaaaatgacagaaaccatctgaactgggtttcattccaaggcagaatgtattggcctggagaaccaaaaaggcacagctgaattcagcgacatacctaagatcagggccccagtactctgtgactcttagctctgctcttctctgtcatggcctacagcccaggtttatgcttttcttactcctacaaattccagtgggaagagagattcttcccccaacagttccacaaagtcccagaatagagttccactgcttctcatctggtgacatgattatctccaaaccagtcagcgtggccttggggctgcaatcctctgattggatggacctggagcctagctatcattgaggcattgtcacctgagccacagtcactgagcttgagagaggtggttccctgtggaggagcccagtgctatcaccagaaagggaagtaaatgctgagtgggcagaacaacagaggtcctcagaggcagatagtcctgcaggctgctcctccggccaacttagagggcaggtacaggaggtggttgcctgacccagtaccaccagcttgttctggagtcactgtgcccagtcagaatgttatgagcagcacctaatcctgtcaagggaggcaaggactggatggtgaggaactcctgagagccatggtgcttcccttcatctccaaggataggtgggcctggacctctcatcccagagactaaggcagaacccttcagtggtctttgcgtcattttgtctttatgtctctatagtgtgggaggcctcatcttggacaagactgtctcagaccccaactttgctgggatggctgtcttcacgcctgtgattaatggtgaggtctgggcatcagctatcagagggcagggctgggggaaggaaagggacaggagaagaggacttaaggggttggtttctgtatcagtcagggttccagcagacgagaatctagctcagatggttcaagaccttaatgaagggactgcttacagaggtgggagcagagtaaaaggacagataagggatgttgaggcaccgagagattagcagcaatgggaagcctctactcctaaagggtcaaggggagtatcatagtccattatctgttgctagaacagaatacttgaaactggctaatttataacgaaaagaagtttatttagctcacagttctggaagctgggaagttcaagattgagcagctgcttctagtgagggcctcatgctgcatccaaacatccaaatggagaaacagaaggaaaactgggcatgtgcaaaatgggcaaaacaagagaggcaaacctcgctttatgacaacccactctcatgggaactatacctttcccaagaaagacattaatccatcttaataacctattcactcttaaaggcaccacctcccaccaccacatttggggaccaagccacaacatgagttttgttggggacaaactatattcaaaccatagtaacgagggaatagcattataggagtccagtgaaagctctgtctttgcccccaacatggggaagccaatgctgaaaagcagggagggattgggaaagaaatacctgatctctctctccacctgccctctggttgcctgctgttgcctcccactgaacaaacagtggaagcagccagcaagggagactgggtaatgcagtctgtggagaccagtcccccagagctcagagcaaggctgagaagagcagggagcaggttgggatgtgagggcaacagagaaatcagcacaggtcctggcggagataccagattccagagtttggagctcaaacctgatccttgaaactggttaccagaatcagcatatgaccataggatgcctgggtctgctcagagcattggagaggaggtgaggcggtgaggcaaggcagggcttcatcccctcagctgtgtaggaaggcaggtgcccatgctctactggtggagaagtcaggctctctgagtctgcagatctgcacgtatcctttccggcactgtcacagctttgccaggggaacatggaactgctgcatctccatagaggggaggatgggggaggctggaagatgcactggaagcaggggtctttgtcttccttcttagtgccttactcttcttttggggactggtgaatg

SEQ ID NO: 4673 - DNA, 6000 bp, Homo sapiens
tagtgtgcccatctgcactttaattcccagctaggttaagacaggtccttattttaactcactactcacctgctaaggatcttgaacaaagtagatcctgctgtgtatacagaagtctacaacgatgaaagtgcatggcaagcgtggccttggggaagtagagtgggaaggaagtattcctcctgtgcctggcctgctcctgtggccgcagcatccctgggcgggacactcttatctgcttcacttgaccaccccttctgcttttcccatctctgtcccctgcctgctgtcagggacccatttgctttgctcctgctttgtcctgcaccgtatatccaggtgttgccctaaagccctttcctggacacctagaggatgccttttggaaaagcctcagacaggtgaagcctggggttactgtaatctcatctgacccagtccttaccctaaaagatcagctccagcccagcttctcccacaggagcccagattctccccagcctggagcctaaagcttgtatctgggaatttaagtcttcttaatgtcttgattcctggctctgactttcttccctgctgctaccctcctgaggtggctcaggccagaacccttgaaggcaggtcagggtcagtgtatgagcttggattggagtaggtgaaggatggaagaggcgcattggaagggcaaggaagaggtactggcaggaccactgaggatcgagacttaaggtgattgctgtgcctcaggattcattttggctatgggggaggcagtctattccctcacctgcagaataccagggatccatgagcccctcacaccaaggttagagaaggaaagagatgaggagctgcatttctgagaagtagttaaaatctagatgctcccctcacctccaagcagggcagcacttcctggaacatgccctttttcatccccatcagagcaggaaggcgtgggtggctgcttggcagacgggtgtgacttcaggggcagatactcctagcctggatgaacaggatggggctgaatttggccaaaggaggaagaagagctactcactgtctgcccctgcccatcctgtctactcctaaccttaaggccaccttgattcctgggctggctccacatctccagcctccagcatctctttccagagtcctatgcatgcccatgtgtcagaggctttctgcctgagctgcagctttgagagggtttgtgggtgaagaaagtatgtgtgtaggaattggcttctctgacccaagtgccaactcggggctttgctggcctggggtcaggtcgtttgaggttccaggctatattctgtaagagtcgggaagacttttgcataggggctgttactgtgactgctccctctccttgcctgtctgtctcttatcccactgctcctaacactccgtactttgtagatcctcctgtagctataaggagagggtgcattgtgctgggaggtagagagatttggggtgcttatggtagcaaccagaggaacttagctgagctttatacatttttcttaaataataataaaagcaagcaatattcattacaaacagctcagaaaacattgcttgcatacatgtggagtcttcttgtgggctttttctttctatgagtacatgtacattacatacacctacctgtagaagtcagattttcatggagctggcagcttggaagcagggtggagctggtgttttggggtgaagatgagctctgaggctgtgctctgagaggagctttgaaagcccgcaagggaggggagaagagggggatttttcccctctctggagctggtttgggaggaagcaggaggcgaagcagagcaaggccagactgcagggagctggagcctcagtggtatgtaccagccgtgtccaagagtaacagtccccaagttgctccagggcagatggggctcactggggctgccttctctctggggggtcttagggtgggaagggattcacttcccttcagtgtttggagagggctggctcatcctttggctgcctggaagcccagtaactgttgttgagatggggggcagtctcttccccattgttagtccctacggtggggcttccctaaggagagtcccaggtcttggccagaccagaagctcaggcaagcgtatgctccagccccagtgaaatgagtccttccccaggatcctgtgaggcctcccaccccattcacacagggagagctccgacaggaaaagagaggttcttgccttatagggccacccagcgcccagcctctcctggtctcaagccctagccccaccccctctgatagccttgcttatctttttggttattgtggtaaaaaatgtgtaacataaaatttaccatcttaacccttttttaagtgtgctgttcaatagtactacgtatattcacctcattgtacaacagatctccagaactcctcatcttccccagctgaagctctgtacctattaaacactcactcttttccctgctcccccagcgccttgcttccaccattcttctttccgcctctatgaatttgactacttaggctgggctcggtgcctcatacctgtagtccccacactttgggaggtcgaggcgagaggatcctttgagcccaggagttcgagaccagcctgggcaatatagtgaaacccctgtctctacaaaaaatacaaaaattagccaggtgtggtggtgcatgcctctagtcccaactacccgagagactgagatgggaggatggctggagcccgaagccatgattgcaccactgcactccagcctgggccacagagtgagaccgtgtctcaagaaaaaaaaaaaaaaaaaaaagaatttgactactttggatacctcagataagtgttttttatctgagtgttttatcatacagtgttttttatgactagagtaatgtcctcaaggttcatccatgttgtggcatatgacaggatttccttcctttttaaggctgagaaatattccatggtatatatgtaccacactttgcatattttgtttatccattcattccttgatggacatttgggttgcttccacctcttggttattacatatagtgctactatgaacatgggcatattaatatatcttcaagaccttgctttctattcttttggataaatatccagaagtgggattgctggatcatgtggtagttttatttttaattttttgaggaaccaccgtactgtttttcatagcagctgcaccattttatagtcccaccaagagtgcacaagggttccaatctccacatgcttttttcttttcttgagacggagtcttgctctgtcacccaggctggagtgcagtggcactgtctcggctcactgcaacctccaactcccaagttcaagcaattcttctgcctcagcctccccagtagctgggattacaggtgtgcgccaccattcccggctaatttttgtatttttagtagaaacagggtttcactatgtttgccaggctggtctccaactcctgacctcaagtgatccactttccttggcctcccaaagtgctgggattacaggcatgagccactatgcccagcccaaactctacatccttgctaacactgattattttctgggtttttaaatagtaaccatcctaatgagtgtgaggtgatctcttactaatctacagtattgctcaactttattttatctattttattttattttattttattttattttattttattttattttatttttgagacagagtttcactcttattgcccaggctggagtgcagtggtgcgatcttggctcactgcaacctccacctcttgggttcaagcgattctcctgcctcagcctcccgagtagcttgggattacaagcatgtgccaccacgaccagctaatttttgtattttcagtagagacggggtttctccatgttggtcaggctggtctcaaactcctggcctcaggtgatctgcccgcctcggcctcccaaagtgctgggattataggtgtgagccgctgcgctcggccactgctcatctttaacgacagagtgtgggtgttggaattgccttgaaagaccatctgatctggtccctgaattgaacatttttcaagagcttgaggcccttgtaacttgtctaaggtgtccagccggtctacgtgaggaggtgtactggggagataagcagggggccatccctgctgtctcctgtaggagacccaaggctcttggtccagtgcccttgccaaacatagtgcttggcctcccagccatgatacgcagaccaacccatatatatccgcctggcctcctgcctcctcctccctctccaaacctggaggctttccattcttaaaacaaataaaagaaaccacctaccctgttagggccagggagggagacacaatcctaaacctttttgcaagtcctcagtttcaattgcaagtaaagtagctttcaaatagccagtcctggttcctgcagtcctcttagcactaactagtggaatactgtctgaaccccagtttactcattcacaaaatgagaataaaaatagcccctaccttactgggttgttaagatgattaaaagagaaaatacatggagagcacttagcctagcacacaatcagtccttaatagatgttaaccaaagacattggtaggagagccaggattgattgtcttgggactagaactcaggtctcctgactcccggtccagggctcttcctacaggagtacacttgcttctcctagctgagagattgaggaaggtgtgtgggggtaaggcagtgcacagagaaataaaaagcctcttgcaggccagcattcagaggtttaggggccacagtcttaattcagagcctgttcagaaggagagttgctgtggctgaggcccaaagcccttggagatagaaaccaaacaaactctctaatctccccagcctcggccccagccctgtggagcccaactcttcacagctgagacaacagagaaactggactgaaggcaaaggggccagggattgcaatttgaggggggattgcaaaggatttctggggtgtcaggcagcccagggcagctcagctgtgtgggtccccattacccttccccacccacctccaggaaaacagaaaaggtagggccagactgagagtctcccaaccggcagaaaccctctccatctccctggttctgggtggcaggaaggggggttgtgttgtttgaagaatcatgggcttggtttggttccaaggttcttggaggaaaggtggctggcgtgctcactccctgctgattctatttcctcctcgagcccctgatctcagactacctgttgaacctcaatgcccgccctttggggcactgaaattcctgggttctgttttcacctcgtagcactgggaagtcttccagaaggtgacagaggtcttcatcctagtgcctgcgctgctggggctcaaagggaacctggaaatgaccctggcatcaaggctttccactgcagtgagtatcctggctgggaggagtggggcacagagaggactctgggcagcacagagccagagactgggagagggctacgagcccttctccactgcccaggcctggagtgtggggctggggtgggaagggagggcctggctgggcaggtgtagggagatcccaggctgggtgtcctgctcctgggcaggggctccctgcccaaagtggttcccaggcttggtttctggatgtcccagccacccctggactcctgccccaccccctacctctcaaccacctcgtgactgtttgtgcagctttgacaggcaggcatcatgctggttcctccacccgcacagatgggggcctcctctgatctccagcccctgctttgcagctgggcgggagcagagccaggccctcccagcacccccagccccccggccatcccattccctttacccatggcagcttgctcttcttta

SEQ ID NO: 4674 - DNA, 6000 bp, Homo sapiens
ttgcatcctggctcttgcaagataaagtttgctcatctttggcttgtgacccactgtggggttgctgcccctattagctcctacctgcatctatgtaagagactgtccatcattaaccctttccaggtaggcatgccctcacactctgggaagtctaaaatttcacgtgaggcccagaaaaagcctgagctgcccgttccaagtgcctaatccctgtttattggctgtttctctttggtgagatcttaacagtcctactgcgtgcagggaatgttccaaatgctatattatcctaatcctctcatcatctgtgaaggctaatgcaactccatcttggatgctaatccaccatgttgacttctgattaactccagttctggaaatgcctctaagatttctattttatctactattccttggtaagaccatatacttatcataaatcctgctcttaggttaaaacaactgaccataaatcctgcccttagggaacttcacatagcattctcgcctttccctacaattgtcctacacattccttccctgtaaggtataggtattccttccttataaggtattcaagccctggtcttactgctgtccgggatatagacagggcttctgttcgcaagtccctattaaatgcttctttcaagaaaccagatttgtcagcctctttggcctctgagctttctcagactttgggggtaggtttgcatagaactgctcaccatggaacatatattgcagaaagggaattatgtctccatttgatagacatggcccaaggtcatgtgcctaatgaattgctgagccattcatggattcaaatccatgtgattacaatgctgtggcatattccactctgcagcactgcctctcaaagattacttttctatccccagttatagttcaccagaccattttgtttgctgtcaaggcttcccagctatactcagtaaattcagagctgcagctccaaatacctggaaccatcctgcctaagggaatcccagggtgggtatccagggggctttggggaaagggagctcagttatagagaagcaaagggaatgatgacagtgctgagcacagatggccacacttccctatcccacccccatcactacatcctcctaaaactgaatgaagccggaaggggatgtcacctcagctctgggcagcaggaaagaagttgacctctgggagggagggagcagcggaggggtcacagcaaggggaaaaatgggagggggcaccctcccccacagaacaaaagatagaaaagtttccagccacgtcaggctagtcttacaactagccatgctggttagggggtccaggatctatggggctctggaattttatgatgtctcaagatgagtattcaggtagtctatggagaagccattggtagacagtacttggcccagaaggaaggccatggggctaagagaacctcaggatagaggctaaattaaccacatattaggacaagtgccaagcaagactgaagaatgctgccccacagaggaccttcccacacaggctcctccacaggcccctgcctgtggagtgatcaacaattccttttgccacaacactctttcccaccccacacccaacatatgctcatattctaaatgaaaacactgtgcttgctatacaaatgatgtttcatgacaagtcacccagcctctctccaactagatggcgtccccaagctcagtttatataaaaatttggggtgctactactagcttctagttaaatgccacattatgttctgaaagacatgaggaggggatgctgtgagtttgttagggtggtgcaaggggaaatttctgtctcccagagtaacaggaatcagtgagactcttgaccagagctggtcaaggatgctggagagaaacacagcaagagaaaaacgctgtagaatgcaacaggcctatgaaaacagtgcatggagaagaggctgattcggtggtcttccatattcaggatggacattacaggccatgaggaagttaaagctgattttaaaaaaagagttgcccaatgcaggttaggaataagaccctccaaccaaagtttcagggaacctcctttggagaaagaaatgtgtttctaggtgtggaagagctctcttggctaacaagctcaaagactgggcatgtcttgaggcaagagagagtccacatgacctttggaggttcttgtcatacaaaggtccacagtgatgctcagagaccctcactatctttttgatacccccaactgcgtctctccttctgaagtatctggctggcctgctacttgctggtagttcctgtcttttcatctgtgacctccgctccctacatctgtgctcatcatttcacagactgtagctatttctgctctttcagtagagaagggccaggatgtcttcctcttcctaaggtcacagctggctaagccagaggaaatctgcttcccccaggtcctcttggtgtttgactctagggatcagcacaatacagagcaaagtacctacatcagctttatccacctcatccatcattcattcaacatatttattaagtacctactatgtgccaggagctgggtttacactagtgatcaaaatagatatagagattatattcttgttccagtggccctgacacttcagaagacaccaaaaccaagggcttttgtatttatttactcatagaaatatttgcaatacctataaccaacaaaggactcgtatctgatattcataaagaactcctacaaagtggtaagacagggctgggctcagtggttcacacctataatcccagcactttgggaggccaaggcgggcggatcacttgaggtcaggagttagagaccagcctggccaacatggtgaaacgctgtctctatcaaaaatacaaaaattagcctgtcatggtggcatgtgcctgtagtcccagctactcaggagactgaggcaggagaatcacttgaacccaagaggttccagcctaggcaacagagcaagataccatctcaaaaaaaaaaaaaaaaagtagtaagacagaaggaatagaataatagaaaatggacatgatacttgaacagatatccaagggtcaaataaatgcatggaaaggtggtcaacttcattggttatcaggataaagcaaatttaaactacaataccactatacacccaccagaatggctaaattttttaatttttctagattgacaatatcaagtgttaatgagaatatagagcaactggaacactaagacgctgctggcaggagtgtaaattaatatgagcactttgaaaaattgtttagtcgcatttgctaaagctaaaaatatgcatatccttttatgacccagtaattctattcctaggtatatatctagtataaatatgaacgtaagtgtaccaaaggacatgaacaaaaacgttatcgcagccttattcataataaccccaaagtaggaacaaccaaaatgtccgtcaacagaataacagataaattgtggtatatttatttaatggcataccgtacggcaatgaaaacaaataagctactgctaccacaatgttttggatgagtttcataaacatagtattgagtgagagaagccagacacaaaataatacctactgaatggttccatgtatataaagttcagaagtaagcaaaactaacctgtagtgttagataaacgttacttttgagaaggagtgtggcatagtcaccaggagcggatagaaggagggtatctgggatgccaataatgatctcgttctagatctggatggtggtcatatgggggtgttcactgtgtcatcatttgttgacctgtacacttaggtttcgtgttcctttcctaaatgcctggtatatttcaattaaaaaaatacacacaggagaggggaacagttttcgagtaagtaaaaacacggaaggtagaaaggaaataggagagagatcaagattttatacacaggtagctgagctgtggccagattaaatggggtagtggaggggagggaactgttgaatagaacagggcagaagttgcctccagcccaaccaaagttcctccagatacatcagccttaattccccacccaaccccacaccccgtattcacaaacctcatctttctggacaagtcccagcatttcctagactagcagctacttctcctggcagaaaaacccagtatttgaggccaaaactggggtctgagacactgatattttgctctagtaggtcctgtgagtctgcaggcccttgatgcaaatgctccagagctgatctggaatcatcctgggggtactggtttggggtgggtgaggggaacagggtttggtatgtgtatttgtcatccttatcaaaaggaatgacctgctcaggttgctgtgtgtgctcttgtgagcacgtgcccaaagcttcatacacagcactgcgatctcttctccccaggcacatctccgctccaaaccctattcaggggtctagagccatgttcgaatgcccccgggctactttcagggaggaaaaggacaggaaggaaccgttggtcacaggttccactgacaagaggggaaaacttgggagtgggggttcctttatgagggaggtcacaccccctgcacaaaaacatcccaaagagaactggcattgagcttgtgttggagaggtggagataccccagggaggaagtggcgaaaggtgagcatgggaacacccctctttgatcccacaaggtgcgtcagggaaagttggatttcatttagtccgggatggtgacatctctccgcacgctgccaccaggctcagtgggtcagaggaagtgaggctcccctcctctccgacctcaggtgatgcgtgtgcgaccccagccatgggtctgacctcctttcgctcccgcccgccagtctccacccctttcaaggccgggacttttttaaggccggattcgtcaggggtgagccatttgctcaaggaacgcggaatctggagggagcctaaagtgacgagccggcgggagaagagcaaggtagggactgttctgtccgggtaccaagtgggaggagggagcacgcggctggctgcttgagcccgggggtcagaggtggctggctggctggctccacagggacgtttaccggtcttcccgaaggccagaggctccaaggaaacatccagaggcaggagaggacgcgcactgtcgcacacgcctctcaaagtctgctggggctccgacgcggcgcagcgggcccgggggcggtagcaccacgcagcgagcccgggcagcgggcccctcggaccccgggccgatgggcgctgggacccgcgcgctccaggcgcatggagccggctcccggttcccgtcactcctcctactgcgtttccccggcgccccgcctcctgggcacgaagcgaaggaagggggccgggccgaggttgatcccgccccctccccagtccctgattggctgctgctgttgtccatccgagaatctatttttgatggagcggggggggtgccacccagtctgccccagatcacgtttgccaccggcagccaaccagttgggcccgagtccgcgggcaagaagcgattgggggcgcgtgagctcggctccccggtcccccgtccgggtgcccccccgccgggcccgaagcgatatatcctgccctccccggccacctcccccgcgtggaagcggagcggcggcctcgctgtaacgcagaagcgaaatgtagcgagccgggtgtcgcggctggacgctcgccttggctgggggtgtgggggggcacgccgggggccaaggaggactgtcgaggaggagtgatgagaagagggggtgccctgcaccccccgagaccacgggccacgctgccacttgccaggcgccccccttcctcccaggcgaggggcaggtcagtcctgtggggtcctggggcggggagggggtggtggagggcggca

SEQ ID NO: 4675 - DNA, 6000 bp, Homo sapiens
gtgtctctgcaggtgttgggggcaatctggtggcagtgcaggccagccgcatctccaccttcctgcacatgaatggaatgcccggagagaactctgagcaagctcctcgccgctgtcccagtccttgtaccaccttcttcagccctggtaacggcagattcccagcctcccagccctggggggagtgggcctactgtcagtgagcttcacttaagagacagctggggccccagatccacaggttctccttctctgctgggctgtgccagctgttctgaagggcagagcccaggcaggagggctgtcttttcctggagcaccctaggggttggagaccacaggatgcagaagtagagacattcatctgtctgttgccctggggtatggtgccgtccctcctgactttgaaaggccttctggggccaggtcttctcctcccctcctctttacaccctcttttccccaattccagatgtgaattctcgctcagcccgggtcctcttcctcctcgtggtcccaggacacctggtgttcctctacaccatcagctgtatgcagggcgggcacaccaccctcacactcatcttcatcatcttctatatgacagctgcactgctccaggtacaaagtggcaggagcaggggcatgggaaggagccaggatgccctgcagggatgggagaggaggccagacttggcctcttagacactcaacctcctctttctctgtgtcagggcagctgataaacaccagacaagggtgcaggagaacagatggtagttccagtagagtcaccaacatggtgtgtgactttgaccctgttcttttactaccctgatcctcagcgatacagttgtaaattgagaggaatggaccaggggtggtagttttcatgcaggtggttgtaggatgctgagcctgtggggtttgcatgccaaccccactggccacagagctccacatggctctgttttgcatgttgagctttctcaagaaattcatttgcataaagcatcccatagcttgaaaaactgtcaaaaccactgcactagataatctgtcggatcctgtgtagccttgccattccataataccatgacactttctcccttcttgtattattacattgtaaaagctttttattttgaaatcattacagatttgtaagaagttctcaaaaaaaaggttcagaaatcccatataccattacccaatttccctccatgggaaaataacattttgcataactttaggacagtatcaaaatcaggaaattagcattgatgcaatctgcagtgcttattcagattgaaccagttttacatgcactcgtgtgtgtgtgtgcgtgtgtgttcgttctatgcagtttttatcacaagtggagatttgtgtgaccaccactataaccaaaatacagaaaactgtttcatcaccacaaggctcccttatgctatccctttacagctagatccacccttattattacattttaaatttttataggtttgatttttgaatagtcacatagttcaaaaatgttttaaggttcatagagaaacctcagtgaaaagtcttcttttctgtcctcttcttcacagccatctgtttctctccttcacagaccatcagtattatccctttcttgtgtgtccttcaaacctattctatatttataaaagtaaacatatatttttcttatttccttcctcttttttacacacatgtagtatactgtacacactgtctgcaccctgcatttttcatttaagtttatctttgagatcattccatatcaatacataaagagaacaacaccctgattttcttacagctccatcatattctgtgatacacagaccataattttatttcgccagtcctgtattgattaacacctatccctccagccccctcacccccagctttagaaaggttgtgttcggacatcttggcaggggcggggctgagaatcagccatatgctgttgccctgcagcagttagccaagctgccacattccattgctagtgggttccagtgcagcacgtggtgggaagatgggggtggatatgccaggggtctgtggtggaggttttcagctcatcccttggcctgaattggaaaggatgagcctcagtgccatcacccatgatgaataccctggagacattcttgcctctgctgtcctctctagatctgtggagggccagagcgtgacacttgatcccctgtaaaggctcttattgatccctttgccacctcctcccagctgtgtgtcctggggcctgctcaagaagctggaatgtgaggacagctgctaccattcccttcctagggcatgtcccaaaggcctcctggccatgctctttatttgggacccttctgcagctgctggaaagggtgtgaagttatggaaggtaggggagccaaggccgtggtagcacaagacagctgtgtgcagagcaagggagaatgtgaagagtcatctctggcttccttggagagagggcaggattctctcaggcagagcctaaaatttaaaaaaaaaaaaagagagaggacaggagagcaaccaagattgcctaaaaataggtatcagttctggcttctggatcccttaagggctgtggttcccgcatctggatcccttagggcagaattttcataccacagtatttacaaagtatagtcaagggtaaaacctcccagatgactgactgtattagagcttgaccgtcagaatctgtttcattctcacgcagatgcagtcatttagggagcccaaatgtcaggcactgtgcagattctaggagattcaggcctgccccaccgtggtattctagatcaagggcatcgccaacttaaaagcgcatgtaaatcttgttaaatgcggactctgactcaagaggtccagagattttgcatttctaacaagcacccagctgttgttgatgctgctggtcctgggcccactagcgagattctgatctgagtcattcttaattatctgtattaatagaaggtaagcaagaacacagataaaatcaaagccacagatcatgtcaaatgtattttgaattggtatgcattgtctgctttatattaatattgaggtgacttattcacaattcaactttattaggactaatgttaaaataaacttgcattctttgagcccaaacaatggaaaagaatggaatgaaaagccacaacaacagaatgaaaagggtcaggaggaagccagcttgggatgatcatctgttacttaagacaaccgccagcagcagcttcaaacactatccttataccactctgccgagagaagacatccctttaggaaaagctgactccagcagccagccccctgccatgctcctggaaaggccaacatggcaggaattggagtgaccccagaatgaggtgacccagagttagaggcaagagggctgagtttctgcaacaagtaggatttaggtcaggaagctccttgtttggtaaacttgggagcagaatataatgctgatgtgggtgaccctgggtcgtagcagcatcttcctttctaaagagctcttattgtgcctgttgtctgctcaaagtggtaattgtggggtggagaaacacagagaggttgctggggtggaaagaggaagattaaaaagtaaggattatggccagccaagccctgtgatgcactgaatgggtctgatcatgtggcctctggctccccctggagagagaggatggctataggctgggcccttttgtctccccaggtgctgattctcctgtacatcgcagactggatggtgcactggatgtggggccggggcctggacccggacaacttctccatcccatacttgactgctctgggggacctgcttggcactgggctcctagcactcagcttccatgttctctggctcataggggaccgagacacggatgtcggggactagcttggtcactcaacattttccccatccctctgcactttctatttgaaatttttcttttgttcccctgtccctcctccaccccacactcccacctctttctaggacttcactttgataccaaattctcattattttcaatgggaatttttatacattgagccaagtttgtatagcaagaatttgggaaacacagatggcctgagataagcagtacaagtaggtttttgagacaatcaccaagtgcagtttcatggtgggtgcctccaggtgatgtggactggagcaggggagttttgtctggaatctggggacatggggtttggctttagcaacctgtcttggccctaatgagaaaccctttgtaagtgggctctggatttttggttttgttttctttttatctgttttgttttatttttggttttggttgaacagagggacagaagaataagtaacactcccaaacacagacatacttttgtagaagtggaccaacttcaaagctctggacaggagacacctgctccaggcccctgtgatcccagttctgttctcttgccctctggacctaagcgttcccactcgcagaaagagtaaggtggactgacttttcaatttgtgcacatgcctcttgttcaatggcctggtcaacatcaacaacccctccctctgatcatttccagttgattgtcatatccaggaaaaaatggaacagtgcactcttctccctgttgacccatgtccacctattggttccccaaaatccacattctccctgggcccaaatgactttgtctccctgggcccagattctttgtctctcttcaaccttcatctcaaattgtctctaagcactaccttccccagagcttgccaggttgggttttgagattagggtcaggtcatgggtatgtggagaatggtttggaggttgaggacaaccacaggtgtctcattgctgccatttctcctgaggacataatcacttggtcaccttggaccctgtcacttcctaaaattactcgttctgtcatgccatagaggtcagttttcctctttcttggcttctacccacaaacattcaccaatcatttattcgttcatttagcaaatatgcagcctccgcaagatgagctctcctgcagacaagcatggtctgaaacattctttgagcaatatttattgagtgcctactatgtgttaggtactgtgccaggcactgataagccagtggtaagggaaacacagctctaacctcacctcattctccaggttacaaaggccatgtgcccctttgaatctggcagagaaagtttcctcgttgtaagtatttgcatctacttcaagccagattcttctgcctctttctcctttccagacccctactctgtgcagtgctgaccacagctagagccaccgccccattgctcaaccagtatttatttccctaaacgacccttcctcacattcccttccctccacctctccttaccaagcacccaaaagaggatttagaactagcagggtggacatcatctggttgtttctacttttctctgcctagcacaaaattgggagaaaactggagcctccatccgcagtcacacgtgtacagatctggggatttggatgtaggctttttctaacttctctctcagaagcttctacagaaacccttccatctgtagcctcaagggcccacctccaagggaaggcttaggcaatgatcctgtttctaccaacactgcaccttatcccaggaacctgccctagacctccagagaccatattttctctccctccatttctacccagacctccaggcctccttctggaatcatagaaccgtagaattggaaggaattttagaggttttctagttggagttgtgtccaacagaattcattaacaccagcctgggcttgtttttcctcctccctctggacttttttcatcttttcctccacctcaaaaaatacttacacacagattcttcttgtacaggcatcaaaaccaactcctctgcccctaaggctgtgtcc

SEQ ID NO: 4676 - DNA, 6000 bp, Homo sapiens
aattttgtgggagattatggattagacaaaagctaagaggagaagtttatagacttataaaacctaaaaagccttgtaaaaaaaaaacgtattagtgaagataatgaatgagaaattaggggcttagtaagaataacaaaggaatttccagtttaggcatcctagacgtgagggctaaataattctagaatagcagtcttcatactggagtacacacacctccaagtagtatacaaaaacttttgagggagttctgggcgctaatagtattaagagagccaatttctctaatgttctctttcttaaaattgaactgcctctgttttcaatcactcttctcccacttcatagaaagaacacatacctgtcattcatcccagatctttccacgctacaatgctcaggggtataaaaatataagggttctaaactaagggacaaaaggggcttttccataagaaccaaagagcaaaaagaaagagcatctaggtaaaattcaatgaagggggctgatcttgtttcagtcacaccacaaacacaagtatggctctgtgacttaactctgtttctgtctaataatgagaactaaaaaatatgatagatcattgtgataaggacatattcaacaactttatctgaatttaaaaacaaagtcagactttttctgacagaaaatttagtctatcttggtccactggctttacaatgcagactggcttttgccagttaggctgtttggtagacattcatgcaaactaagtagcgttaacctgcgaatctaaaattttgacaaatatatgcttgaaataagcacacaataaattatatgccagaaattaccttctctgcaactacttaaataagcatttttaggtatcagtttaaaaatgtatgagggggcacagattttcaaaactgttttaggaggtctacatgtaaaaaactttaaagtcactgctacatgttaattagaagctgtggaaaccttttctacagtcattttaccagactttcccaggtagtctgaatgtggcccttccctgaggcagaaggatggaattaaaccagtttccatagttctttcctagccctagaattcatagaaagccaacaggataagaagtaagaaaaggaatttattgctcacttgaaaaaagcaaagctctgggacaagcaccatggtggtgtacaaaagatgaatacatggttcctctaccctcaaaggttttggggcagggtgcagtggctcatgcctgtatctctcagcactttgggaggccaaggcaggagaccacttgagcccaggaatttgagaccagcctgggcaacatagcaagactctgtctctacaaaaaatagaaaaataataaaggatttggaattcagcagggggaataagacacaaacacaaagaactaacaaaaaggctgcatggcagaaatgctgaaaaagagttagcattaaccaggaaagcacatcatatgtctaagaaataaaaagcaaatataatagacatagaacattgactttttttttttccctgagacagtttcactctgttgcccaggctggagtgcagtggcgtgatctcgactcactgcaacctccgcctccagggttcaagcacttctcgggcctcagcctcccaagtagctgggattacagatgtgcaccactacgcctggctaatttttgtactttttggtagagtcaaggtttcggcatgttggccagactagtctctgactcctagacttcatatgatccacccgcctcagcctcccaaagtgctgggattacaggcgttaagccactgcgcacagctgggcattcaacattattgtaaaactatttccaagtgaccctgagggtccaggatactggaccttggatatgagtcagtgatttctctggcctataacttagtcatgtactttgaagttagaaatggcagggaaaggcacttagccattgagagaaccacagtgatcccccagcatctaaaccttggaaccatgtacacattaaggctctagacattatcttcacaaagaatggctcccaagataaagttaactactagtgctgttaatgaaagtgagcagaaagaggggcattaaaaaagtaatggttctcaccagaaaacagacattttatgaaggtaaatactcaaaagttcaagatttaaaagtctcaagatttatccctcaagaatgtcaaggatctagtaagcttgaagagaggaaatggagtaaaagggcttcaatgccatgacaagaaaatgggattttaatccacaggccacaagaaactaataaaagaccaaaagagctagattgctagtggagagatgagtgccactgcctgtgtaaggtaaagcctgaaagtgaatacgggcatagaaatggacaggaaggtgactgaccagtggaaaagactaaaaagaacttagtggccaaccgatggtgggaaaacagaagaggtggaaaaggaccgagtttgagccctgtgttgccaaggtggtgaggccatcaatagaaacagggaaactggctggtctgaaggtagtgagttatctcagttgattgttcagtcagttacagattaaactccttgttctattctttcctcccttttcactactgcacttgactagtcgaattaaaaaaaaagaaagaaagaaacaaggaaattgagaaaaggacaaggagtagataccggagcctgactattgttttacaagaaaactatcagaacatggaattgctgctcctaacatcaaagcaaagttcaaaaagtccaaaaacacaacagctaacaccagggctaaaaatgaaagaatactcacctcggtatgaactcagtaccacctgctgagcaaggtcccaaaccttgatgctaagaagcaaaagcaaacagacatttaatcttgacctacactatcaacataaaaacgtgttcaaacaagaacttcctgtaatcaacattccccaagtctttgcctcttggactgctgctatggtctacttacgatggactgcaaaatccctaaggaaaccttatagacatgctaaaataagtcactggattcttagaataagcccaaaatgttacctaatgaggttaacaggataggaaaggcacccacaggaggcttagagacaggagcaatgagaacagggacccaccagatgtctttgctaccactgacagcttgtgtgccagagctcaagacactgactgtagacacaatgtcatcatgctcatacttgcagaacttgctgacaataagtgtctcattctcatctagttcccacaattcaacagcacctgttgggggtagggtaaggaaaacatgagcttggattataccaaggcagtaattcacttctaggattcaaagagccattgtcactaaattaacaaagtaagttagttattcctgtaaaagcaaagtccacatcattggagagttcagctaatttctgagtctttgactttattctgcgttactgttttcctaatgacagcccagacaagtaggtgcagaaagcttccagaaaaagacaaagatggaacagtctgtaaaattcattatctgcttttagtgagagaatatggaaaatgagctgcaaggggacaaggatgaagtttccacaactgtttaagcagcacactatccagtgatgttaacacttccccaatatttggacactagtaagtatttgctgaactagttgaataaatgtcttgcagagtctttaaaaatatgttgaataattgaacgtcttgcacagtgactggttaagtatagagaatccgccaaaagttgtcttgattatgtagtgttcaagctcaactgtcagagaggttaaatctatcaaaaactgggactttaaacttccatgcaatgccggccaacttccaaattctgattttaaaaaaaaaaaaagccaaagcctgcatcgctaagcctaacagtcaacaaaaagaaagcagaatgaagacaagaaagcggtaagaaatgggaagagacatgtagcacagattggcttcaatgtcatcttaaaatcaagattatgcttggtctgggctgtgggggttaaggggcaggttacacagaagaaaaatggttccaatccgttgcttaattttgttacggatttttctaggaaatctcaccagacaatttagaattttagaaaaggtatttcccacctacacaagagtttgcattcggggccaacactctcaggctcctccaagcactgagtataggacgttagatattgagctcaaccctacggtaccccaagtctccattctaccgttccacccgggggtgggggtggataatgggatagtgactcacctgaatcggaggccactagaatacctctctccccaacccaagtgaggtcagccactccagcctccgtttggactccggcggagcagaagccttcgttgggggcggcacaggggtccttaaaaagccagagggagccggcccagcagcgcccactcaggctggaggccccgaggagaagcgccccatctacggggggtacaagctgtcagcgcgtgaagggtagaagggttcgcctccatggagaccgcacagaacagcgttccggccgggtctggatctgagctcaggaacgcggggcagggctggggacagctcggtgacgcgacccagggtcaggataacatgcagggcggggatgggctgggagggtcagtctccggggaggggcgccctgggccggggtaagggagctcccaggcccgggatctcggctcaccggaccggtaccgcgcagcctccaactgccgttccatgcaggcgggcgcatttgggggaagattccactcccgggccgccgggggcactagggggggtggggtttccttccgcatctccacggttccaactccaacctagactcaaactggacgccggccggagactccgctccggcagcaaaccccacgtggtgcacctctgagcctccgcccctctcccgagggaaccgcaactctacttctcgcgagaattgcttctatggctccatcctgctttccggctgtcgccctcatgcgataggctctcagcgttacttgactcttctcgcgataattttttttaaaaatctcccaaggaaagttgaaggaagagtacaaaattttcatctcgcgagacttgtgagcggccatcttggtcctgccctgacagattctcctatcggggtcacagggacgctaagattgctacctggactttcgttgaccatgctgtcccgggtggtactttccgccgccgccacagcgggtaaggggtatagaccctgctctggactatcagagtgattggaaagaagcgaatctaggggtgacagggaggggagaagggcgcagcgacacgggcctgagaggcgagtggtcagtgcagttcggaagggagcgtggggtcttgagggacgggaaagaggggtacataggcttagtgatagagcctggcgggggtaaggaaagggcaaaccagatttcatttgactttgctgaccttcgccttgtctatctgcagccccctctctgaagaatgcagccttcctaggtccagggtaagtgtgaggataatgctccctttcgtctttgttttcactaccttttatttcccgattcctgcccccacccccttagctttaggtcagaaatttctttccgataattttgggacacttaaaccctctttcagacaagacacttgttcctgtaactgccaggaacgctctcatgtcacctaatgaccaagattttagcaggataagtaacgtattctaactaaactagaaattggttttgctgtcttctatacccgccctactcctttgtgaccttcccttgggaccttatgacatgtagcttccacagcctgaatccgagtagatgacatacccaagaataaattttgttcaataaaacagtaaagcatgt

SEQ ID NO: 4677 - DNA, 6000 bp, Homo sapiens
cttttctttcttgggaggattttaattactggttcaatcttcttactaattataggtctattcagattttctatgtcttcattagttagtctgggtagttgtatgtttctaggaatttatccatttttttctaggttatccagtttgttggtgtatagttgttcatagtagtttcttaagatacttcgtatttctgtggtatcagtcgcaatatttcctttttcagttctgatttatttgagtcttctctcttttttctagtttgtctagctaaaggtttgtcaattttgcttttttttaaaaaaaattgactcttcacttcacaattttttggatatgaaccccaaagcacactcaacaaaagcaaaaatagataaataggattgcatcacactgaaaagtttctgcccaccaaaggaaataatcaacagagtgaagagacaacataaggaatgagggaagatgcttgtaaaccatatatctgataagaggttaatcaccaaaatacataaggaacacaaaaactcagtagcaacaaaacaaataacccaattaaaaaatggacaaaggacaggaatagacatttctcaaaagaagacacacaaatggccaaaaggtatatgaaaaaatgctcaatgtcagtaattataagagaaatgcaaattaaaatgacaacgaaatatcaccttacaccttttaaaatggctttcttcaaaaagacaaaagaaaacaagtattggtgaggctatggagagaagggaactcttataaactgttggtgggaatgtaaattaatacagccattatgggaaaatgtatgcaggtaactgagaaaactaaaaatagaactaccatatgatccagcaaaccaatttctgggaatatatccacaggaaatgaaatcagtatatcaaagagatatctgcactcctatgtttattgcagcactgttcacaatagtcaagttatgaaatcatcctaagtgtcaattgatggatgaatagataaataaaatattatatatacacatatatttatacacacacatgcaatgaaatactcttcagcctcaaaaagaaaagacaatcccgtcatttgcaataacatggataagcctgaaggacattgtgctaagtaaagtaagccaggtatggaaagacaaataccacatgatctcacttacaagtggaacattttaaaaagttgaactcatagaagcggagagcagaatggtgattgctagaagctgtgactatggggaggaatgggaagatgttggtcaaagtgtgcaaggtttcagttagacagggtgaataagatctagggttctaacatacagcgtggtgagtatagttaacaataatgtatgtatacttgaaaactgctcacagagtaaatcttacatgttctcctaaaaaatgttaagtatttggtgtgtcagatatgataattagtttgatttaatcattttacagtgtatccatatatcaaaacatcatgttttacactgtaagcatatataatttctatttgtcacttaaccttaataaaactggaaaatattttagaagaacatagtgacatagaaaagcagcataatgaagtttttaaaatagactttttttaaagaacgatttcaggttcacagcaaatttgaggagaaagtacagaaagtttttaaataccttccccctgtcacacacccacagcttctctccacccacgtcaacatcctgcaccagtggtacattcgttacaaataatgagccaacattgacacatcactatcacccaaagtctatagtttacattggggttaactcttagggttgtgcatccactgagttttgacatatgtataatgatatatatctaccattacagtactatacaaaatcaacccactgccctaaaaatcctctgtgttctgcctgttcatcccatcctctccccaaccattgggaaccagtgatctttaaactatctccatagttttgcctctctcagaccggtttctttcacttagcaatatgttttcaatttccttcatgtctttttgcagcttgatagctcattttatcactgaacggaatattcttttgtatggatgtaccacagtatgtttattcattcagctactgaaggacatcttggcaatcatgaaaaaagttcctataaacatttgtgtgcagatttttgtggggacttaagttttgaactcatccaggtaaatatcaaggagcatgactgatgggttgcatggtaacagtatgattaattttgtaaggaactcaaactgtctaccaaagtgctgtaccattttgcattcccaccagcaatgaatgagagacttcttgctgttccacatcctgccagcatttgatgttgtcagcgtttgggattttattcattctagtaggtgtatagcaatacatcttttttgtcttaatttggaattccctaatgatgtatgatgtggagcatcttttcatgtgctgatttaccatctgtatatcatctctattgatatgtttgttcagctgttttgccaattttttaattgggatcattttcttattgttgagttctaattattcttattttttattacagttcttaatcatgtatatgatttgacatattttctattggtctgtagcttttcttcccattgttttaacagtgtcttttgtagagcagaagttattaatcttaacgaagtccaataccaatttttactttcatggatcatgcctttgatgttgtatctaaaatgtcatttacaaacccaaggtcacctaggttttctcctttttatcttctaagagttttatagttttgcattttatatttaggtctatgatctattttgagttaatttttgtgaaaggtgtaaggtctgtatctatgtatccagcttcttttctttttttctctctttctttcttttttttttttgtgattggatgtctagttgttctagcaccatttgttgaaaaggtgatcttttctccattagatttcttttgctcctttgtcaaagatcacttgactctatgtgtgggtctatcttggcctctctattctgttccattaatctatttgtctgctctttcaccaataccacactgtcttgattactgtaactatagtaagtcttgaagttgggcaatatcagtcctcagactttgttcttctcctttaatattgtgttggctattatgggtcttttgccttttcatataaacttgagaatcagtttgtgatattcacaaaataacctcctgggattctgattggaattactttgaatctatagatgaagttgggaagaactgacatcttaacaatattaaatttttccatccatgaacataaaatatctctctatttatttagttctttgatttctttcatcacagttttgtagtttttctcatatagatattgtacatatttattagatttgtacctaaatatttcatttgagtggtgtgctaatataaatagtattgtggttttaatttcaaattcccattgttcgttgctagtatatagaaaagcagttgacttttgtacattaattttgtatccttcaatcttaccataattgcttattagtaacaggagagtttttttgtcaattgaaatttttctacatcaacagtcatgtcagctgcaaagacagttttcttttaccttttccttcacaatacgtatacttttaatttccttttcttgtctaatttcattagctgggactttcagtatgatgctgaaaaggattgctgagtagagacatacttgccctgttccttattttaacaggaaagcttctagtttctcaccattaagcatggtgttagctgtacgcttttgtaaatgttctttttcaagttgagaaagttcccctctattcatagtttgctgctatacaatatgattttaatataaaaaaagcagtacataaagtagtgtgtacaatttcattccgatttttgtgacaactgtattttgcgttggaaaaaagcctggaagagaatacgttcataattgaaagtcgtcatttttggctggataatggatattttcttctccacatacttctatcttttctaaatttgccccgatgaaaaataatattaggaaaggtgattaggtagtctgaagagaatgcctttcggccgtcgggggcagtggggtggtaaggaaaaagatgagaagcttttaaaatggaaatctatgaagagagaactgatttcgtaattgcatcatcagtgggaaagtaagctctctgaggaccaggtctgactgagagatccccacagcgtaatagataatacattttgtgtctcagcgttgcctatgaaacgccatttattcacttggcatgctgagcatggaaccaggtttctttctttccaagtagttttgctaatttagagaaagagagagacagacatatacatagagagagagagagagagagagagagagagagagagagagagtgtgagagagagagagaaaagtactgaactgggagcggcagggtttgagtcaaaagagaagggtggaggagcgcgtccggtgccccaaggcttccaggcggagcgcgggcgcgaggtgcgggctccggggcggagcgcacgcccgggaggcgggaagtgggcagcagcgcccccgcctggcccctgtgcgccccgacccgacgcctccccgcccgaccaggtgcctcgagagcgcacagctgggagggctctcccggtcgcggcgagactcacgcctgcggtgtgctagggcggcggcgacggtgacgggcgtggggcgcggcgctgcctcggctgccgggtcgttgcggcgagcgcgcgggccggcctggagtcaccgggctgaaccgccgcgcctgcatcgtgccgcacgccgcggaggcgctcgggtacagaccgcgcgggcgcgcacaaagcggcccggggcggccggcgcggcgcagaccctcggtgggcagcgcactccagtcttcccaggctagcggctgcagggagctccggcccgcggcccctccgcctcaagtctgggagctgccggtcccactctgtctttgcctatggggattcgagagtttcccagcggcgcacccaggggcaagagcattgccgtgtgagtagcgccccgggcgtgggtgagcgagccggcgggcgggaggccggagcgccggggtagccctttgcagctgggacactgggcagtctgaggctcggggaagggcggcgcgcgcggtggagctgctcgggaagtttcagtcattctttccctcgccactcgccccaacccgcactgccccgagacgcccaggatagggcactggggacagctgcccggggaagtgggtgagtggcggcgggaagggaggagcgcgggctctgccgcggcgctcgcccccggagggccccggccgcgctcttgctctcgccctgggatctgctcctcacgaatcccctcctctctgtccatgctccccctgcccacccacctgcccgtggcgcctgcgaccgcagtggcatgaggaggtcaccggacgtcagcccccggagactgtccgacatcagcccccagctccggcagctcaagtacttggtggtggacgaggcgattaaggaggatctgaaatggtcgcgctccgtggaggatctcaccagcgggccggtggggctcacgtccatcgaggagcggatcctgcgcatcactggctactatggctaccagccctgggcagcgagctgcaaaagtaagaccccctcacgtcatgtttcccgttcactggtccatcttcttaccattgtcacagcagcctcggggagcgcacgcagtgaggcgtccagccaccccctcccgccctgcctgctgatacagacccaggtttgcaacttcgaggaagaggcccggagacggagttctcctggacctctgaggcgttctgatgcgttctcttacacccct

SEQ ID NO: 4678 - DNA, 6000 bp, Homo sapiens
gggtgtggtggcgcatgtctgtaatcccagctactcgagaggctgaggcaggagaatcgcttgaacccgggaggcggaggttgcggtgagcctagatcacgccattgcactccagcctgaacaacaagagcgaaactccatctcaaaacaaaaccaaaaacaaacaaaaaaaacttttttgttaagttttgccacataaacaattttagagaaaatacctgacaatagttaatgattatttgttgtaggcaataatggtctaagcactttatatatattaacatttaatcctcacaactactctatgaattagctattcttattgtcctcattgtacagatgaagaaatagaggcacagagtggccaagtaacctcaagtcacacacacaagctcaacttttaagtatttaaatatacttcaaatatatttctaaaggagtctttaacagaaaaaagtactgactccatgtactttgctgctgcttttgtgatccctgttgaagtgacttcaagaagtgacaatgatgccaggcatttggttaagtatgatgtggtgagttaaccttaaaatagaaaatttggtcaataagcatttttattttggagccagagagctattttagggacctgctgcctggaaaggatatccttgggacagcagatcccttagttcctaatgaatagctgcatcaccaacacagcttctcctgaccatggtagggccatcagcagggtaactcagcccagcttattaacccttctgttttctttccagctagccacagtgcagcctggccagaatttccacatgttcacaaaggaagaacttgaagaggttatcaaggacatttaaggaatcctgatcctcagaacttctctgggacaatttcagttctaataatgtccttaaattttatttccagctcctgttccttggaaaatctccattgtatgtgcattttttaaatgatgtctgtacataaaggcagttctgaaataaagaaaattttaaaatatttgttaatagactgttctcttctaatagtcttttttttttttttttttttaagagatgaggtctcactatattgcccaggctggtttcaaactcctgggttcaagtgatcttcccgcctctgcctcctgaagtgctaggattataggcgagagccactgtgcccagccattgtaatacagtcttttgtttgaaatgcaaatgttagtgggccaaaaggacagtgttattaatatccctattctatgaagatgtctgttctaaaactgttttagtgatgctctataacagaatcaactatatccattaatcccatggtgttgataaatgaactagtccagctcttcccagtggttaatagatgttaacagcactgtaaatccatttcggccctataatttctggagcaaacgtgtatttttgctgcttttcttataaggagatgctactaattgactatcagaagaacatgttttgaggtcctcctcaaaacattgatgggttggaatcagccatcaacagtgttgtaccagttcttgggtcttgatagacaatttggaaagagatttccttgtttacgaagtgaaggactaagaattaaattaatgaccttggcctcactggcaatcaattacaaatctctatatcagtaagagaattgtaaaattcagaagcagtttacattagactttggaatgaatgatgaactttccccattagagctgccatcatatgattggtggagattgtttaaagaatcattctatctcagcctcaaaaattaccacgggaagatggtatcagtatcactacttaacagatgaagaatctaatgctgtgtgcccatggacacacaaaattaagctgttgggacttgaacagctcaaattttcttgtttcagatcaccagctcttgagtaatagggaaatctggagatttgaaaagtacttgcactgtccacaacatggctaatccatatgtggatgatgcagaattgatttaattcactaacagggaccccataattatttgctgggctctgggtatattgatgtgtaggaagttgtactatatgttaataaattatgactatttggataggctgaattcatactaaatccatactgtagttcaacaaaaaacaacatgtttatatacatttggaaactgcaatgataggaaacatttggaagaaagggattttgccctagaataacacataaggaaagcagagaattagagtatattgttactgaatgttccagagacttctagtgattttaacacttattaagtatagcatgttgatggggagatttgtttctctaaagatcactttgttttattaaatcctaatagaaaatacccttgaaaatcctatctcatttattcctgtaacaaatttattgagcacctacctactatatgccaagaaatgtattagccatcaggcagagagctgttcaaatggtagatatgatctgtgctcctgtgaaacttctagtggggagagccaaacaataaacaatattcctttttaactctaggttaatgcagaaatggataaagcccatgttgcttttgggagaggtgagttgtgtctctgaatcacatgcatttcatagggggaaaaatgcccaaatactaaggagtagctcttagcctatgtccgttcgcctcagcttaagttgttttccctcccactggctgggcagcatatttgtgttttacctggtaaaacagtaaatttcgtaccttctataattggcattcttcaaagaggtagaactttgatttttttgtagaatattaaaacaagctttcttaggttaaagaagtgatcttactacgaacagcaatggtttcatgatgtgtaattgctttatgttatctttctgctatagaatgtttcctggagaaaggtacggtttttagtaataagataaatttactttagtcctgcaaataaggtgaaatcttatgtccagtatctcacaaaggagaactgacagtgccacttttatatttaatgtcaatctcattagacaaaaatgaaatatagttcctagggtttccaatttaaaaagtgaaataataaatatattcactcaaacattttctcagtgccatatgcaagttaccatgtcccagaagctgatacagtttgaagaaggaaatatataagtactgtaagcctgtgataactaaaagcaacatactaaaaagtgaaggtacagataattggaacaaatttaatagcgtttaaaagtgtatttggtaatttctccaggaggtggcactgttgagttgttttttcttttcagacagtaagacaatagaccattcatctttgtgtcacccaaacaaagaaatattcctttataaccccctttcctccccccacctaatcacatgctactggaactgactgtcttgtgatctactcccatagttggcatagatttaaaaataatcttttttaaattaatctgatagtagttatggaaaggaacaaattgttcaccaattttcatcagctttatcttttcagtccagtaactgagaacttaaaaagactattctagtgattttactatcctgctcagatggcattcaaaaacatttttcacttctcacgtcttggaaaaatttgtaaattcgttaagtctttttgtttgaaagttaatgtgactggaaatattttaatgtaaatatcgggttgggtgcattgtatcattttgctctacaatgactatatcctcatttgggtttatggccagtttataattaaaagtaatctttacttgctttgagtgtaatgacttgcatattttgtatctttctatttgctaccttttctactgaacaatttctagctttctgaagggatggagtcagtaagcttaaggattcagaactggttttacctgtgctacgtgttgtagaagttgtgtgtgcagcttctgcggtaaagggaacagcgtaggggttttattttattcattagaggtggatcggggtgctaatttagaggacatcacatactggaaccaaacttgtccgaagctctcactgcagagttaaggcactttggtaaaataaatgtgcatctaggaaatgatcatgtgtacagtaggcattggatcattctcttgcccctcttttacctgcccctaatgcctaagctacattcgaagtcctggaaaacctgtaagtaattccgcctttggcctacctcccctcagaagaggaaggtgagagaggccaaacgtatggaaagactattcttcaggcttgcaggagtcacggatgtcctgatgtctgtctccgtaggatgtggcccacatcagttcgcattcaccttcttgcagcaaggcagctgcttagcagacaatgggcgctccagtgagcggggtttataaaaacccgaagccccggttcatgatggagcccccttttccagctgagcaagctcagggatttcctgggtaggtttttccaggctctgcctcaccgaaggaattttaggagtgtctctggggaacaggagggacgtaacccagccccaacttgagggcgctagaggtgcggcaaggggtcgcgacgccaggagcccggggctcggcgggaaggtatgagaagctcctacgtgaactccacaagccgggcccgggagacgccgggcgaggcggggttgacctcagcagtctctgccccgttccagccaatcagtcccgcatcttagcatccgaatccaggacccccgaagccggaggcgacgcgagccaatgaggagtgggccggggaagagggacaggcggccagcctatggggcggagaggcccggccgcgcgtatccaaggagcgccgcgctcggctcgggggtgtggcgcgcgccggcgggggtgggcgggcgcgccgggcggcaggtgtcggcgtcggcggcattcggcggcgatggagcggccctggggagctgcggacggcctctcgcgctggccccatggcctcggcctcctcctcctcctgcagctgctgccgccgtcgaccctcagccaggaccggctggacgcgccgccgccgcccgctgcgccgctgccgcgctggtctggccccatcggggtgagctgggggctgcgggcggccgcagccgggggcgcgtttccccgcggcggccgttggcgtcgcagcgcgccgggcgaggacgaggagtgcggccgggtccgggacttcgtcgccaagctggccaacaacacgcaccaggtgagcgggcgccgggcccgggagccgctcgggtgcgaggtgccgcccgcgtgcccctcccggcccgtgcgccccgcgactcccggaggagaccccagccctgccgcgcccgcgtcccccgggccgcagccccgaaactgcggcgggcgggcgggcggagtcgggcccgggcggccggcggggctgtgttttgtcataggggaggcaatcttagacttccaccgcattcttttttttttttttaagttgtcaaaatctcttgaacatcgtttttcgtctgtataaataatcaggacccagtaacgctgttaggccccaggaaggtgaaggagtaattaactcttgagcgcttgcagaagttgggctgcgcagaagcaaaggtgtgtcctctctgggtcagtactttccgggtgggagaggcgggagttcaggaggcccgaagcagcgatctggtcaccgtgttttaatagttaaggggactagcttggaaatgagatggcaatatttatgtgatctcttttactgcttcagatttgaccttctgtcatggtacggaagtctgactagcatgtctatatcccgtggtgacaagattttcaatagttaagaaacgcattgcacatattctgctttgagccagctcttggtcaaaagactttcaaaattatgggatttctgtccctggggacaagcagctcaacctttgcacactactggact

SEQ ID NO: 4679 - DNA, 6000 bp, Homo sapiens
tgactatacattgcatgagagaagactcttcatgaaggtttcgctcactctgctcaaccaggaccaagaaggagatcctacagagttcctactccttgatccaaagctgaatggaagaaacagaactcaagagactattaaataagctagacggctgggggtgctagggaaggtaggatgaagagaggccaagtattggaagaaatgaggcagttaggaagttccggggcattaaaggactgaccttcagacttccgggtgttacaaaggtctggcgattcacaacaacaggccgaggtcttcagcggcagctccctgaagcctctgacaggcacactcagtcctgtcagcttggactcaaccctgccagagccagcaaacaaacacacgcattcttcccagagctgacaccccatacaacacggcctctctacagggcctgtttatttaaggaaccagatgctttaaagttggagtagaagttgggaagttatgtttacagaagtagttagtgacaggagcagagggaggacagaaaataagcaagagttcctggctttattcatcataagtttaaaaagttttaaggaaattgtcaaatggtctgtacacaggaatgagaagtaaggaaattatgtcagccaccaccacaactctggccaaggcatttcatctgttcctttaagacagtttcatgcctaccctcaaaggggtgcttacagcagaaatgttttgaagcaatccaacttagtaaccaacaataaagtcttctaggcctgctcaatttcacgcatgtacaaaggttatacatgtcatgaatactccaagcagctgaaggaaagaatcagttaaaaatgtggcatgaaaacagttttgagttccaggcaaaaggaagattattgagtctaagaagagagcatttataaatgatagctaattgctgagtgctaattatgtgccagacattcttctaatgagttattacatatgtatagattatacaacacaatgtgatatgttgtaatacatactataactcattacaaatacaatattacatatgcatatattatgtaatacaaatatatatttatacaataatatacatatacgtatatattatgtatatataatttaacacacactcatttaattctcacaaccaccctacaaattaagtgctcttatcttcactttacagattaggaactgagacacagaaaacttaagtaactcacccaggatcacacagtgacatggccagggttcaaatgcaggcagtccagataaggcagtgctataccaccttaccatggtaagtcaaacccttagaacaaaattagggagcataatttttggaaagttataactatttatctttctccttcgttttcttgtcatcccttttgtttgtttttttagtaatagccagtattttttatttccactttcccatgagtctattatagctaacttgtaatactgtaactagaaaggaaaatgttttcctctcctgcctcaactcctaaaataaagcacttaatcattaggacttctatgtgaaaaaatatatgctgtgtgtaataaacccaatgcactttaaatatattttaaattaatagattgaaaagaaatgatatgagaaaaaaaaccttagagagaaaaagggaggcttgggcaaagagaaaaacctgctggatttcatggacagagaagcctgagtggtcatcaggacaccggtctccttaaaccgtaatataaacgcactattatgctttagctttaccgtgctttcttgagaagacaggttaaatgctaatatatcctcataagccacagacacaggtctagtagtttgctataaccttctgaggcttttcattctccagtctgaatgatcttttctttgtatcttggcaccccagcatctagcacagatctaggcatttggagggcattcacatacattgatgatgtgaattaatgtggcttgaaatgaaacaggaccaagttaaaagaaataagagaaccatgaacttttgctttttcttgggactcgaatcctgtcatgttatgtaggaaaaatgattctacatgtaccttccttccccagttgtacaaagtacaatatctctgataaaaagttgttctgtcatgctgatgcttttatttcacactgttttataaacggtccaaaaatactagatctcttcaatacagttcaggattttttatgacttctaaaaccaaataaataaacagaagaacaggctactacataacaattcttggttaagaagtactacttaaccatttttaaggtaaatgatattaaacaaaggctccactttttttttttttaaccagatacagaaaggatgagatctctgaagaagagaccacggatgactaacaaacgcaaaaacttttttttttttttttttttttttttttttgagatagagtctcactctgtcacccaggctggagtacaacggtgcgatctcggctcgctgcaacctctgcctcctgggttcaagtgatcgtcatgcctcagcctccagaataactggaattacaggcgcatgccaccgcgtctggctaacttttgtatttttagtagagacagggtttcaccatgttggccaggctagtcttgaacttctgacctcaagtgatccacctgccttggcctcccacattgataagattacaggcatgagccaccgtgcccagccaaaatagctattttaaataaggtcactgaaaaaaagactgggagagaaaaactaaaaaaaaattattgcaaacagctaaatgaaagaaatagaagaaaatttctttacatgtggacttcaaagaatgagtggttttaggtctactcttccacagatttggccttagaacccctgagccagttttttcaacctctttctttggaatcaatatattacaaatgacacatcaattcaaactaaccaggaagactctgactcaaggaataaatccaggcagggcatagtggctcacgcctctaatctcagcactgtggcaggctaaggtgggtggagcacttgagcccaggagttcaagaccagcctggggaacatggcaaaaccctgtttcttaaaaaaagaaagaaagaaagaaaagaacaattagctgggtgcatgtaccagtagtcccggctacttgggaggctgaggtgagaggatcacttgagcccaggaggtcagggctgcagtgagctgtgatcacaccactgcattccagcctgggcaacagagtgagaccctatctcaaaaaaaaaatagtaattacacaaaaattagctaggcatagtggtgcacacctgtagtcccagctactcaggaggctgaggtaagactctatctcacaaaaaaagagaaaaagaaaaacaggagtaaatctaaatccaggagtagcagcagacctaaagttaggtcaaccagcgagagaagaatttgaaatatggagcaagaatgctgtgaccagctagctcaaggaaggaagtggtccagtataaattaagcattagtgttgtaaagcctttctcaatcccccactgtgagaaggaagtctattcgatttttttttctcatcaagtaggaagacttcccagtactcattctacccaacctgtctcaccctccagcactagcttggctacctttacacagctgctgctcgggatacactaagcacaattattcctgaatatttgtgtcttgtgtcctcagatcagagaattctattacaggtaacaagtatggtccagataaccaggcagtccaaagggagactgaggcttggctgacgctgaaaaacggttacagaaggacaagtgctggcacagagccttggccacccatctctgcccccaagtgcaattcattttctttgaaagaggaaaacaggcaagggagaaaatatatagaattgaaaatacattatgcaaatgtggctagcaaggattaaattgttaattttagagaaataggagaaagatgcccaagttgtgctgaagcaaggaaccaggactttcttaataattagttttgtcagtccagtagtgtgcaaaggttgagctgcttgtccccagggacagaaatcccataattttgaaagtcttttgaccaagagctggctcaaagcagaatatgtgcaatgcgtttcttaactattgaaaatcttgtcaccacgggatatagacatgctagtcagacttccgtaccatgacagaaggtcaaatctgaagcagtaaaagagatcacataaatattgccatctcatttccaagctagtccccttaactattaaaacacggtgaccagatcgctgcttcgggcctcctgaactcccgcctctcccacccggaaagtactgacccagagaggacacacctttgcttctgcgcagcccaacttctgcaagcgctcaagagttaattactccttcaccttcctggggcctaacagcgttactgggtcctgattatttatacagacgaaaaacgatgttcaagagattttgacaacttaaaaaaaaaaaaaagaatgcggtggaagtctaagattgcctcccctatgacaaaacacagccccgccggccgcccgggcccgactccgcccgcccgcccgccgcagtttcggggctgcggcccgggggacgcgggcgcggcagggctggggtctcctccgggagtcgcggggcgcacgggccgggaggggcacgcgggcggcacctcgcacccgagcggctcccgggcccggcgcccgctcacctggtgcgtgttgttggccagcttggcgacgaagtcccggacccggccgcactcctcgtcctcgcccggcgcgctgcgacgccaacggccgccgcggggaaacgcgcccccggctgcggccgcccgcagcccccagctcaccccgatggggccagaccagcgcggcagcggcgcagcgggcggcggcggcgcgtccagccggtcctggctgagggtcgacggcggcagcagctgcaggaggaggaggaggccgaggccatggggccagcgcgagaggccgtccgcagctccccagggccgctccatcgccgccgaatgccgccgacgccgacacctgccgcccggcgcgcccgcccacccccgccggcgcgcgccacacccccgagccgagcgcggcgctccttggatacgcgcggccgggcctctccgccccataggctggccgcctgtccctcttccccggcccactcctcattggctcgcgtcgcctccggcttcgggggtcctggattcggatgctaagatgcgggactgattggctggaacggggcagagactgctgaggtcaaccccgcctcgcccggcgtctcccgggcccggcttgtggagttcacgtaggagcttctcataccttcccgccgagccccgggctcctggcgtcgcgaccccttgccgcacctctagcgccctcaagttggggctgggttacgtccctcctgttccccagagacactcctaaaattccttcggtgaggcagagcctggaaaaacctacccaggaaatccctgagcttgctcagctggaaaagggggctccatcatgaaccggggcttcgggtttttataaaccccgctcactggagcgcccattgtctgctaagcagctgccttgctgcaagaaggtgaatgcgaactgatgtgggccacatcctacggagacagacatcaggacatccgtgactcctgcaagcctgaagaatagtctttccatacgtttggcctctctcaccttcctcttctgaggggaggtaggccaaaggcggaattacttacaggttttccaggacttcgaatgtagcttaggcattaggggcaggtaaaagaggggcaagagaatgatccaatgcctactgtacacatgatcatttcctagatgcacatttattttaccaaagtgccttaactctgcagtgaga

SEQ ID NO: 4680 - DNA, 6000 bp, Homo sapiens
gggaggctgaggtgggaggatcacttgggcctggggaggtcaaggttgcaagtgagctatgatcatgccactgcattccagtctgggtaacagagtgagaccctatttcaaaatgaaaaaaaaaaaatacagaaagaaagaaagtgcccttggggattaggaattcttacttttggaactcctgacccctaaatggtggatatctgtgataaatcagagagctgtgacagaaatggggggggaaggggaaacagtatttatttaacaactactgtgtactaatgtgtatcattactttcataaccatcctgtgagtgagttatcatttagcagttgaataaactgaggtttatagaaattatgtaagctggcttggtgtgatggctcttgcctataatcccagcactttgggaagctgaggtgggcagacagcttgagctcaggagtttgagaccagcccgggcaacatggtgaaaccccacctctaccaaaagtacaaaaattagccgggcgtggtggctggcgcctgtagtcccagctactttgggagctgaggcaggaggactgcttgagcccaggaggcagaggttgcagtgagccaaaatagcaccattgcactatagcctgggcaacagagtaagacactgtctcaaaaaaaaaaaaaaaaaagaaaaaaaaaagaaaagaaaaattatgtaacctgtcaaaggttataaagttagtaacaaagtaagattataaatctttgttttctgactagagcttattcatcttctttgcacgagaacagtggttctcgaactttggtgggcatgagaatcacctggaagccttataaaacacagactgtggagctccacacacagagtttctgatttactagttctggggtggtgcttaagcatttgcattcccagatgctgctgctgccagtctgagactgcactatgttgtgctgcctaacagtacctgagaatgtaattgattaaggtcacagagctggatgtgactgattaaggtcagagagctttaacgtcatccagccatcttttcagaacagtacttatgatctgacaaagcaactgctgattgataaaaggtggaaagtaattagaaaggtaatacagagaacgataatactttggatacatgatgaagtgtgataacatctatttttctggctggggaatgagataaacaaatagagaactgatcatggtgcatgaagcacctagagaaagaacatttcagttgggtgcaaaatgtaacgttccttgtctagttcagaactatggctactcaaggggagaaggcaggcagacaaaggactgtcaacagcaatgtctcttattgttctttggctacagctgcacttgcatactcatgctgacttcgtgcccaaatgttaactaggccagaacttgatcagactgaaatctgtaaaagaaaaaaaaatcatcacagataccaagaaaatgtatttccttgaatctgttctaactctgaattttgttaaaaaattagatttttttttttttttagtgggaggaaaaggaggacagctcaaaaccacttaattcagaatctgcagtgtaattgttatggtaggctcaaatgtgatttgaacatccctagctatgggatttggtgaccaagctcccaagagaggatgacacagcacagggaatagcacaggcagcttgccttgctttgtagggggcagagatgtgaaagtccttgttgaggtcagtggagctgagagtactcttcataatttaaatggacacgggtaatttccttacatgtaggcaagccagccctagggataggaaggagaaagaaaaacagggagtacagaatgcagatggctgccctctgctaattaggccttacctttatatagaatgcttttgattttttcagacactttcaggtatattaactcatgcacagaggtcaaatattattattattaaacaaagtgcagagaagtattgagaattagctcagttaatgaattagctcaactaggtaatagatgcattaagattagatggggacagtcactctggaatgccaggaaaacaaaacattcagaaataagtatagtaaccacattaatacaatcaagggaacaagcctttccttccaaagtgacggaaattaagtttacttgttggtgtccttacttccatattcattcatttgttcattcatttatcatgtattaaatgcttcctacttgcttatcattctgctcagtgggcctgggggatgtagaaatgagacattatctcttttcatttgttgaggccctacaaggtgccagaaccgttccaggcgttggggatatagtaattaaaaacaaaacaaaacaaaccaaacaagaaatgtataagccagtgtggagtaagtcaattaaaattaacaaagcaaaaggaagtaagtcctataataaaaatgccttgatggatagagggatgggtagatgaccagttatgttttaaagcaagtatatatatagtacgatgttagtgatagagtctaggtggtgggtatactggtgtttgctgtaaaatctttcaactgtgctcgaaaatttttatgataaaatattatggaataaacactataggaatgacaaggaagatgcagatttgagaaaagtttatgaaagacatggcattctttttttttttttaagagacaagtcgatagaggagtgcaatggcatgatcacagctgcaacctcgaactcctgggctcaagtgatcctcctgcctcagcctctggtgtagctgggactacaggtgtgcactaccatgcccagttaatttttgtactttttgtggagatgggggtctcattatgttgcccaggctggtctcaaactcctagcctcaagtgatcctcactcttctgcctcccaaaatgttgggattacaggcatgagccaccccactggcctttggcattcctttatcctcctcctcttctccttaactacctaatatccccatgctaacccttagctgtaggttcaacttccaaattccaatgggctataaagagttctacaaaagtccatgatgactaataaatctatctagtagagaaaagaccttttggagaagaggctaactctaggaccacctaaaactcacccactccatagctatttggtaaggcacccctttaggaaacttcacccaaatgcctgcttctgggtaccaggtagtggccactctccccatctttgtctcctgtctgagctgctaccgagtttgatgttagatggtgacataaaatacagtaattcctagatatatgcggagggactggtcccaggacagcctacatgtaaccaaatccacacatgaagtcccacagtcagtcctgaggaaactgcacaaatattgtgttttccatctgcccttggtttaaaaaaaaagctgcataaaagtgaacctcacagtttgaaccagtgttgttcaagtgtcaactttaatttaaaagtgaaaaaagtttgttttctctggtatccttttttttgttttgttttgtttttgtttttgttttttgacacaggctctggctctgctgaccaggctggagtgcagtggggagatcatggctcactgcagcctcgatttccctggcttgagagaaaattatttttttcaaaataatcttcaatttaaggtaatttactaagtttcaaaagataatgctattgacgtaaattctgttttagattgtaggccccatcagctcattgatactagtcccaagttcacaggagaagagactggaagttactaggctagtcctgcctctctcaggtgtgtcccagcaaaacttttctttccagtttcagcgctttagaaaccttttctcttcaaacactaatacagggcctagactgtaccagcactgttctgagaactttacatacactaattcatttaattctcacaaaaatcctgggatgtaattgccattattattcccatttaacagataagaacactgaagcacagagagattaagtaacttgctcagggacctggatgtgaatgcagaaatctggctccagaggtggagtctgaaactgcctttctaagtgactgattgccaatctctggaaaaccgttcaattgaagatattaatggatcaaaatgtcagtatgttttcagataccctaactccataggaagctcagtgtatgggatgagatactgtggtttagaagggaattgcttttccaacggagggcacccttcagataagcccctcaaattgcccttcactagagagtcgcacgaggacaggcctgctaaaaaggatggcgctggggggtttccaagacaggaaatatctaaagccagcggctgacatattatcttggcgaacgggagaagggaaaaagaaccctcattttttggaaacacaagtttttagcctggataatgggtaaatgacattaactcttcgttccacactaatctttcaagcttgttcaaattttgcttctcaaacctgggccattccttcttatctaatctgcctattatttccttcaagctttttatcccttctgaaaataggtggtagcataccaaattaaaatacagaacagcctgtttctttcccccagggtccactagggcgcgtcggagaaagggttaaccgggcgggtgggagggaaggtcgggctcacacctttcgcagagacctcgggcggcggcggggcccgggaggggcggaggctggggccagacgcctcgccgcctccgcctcggcgaatagcagcgcgctgcccgcccggattggagcagcagcatcacgctgacctctgcctgggatgtaaaccggaccagccgctgcgggcaaaggaaggctcttggctccttcgggaaacccagccccgtcaccgggctccgagcggctcgcaggcgagcgacagcggcctcagccccggcagcgcccagcggcggctgcggaaagcggagggagtccgacgcgggcgcgggcggggagcgtgcgtccgttcgcacaggcagcgggaggaggggcggcgcgaaccatggccggggacagcgagcagaccctgcagaaccaccagcagcccaacggcggcgagcccttccttataggcgtcagcgggggaacagctagcggcaaggtacggcggggcccggagccgcgctcccttcccggcttctgtccctgggcggcgcatgtggccggcggccgcgggccgtgtcagttgcggcagccaccgcgtggcccgcgcgcctccgctcccggccgcgctccagcgccgagtgcgccccgcgcggcctgggggcgctgcggcgggggcaggcgaagactcgggccttgggggttccgggggtacgcggccacgatcgcagggcgggagtgctcctccggcttttctccccccgcgttaataactcgtggccggggtcctatgggggaagggcagggaagcggatgcttattgttttgcaactccagtgtcgggggagagggctttccgcaggatcccccactaacccccgatggactccctcaagccccggtctggcacagacgtgctcgccccgcggcgcagcctggtgccgagggcggagcgagccgggaagcgcggccgagagggcgagggtggcgggaacgcgcgaggcggcatcccggggaaggggagcccagtgtggggctgcacgcaagggctggggattacaggggtttccgggtaaaagtctgagagccaaataggtgccgtgacatcaatgaaacgataatagtaggggcttctgttttttaaggttataagaggaaacgtggtcggcttcaatgagaaagttgtactggctccaagctcttcggtgtccaggacgtacgcgtcttggatccacggaagggggtcatcgtatgggtgtctgaccctcttaggagcctgtttcctttgttttatccgcaaggcaaggagagac

SEQ ID NO: 4681 - DNA, 6000 bp, Homo sapiens
ctctcaatccctccttcctttccctcactgtttccctttaattctctctcaatactcttacagtttcagagatcttatccttactttatcttaacctaggatctctggatggattcaaatagagcttcttaaattaaaggaaacataatgtgtatatttgcatcctttcttgggagaaggcccaaaggtttttatcagaggtttgaaacctcaaccgtgttggtgcctcctaaattgtgtcttttgtcaagacctgtcttctgagttccagggccatgtgtctcactgcctactggaaatcttcacctgaaaccttcacagctacctcaaactcaataacatcaaaagctgaaatcattgtctctccctcccaaagcctgctcatcttcccatttttcttttgtccatgaaagctactgccatcctccttatcacccaaattagaaatccgagcatcacccagacctctcccccttcatcacccctcagccaatcactcaccaagtcttgtccatccttccttcctaacttctctcctggatgcttccattgcatatccactttttaaacagagtggctcttgtctcaactagactgttgaaataatcttccaacttttccctccaccttccatctctctcccctctaactcattccttggactgctgtcagagtacttttcataaaatataaaacagatcttgtgattccccagtctaaagcctttttattagttcccattaccttttagaataaaatatgtactgttcatcctgacacacaaaactcttcgtgataaatactaattgagtgcctagtatgtgcctgcccttgtgctaaatgttgagggtacaggggtaaacaaggtgaacagcttccctgctctccaagacctttcagtccacaaatgcaatgagtttacagaggagaagcacaagctcctaaaggagttggggtggggttgggggtcagaacctaatttagaaaattgaggaaggtctcaacctcccatcttgcatttacaatagtaatcagcaggtgtggtaccaaatatggaaccaacaattttatctgcattatctcatttaagccatgagtgccattattgttagcctcactttacagataaggaaactgagggctagaaggttaaataagtggcagagttgggatttcctccagattcctgtgagacccagacatcttaatccttttggaacctgtgcttctcctttgtagtactcactacacttgtggaactacatccaactacacttgtggaactacagccagctctgcaaacatgacagtctacttcactccaagtctttgctcatgctgctcctcttgcctggaatgcctatttctctcaaaaatcttcctgctgaatattttgcgatctaattaaagtgttctctcttccatgtacactcctccctcagatagaattagccactgtcttctttgtgcatacacagcatttcataaatactgtcacagtccctctagcacttcaaatacttatctgatgttctccccctaagaaactgtaagtcctagaggatgacaatcaactgaattccatagtcagaaacttctgctgtgcctggccttccaatgagaaaaggagagaagaggaggggaaggaagaaaaagggaaggagaagaaagaaaagcaaacatgaagataaacacttcaatatatgatatcccaagaccatctacccttttgtaaaaattttgctttttttttttcccccccaagagtcagggtctcactctgtcgcccaggctagagtgcagtgccatgaacataactcactgtagcctctaactccggggctcaagcaatcctcctgcctcagcctcctgggtagctgggactacaggcatgcaccaccacatctggctattattattattactatattagtagagatggggtctttctatgttgcctaggctggtctcaaattcctggcctcaagcaattcttccacctcacattggccttccaaagtgctgggattacaataagccaccataggccaaaattttgcattttatccattactgtaaaattaacccttagaaatccaacaacactcaatttgagaattgttcaacaaccacttaatgaaaaccccctgaaagcttcccatcctgttgcagtccctttctctcctcctgtgctctctcctcttcttcctatctagcccacccttttggcagctaagaattcctccctccattggagagccacagaccaaagaggagtcaaataagaaaataagacctcaaagaaggaaaacaaagtgaaggccttgcatcagaagtcacgtggcagaaagccacctggatatctgaaaagaagaaagaattgagggatatccgctttttgcctcagagaccatccttagccctgaaggctttgtttctgctttaggtttcccagataagcatccgaagtgctacagcaaggaactttaagtttccagatacttgtctggattttgcaaggcgtagatgagtcacttgagaaggagaactggaatggctgcctgggttcatttccattgtccaatccaagggcctgtggagaaggggctgctgcaagactctgtgtgtggcggggggaggggtgggtacgtggatggcaatgggaggatcaattaactccacccaggagccaaatgaaacacacaaataaaaaacaaaacctgagtagtggtttttaggtcattctggagtagaaagagcattcatttatagcaaaggttggcgggcacctgtgtcagcccctgcctccactccacccctaacaagtatcaggtgcccacacgggcctgctgctcgcctcctgggcttttctaagccaggtgagacctgtcccagatgtccacgaatccactgggggagtggcactatcaagcagagtcatctgattttctgcctgggacctggaccattgtgagagtaaccaacgtggggttacgggggagaatctggagagaagagaagaggttaacaaccctcccacttcctggccacccccctccaccttttctggtaaggagccctggagccccggctcctaggctgacagaccagcccagatccagtggcccggaggggcctgagctaaatccgcaggacctgggtaacacgaggaaggtaaagagttcctgtcctcgcccctccccacccccaccttttctgtgatcttttcagcctttcgctggtgacttgttcttccagggcccatttctctaccctacctgggtttcttctaacctggaaatctaatgatcaaatcacactaaaaagtcagtagctcctgtggattacatatcccaggagcatatagattttgaattttgaattttgaaagaaattctgcgtggagataatattgaggcagagacactgctagtggtctgaagatttgaaaggaccactttctgtgtgcaggcagggcctcagctggagatagatgggtctgggcgaggcaggagagtgacaagttctgaggtgaaatgaaggaagccctcagagaatgctcctcccaccttgaatctcatccccagggtctcactgtcccattcttggtgctgggtggatccaaatccaggagatggggcaagcatcctgggatggctgagggcacactctggcagattctgtgtgtgtcctcagatgctcagccacagacctttgagggagtaaagggggcagacccacccaccttgcctccaggctctttccttcctggtcctgttctatggtggggctcccttgccagacttcagactgagaagtcagatgaagtttcaagaaaaggaaattggtgggtgacagagatgggtggaggggctggggaaaggctgtttacttcctcctgtctagtcggtttggtccctttagggctccggatatctttggtgacttgtccactccagtgtggcatcatgtggcagctgctcctcccaactgctctgctacttctaggtaagtcagggtctccctggttgagggagaagtttgagatgccttgggttcagcagagaccccttttcaggctacgaatgagactcccacgaagggatgggacccctcaccacatctatagctgtggattgagctcctaggacaagccaagatggggctagaaatgaggagaatgctggttccaattggggcatactcatgagtgaggccagtcacttcacccctctgggtcccagaatcactctgtggaaccaaagagcttcgactagatggtccctagggtctgtctctttcagtttgacattccagggttctcctctatgattttcaatttctaccctttcttgtggggatatgggttgaggctctttctgtagcttggttcagggaaattcaacctgtacccttaatttgtgagtttgcacagggagcaaggggtaagggagcagtgttgaaaatagggatttgtgttgacagtggcgcaagaggcatgaacagtggagaccagagagcaggtagcaaggtttccaccagaaacatcctgattcttgggaaaattgggctcctggggcagaggagggcaggggagttttaaactcactctatgttctaatcactctgatctctgcccctactcaatatttgatttatcttttttcttgcagtttcagctggcatgcggactggtgagtcagcttcatggtcttggattgacccagtggggcacatatggggacaaaggccataagatattgggaaatgcttgttgaatgggaaaatgctgatgtggggttagcagggatagttcctccaacacagcagaacttggccctgtgcttctctggccagctttccttaagatactgaacaggccaaaaatggggccaagatgctctaagactgagccaccaagcatgggtttgcaatgagctcattctggctttgaggctccctgggaatggcagtgtagagcctgctcctctccctgtcctcaccccacattatcttggctcctcagaagatctcccaaaggctgtggtgttcctggagcctcaatggtacagggtgctcgagaaggacagtgtgactctgaagtgccagggagcctactcccctgaggacaattccacacagtggtttcacaatgagagcctcatctcaagccaggcctcgagctacttcattgacgctgccacagtcgacgacagtggagagtacaggtgccagacaaacctctccaccctcagtgacccggtgcagctagaagtccatatcggtgagttgatgaaggggaagaggaaaatcaccaataaagggtgaaacaaagggtcctgaaatacttggtaagagccagagatgatattcttagagataaaagctaagatgagatgatgtgtggtcccactgaatggtatcagagttgtagtcctagctctaagtaggtcttgggcaaaatgtcaaagcctgtcagacagtagatataggactgctgcattgcacaattccaagaatccccatatggagtgcatacaatgtgaatgtgtcatgtgaaggttaggccatggcatagatgctcaataatagttatttatatatttattttcattttttttaattttattttttgagacagagtatcactctgtcacccaggctggagtgcaatgcggcaatctcagctcactgcaacttctgcccccttgggttgtagtgattctcctgcctcagcctcccgagtagctgagattacaggcacccgccaccacgcccagctaatttttgtatttttagtagagacagggtttcaccatgttggtcagtctggtctcaaactcctgacctcaggtgattcaccagccttggcttcccaaagtgctgggactacaggcgtgagccaccacacctggccaataatatttattgaataaattaatgaatttggtgttaggacctcaatctccttctcgctctcagacatgtaatgccctaagc

SEQ ID NO: 4682 - DNA, 6000 bp, Homo sapiens
gttaccccatttgctttatttgctctctttccctaaccacttgggagtatttactttcagtttaaagtgtcatgaaattatttttgtacaaattatggcattgtagtgtcaaaatctcaaaaggtgttttgctgcctttctacatgcaaattgtttacaatttatgtcttgggctagttacagatagaagttctgtgaaactggaaagtccaggcacaccactctagagctctgattctggaggctggtgctacagaacctagagatgttttgtggatgacttaatgggatcataggatattagtgcttgttcaaatcttttacttactggttaaatatacaggctttgaagtctttgatgtgaccttagggaaacttatttatttatttttgcacctcggttacttcatctgtaaaatggaatattacctatctcatgttgtgaaggtctactgtgatagtcaaaccaggtgcatgtaaagaattgtttagcacagagtctagcacactgaaaggtgcccaataaatgtcagcttatttttgttacggaagaagaaattggggttcagagagactaagtggctcacctctggtcagatggttaattagctgcagggccagaacccaggttctgggctctttctgtgaggggatgaggggctcctgccagtttggatcgtggctaaaaggcttggataagaaggaggccagcacgataggaacatatgacaccgtgggtgtgattagcgtaaggaaagacagaggtatttattggggaggagatgtggcttctgctcctgccatcatgctgcagagtgaatgacacctcctagctaccccaaaagaatggactgaaacagagctgcaaacctaccctgcaatcagggacttttggggacctcctggtgatcaccaggagggaaccacatatgaagaagtgcgtgtaagaatcaggaatctcctcccaactcaacttcccagtgtgattgcaggttccacacacaggcgtccctgggcattccagggtggcacatgtctcaccttgagtgatggtgatgttcacagtctctgaagacacatttttactcccaaaaagccccctgcagaagtaggagccgctgtctttgagtgtggcttttggaatgtagaagtcagaattatgatgaaaatacttcctgcctttgccattctgtaaatatgtgaccttatgcagagcagtgttcttccagctgtgacacctcaggtgaatagggtcttcctccttgaacacccaccgaggggcctggagcaacagccagcctgaaagacacagacaccccaggcccgggaggcctcagctctcagtgcagagctttgtgaaggggccacgtaccacccagatcctgagacataagggaaagccagattgggagtcaaccctgcatagctccctttggggaagagctgatggggccctgcaagagaactgaagtcataccaagacctttgtctaatggggaagagggacacacacacatgtgatcaacacacagggttagagcagagggactaagcaatgaggtaagtgagaagcaacgatgagcatatctgcaggatccttaagtgctagacttagatttgctgtggcaggtgacaaggattcacagtaagttctagatcagagtaaaaattgcatttgaaaatgatgaattgccctattagaggaaaaggtagatttcagaaggaataggcaatcaaaggaatattgaaagactcttgtggcagtcaggaataaggtgacggtggccacggagtggctgcagaaattgtgaaggagaactcaatgtaaacaccagggaggggaagggcgggactggtattgctcagcctggcaattcgtggtttctaaggtgtcacagggcctcggtgagaccaactttattactgagcatggccttcaagagaggaaattcttgtatcgccagagcttattctcacgatcatgtcaccaagtaatttactgagcatggccttcaagagaggaaattcttatatcgccagagcttattctcacgatcatgtcaccaagtaatcagacttcacaaagagagaacatgaggtcatggtcgggaaagggcctgaataattaaaaaataatgatgttataggtaagtattataatggcataagaaaatattcatgagacaattttaagttaaaaaagcataatacttcaaatattttaaaaagtattatgcacagaaaaaagaaggatatgcacttacatattaacaggggttttctctgaaggagtgggactgaaggacattttaaatttctcctgtttacttttatatatttttgaaattgaccccaaatgacttttgtaataagaacaaaacaaaatttacaataattttattttttaaatctacattctcagcttgaattactataatttaaaaaatctactacctgatgctaaacaaaattggtaggacgtgtgttggtcatgattctctaccacaaagatttgccaaacagaaagtaatcttcattacctattaagagatatcatttatcaaaagaagccatgtgcctatctatccacttactttttcagcagagagatgaatcattattagcataaagtcatggttagtatatagtctggtggcctttggaggaacattcttgttcgaatctatcctgtcatggacccagtgaatgtccatatgtatattccttcaagtgatatttcatcaagcactcactatgtatgacacactgtggactggagatacccagatgatgggacatatagttctcagcctcaaagaatctacagtctagacatagaaacataaatattcagaaataatcacaatacaatatgacaagtgctacaacaggctaagaataaaggactgcggggctgactagattggaataaagaaattctgcctgaaagaagtaaaaaatgcaggctgggcgcggtggctcacatctgtaatcctagtactttgggaggccgaggtgggcagatcatgaagtcaggagatcaagaccatcctggctaacgctgcgaaaccctgtctctactaaaaatacaaaaaattagccgggcgtggtggcatgcacctgtagtcccagctacttgggaggctgaggcaggagaattgcttgaacccgggaggtggaggttgcagtgagccaagattgcgccactgcactccagcttgggtgacagagagagactctgtctcaaaaacaaaaacaaaaacaaacacaaacaaacaaacaaaaaaagaagtaaaaaatgcttctcagaggaggacataagtgaaatgggtcctaaaggattaaaggatgctcagaagtttacctggtgaagctaattctcatggtcacagtttaatatagccttgattggctagacttctaaagccagtttctagagccaagttcaaggcaaactagtaactcttagacttgatttttctattgctttctcttggtaattcccccattttatttggttgtaggtggacatctcttacctagctagaaatggacatatcttcttgtagctctggagagtgaagaccatgtcagttgagtggtactgtcagaggccaaagagccacaaaaatcagtttcagaggcccaattccatggagctctcttgcagatccacctccttatgcccttcttcccccaaagcttgttccacccataaacattgtatgaatggaacagccgtggaagtagagttaggtttgcagggcgacactgcagggaccagcctatgtggtaagattgtagggacaccaggaaagacctctgccttcaaaatatttctcctacctgtgtctgacgtctatattctgttaatagtacacaagaactttcatgtcatgattaatgtgcaggctgaacatgtatctgcctctattggaagagctatcacattaccaaatttatgcttaattataggtttgagtatagcattgatgaggagacagaaagatatgatgctaggccactaggattgctttgggaggtggcttagggcattacatgtctgagagcgagaaggagattgaggtcctaacaccaaattcattaatttattcaataaatattattggccaggtgtggtggctcacgcctgtagtcccagcactttgggaagccaaggctggtgaatcacctgaggtcaggagtttgagaccagactgaccaacatggtgaaaccctgtctctactaaaaatacaaaaattagctgggcgtggtggcgggtgcctgtaatctcagctactcgggaggctgaggcaggagaatcactacaacccaagggggcagaagttgcagtgagctgagattgccgcattgcactccagcctgggtgacagagtgatactctgtctcaaaaaataaaattaaaaaaaatgaaaataaatatataaataactattattgagcatctatgccatggcctaaccttcacatgacacattcacattgtatgcactccatatggggattcttggaattgtgcaatgcagcagtcctatatctactgtctgacaggctttgacattttgcccaagacctacttagagctaggactacaactctgataccattcagtgggaccacacatcatctcatcttagcttttatctctaagaatatcatctctggctcttaccaagtatttcaggaccctttgtttcaccctttattggtgattttcctcttccccttcatcaactcaccgatatggacttctagctgcaccgggtcactgagggtggagaggtttgtctggcacctgtactctccactgtcgtcgactgtggcagcgtcaatgaagtagctcgaggcctggcttgagatgaggctctcattgtgaaaccactgtgtggaattgtcctcaggggagtaggctccctggcacttcagagtcacactgtccttctcgagcaccctgtaccattgaggctccaggaacaccacagcctttgggagatcttctgaggagccaagataatgtggggtgaggacagggagaggagcaggctctacactgccattcccagggagcctcaaagccagaatgagctcattgcaaacccatgcttggtggctcagtcttagagcatcttggccccatttttggcctgttcagtatcttaaggaaagctggccagagaagcacagggccaagttctgctgtgttggaggaactatccctgctaaccccacatcagcattttcccattcaacaagcatttcccaatatcttatggcctttgtccccatatgtgccccactgggtcaatccaagaccatgaagctgactcaccagtccgcatgccagctgaaactgcaagaaaaaagataaatcaaatattgagtaggggcagagatcagagtgattagaacatagagtgagtttaaaactcccctgccctcctctgccccaggagcccaattttcccaagaatcaggatgtttctggtggaaaccttgctacctgctctctggtctccactgttcatgcctcttgcgccactgtcaacacaaatccctattttcaacactgctcccttaccccttgctccctgtgcaaactcacaaattaagggtacaggttgaatttccctgaaccaagctacagaaagagcctcaacccatatccccacaagaaagggtagaaattgaaaatcatagaggagaaccctggaatgtcaaactgaaagagacagaccctagggaccatctagtcgaagctctttggttccacagagtgattctgggacccagaggggtgaagtgactggcctcactcatgagtatgccccaattggaaccagcattctcctcatttctagccccatcttggcttgtcctaggagctcaatccacagctatagatgtggtgaggggtcccatcccttcgtgggagtctcattcgtagcctgaaaaggggtctctgctgaacccaaggcatc

SEQ ID NO: 4683 - DNA, 6000 bp, Homo sapiens
cgagattgcgccactgcactccagcctggcgacagagcgagactccatctcaaaaataaatatataaataaaagtaaataataatgtttcagtgactatctttgtacccatagctgagtgttaaatgttttttttttttaatacggcccatactgcaaaagtgctgcaagtacaaactaagcagtctaatcccagctgtgtggtaggaaaagaatgatctcgtttctatggttcatttcagttccttcaggaaatttcctgcaacattgttatttatatcaaatgggtctcaagaacatgagagggctactgagaagaggactgttttccacctagaggaaggtgaatatgtctaactgttcactgctggctgtaaaggcgcctgtggcaaagcagtcgtcctgtctttgcgcttaaatccacctggtgtgccgcccctacccttgcttacaggactgtactgaatgcccatggcatgaatggaatgtttgcagaaggggaaaataagcaagcgctggagagacatgcatagaacagcaggtaaaactgccagatgactatgcccttcacccactcatggaaggccaatatgaagccgtgttcagagtcgtctgcccagagctacagaggaatacagctgagtggcagggctgagtaagaaagtgactacagagtcacagctcagaaacaatcctaaccaaaaaaccatcttacacctctgcatttagctgcctcaaatcctttctaaatgaagagggatttaaattttattttaaaatatttcaacatagtacttttccaaatatttgttatattcgttatctcatgacccacacattaactctagcaagcaggtatgccaatgtcattatccccacttaaacatgacatgcctgaggggctgcgaaagttaaatgacttgcctagagtcaatcagctgaccaactgttctggcccaagaactgtgctctcctgaattctcccaatcccacccaggcccaacaagtccagctggacaattttagtgttccaaagaaaagctaggaatgaagctggagatataaatataaaaatattccttcccaaagacacctgagatctgaaaacacctcttcctaacaaaaatttaacaaattaaatatcaatgttgctaagtgccaagttgatataccacacttatatctggacagaacaactacagtctctactagttacaaagacttgtgagaaatgttggttttatgttttattataaacatttatactatctcagctttttaaaatatggtagagtttaatttttacagttaagatattgtcttggggtcaggagtggtagctcacacctgtaatcctaacactttgggaggccaagacgggaggattgctcgagctcaagagtttgagaccagcctgggcaacataatgagactgtgtctgtatttaaaaaaaaaaaaaaggccagcatggtggctcacacctgtaatcccagcattttgggaggctgaggtgggcagatcacgaggtcaggagatcgagaccatcttggctaacacggtgaaaccccgtctctactaaaaataataataataatacaaaaaattagccgggtgtggtggtggttgcctgtagtcccagctactcgggaggctgaagcaggagaatggcgtgaacccaggaggcggagcttgcagtgagccaagatcgcgccactgcactccagcctgggcgacagagcgaaactctgtctccaaaaaaaaaaaaaatagttgccgtgggcagtactagtgatttgttaattatatatccaacacctatttcttgagttgccttctagtctagtctggactggcttataggaacgtttttcaaacttttttgacaatggcctacagaagaaatatattttactttgtaaagcatagacatgtgtctgtcattgaaacaaaaatttcacaaaataataatcacccctcttttgagtgattcacttggatatcttctatgcttttatactttgccaccttatttttaaaaatacaaattatggcccactaaatggattccatgacttacaaatgggtcacaacccaaaagctgaaaaatactggcttatatgaacaatacacagatcgtgccctcaaggaatttatacattagttgggagtctcatacagttcacagacctcttacagttggaaaggcctggaggtcaattagttccactacctactcgatatttgattctacagcatccctgaaaaaaggtgagaaatgtgaaaaaggcttgtttgctatttcaaggacaagaagttacctcttatttggaacctaacacaagatgggtcaaatagagacccgtttttaacaggtctctatttaaaacagtacagaagcaaatacaaatgaatcaagtatcaaaatacacacttgatttcttttttctaaaagataacttggacctttgttcctaaacccatcttagtcctttttaggaggagggtgaaaaggggaaggtaaatcagggggacagaggtctagaaagccttctctctgatgacctgaagaaggggtcttagcaagttacatcacaagcagccttcgtgattgaggagcctaataaatgacacccacaatgacggctaggagagtggaagtcaggaaaggctcccctgaggaggtttgaaatgagctgagtcttgaaagactgactggcatcagacaggtgaagaaaagacgggagagtgtagtcaaagactctcaaggagaaatgagccagtacatttggcggacagtagacaggtccctgaagaggagcaataagagatgaagccaaaaagaaagactgaaagcaacctgtggtgagcaagacagaatttggattttattctgtaggtaatgtggtgttactgaaggttcctcagtgtgtagagtggtatttcagaattgttcatctgcacatagacctgaaacttggctttagaaagacctaaagacccagagttcagataacagattctcaagctgtgttttagtacagagaaaaatgttctgtaagggactttataaattcagaattctaacacgagcagtgttggttacctaaaaattagaaaaactggaatatagagtttagatagcaatggaatccaatttatttttcatcattttacttttgttaatgaagtgtgagctttgtctgtagctgccatgaagtgactgatttcctttataaaacctacagtctttattcagaagcaagtcttcaatgttgctatgggcctaataaattattataaaccattttgcaaaaattaaattttgcctaaacaacacttttaataataaggttgtctaaagttaatatacaaacagggctctctgagggtgttaactatctagtaattcaggctctgctggatacagtgacagagctctatgaacctcaactagaactcaggtcggcctcaggtgaatataaacactgtatgtgagtcaccttgcaattacagctgccacctggaagcaaatttaagcagtaagaactacaaaaccaaatccctgtaagatcctgcattgaccttcctcttacttcttcctgtctgaggatccataaacctcaggattctttactaatttctcatcagcatcattttttattgtatttccaaatttaaaaacaactgtctccaaaggcctcaaaattactttcagttattactataataaatatcagcgatgtatgatgtattaattagaaactaaggtgttttttttcccctccccacaggaaaactacttcagagaaagactttaaatttctgagaaaatctttatacatattgagtatagatgctatcaaccacatacatgaaaataattgtttggggataatgcacaccatttgccaatgattaagattcagcccagtctttgttgctgcatttctacattcacataaattggtaagtcatgatgacacagaaggctcacatgccacgtaaaaatttcaagcctggatctgaatgggtgcctgaatccttctcagaatgcatattttggaggcaactgtttggtttatgttactgctccctaaactgggcagtgactcaagaggcagctggaagagagaaggaggtgctgggcaagtgctaaaaaagagtgaagcctcaacagcagagtccctccccttctctacacaccacacagcctttttgtgacttcttgtccccataagatatgctcctctagactaactccccttcccagggtggagcagagtctcaccggctcattatctcacagctcccgggatggccccgggtacagcaactgtgtggcacttggctgtggaaattcaagtttttccaccctaaaacaagtaggttgtgaaacccgatttcggtcctggttaccattgagaggggcctaccacagccctgtgcctggaagttcctgcctgtcgaagctcctagccccctgccccatcctcaccttctgcacctgatggagaaggtgcagtccctccgcgcaccttacatgcccatgccacactggtggactcacgcacgcacgccaactctgccatcccatgcacgcccggcttcggagggcggctacgaacttactgctcgtcgagccagccgagccagggcgcaaggggaaaggcccgagcggggccggggataggatcggataggagtcggggtcgtggatggggtcggggcggaccccgccggcccgctggcctccctcccctgacccccgggacagcccccgatgcacgtgctgggtgacaggccccctataggttccatacctgccaccggaagtgagtgaggagggcagtataggcatttcctgtgacgcgagcgcctggactccattaggcagcagctgggggaagaatcaacacaccagggagcagagcggagcggatccgaggacagaggcggcagctgcctccgctgccgcccgccgccgccgccgccgcagccactgccggggctcagcccagcggcgggccccgcgcccccgcagccgccccgcggcgccccccggcgcgacccccgggccgcgcaccccgagctgcctccgggaggggggggggaaagggcccggatcctccttctccccctcctcctcctccccctcctctcaccctcaccctcaccctcctaccctgaccccctccccgcctccccggcccccctcaccccgaccctctccccggcccccgcctcccctcccccgcctcgccccaccggcttcccaccacggcctctctcggcgaggaaactctggcctccgcttcctcctcctccgactcggacaccggcggagcctccccgcccccgcggaagaaaccccgagcctcggcggcggagggagtaggagagcccggggcttcggcaggcagagcaggcctctcccctccgtcctcgtcgtcctcgtcctcctcctcctcctcctcctccgtggtggtagtggtgggacttcccccggctgctgcccctcccgccgccgctgctgtcccccaccgaagtagcggccacagcctggtcagcggcagcatcatgcaggccaatggggcaggaggaggaggaggaggtggcggcggcggcggtggaggaggagggggcggcgggggccagggacagaccccggaactcgcctgcttgtcggcccagaacggggagtcgtccccctcgtcgtcgtcgtccgcgggggacctggcccacgccaatgggctcctgccttccgccccctccgccgccagcaacaatagcaacagcctgaatgtcaataacggggttcccggcggggcggccgccgcatcctcagccaccgtcgcagctgcctccgccaccaccgccgcctcctcttccttggccaccccagaactgggcagcagcctcaagaagaagaagcggctctcccagtcagatgaggatgtcattaggctaataggacagcacttgaatggcttagggctcaagt

SEQ ID NO: 4684 - DNA, 6000 bp, Homo sapiens
gaggcagaggttgcagtgagctgagatcatgccactgcactctagcctgggtgacagagcaagactcagtctcaaaaaaaagaaaaaaaaaaaaagagtatctcgtcttccaatccatgagtacagccattcatttgggtctttaatttttctcaataatataattttcagtatagagttcttacacatctttcataagatttattcctaagagtagtgggctgaatcacatccccaaagacatgaggtgttaatccttggaacctataagtgttaccttatttgaaaaaagggtctttgcagatgtgattagggtaaggatcttgagacaaggagatgatcttggattatccaggtgggccctaaatatcatcacattgtccttatataaaagaggtagaggctggagtgatgtggcttcaagccaagaaatgtcagcagacatcagaaactggaaaaagcaaggaatagattcttactcagagcctctggagggagcacatctctgttgacaccctgacttcagacttctggtctccagaactgaaagaatacgttgttttttttttttttttttttttttttttttgagacggagtctcgctctgtcacccaggctggagtgcagtggggccatctcagctcattgaaacctctgcctaccaggttcaaaggattctcctgcctcagcctcctgagtagctgcgactagagacacatgccaccacgcctagctaatttttgtattttcagtagagacagggtttcaccatgttagccaggatggtctccatctcctgacctggtgatccgcccgcctcagcctcccaaagtgctgggattacaggtgtgagccaccgcacctggccataagtttgttttaaatcacagagtttgtggtaatttgttacaatggccataggaaactcaaacactagatatttgaaattgttgatgcatttgtataccatttttaaaaaattcattttctttttttttttttgagatggagtcttactctgtttcccaggctggagtgcagtggcgtgatctcggctcactgtgaactccgcctcccaggttcaagcgattctcctgcctcagcctcccaagtaactgggattataggcgtgcaccaccatgcctggctaattttatttatttatttagagacagagtttcactcttgttgcccaggctggaatgcaacagcataatctcagttcactgcaacctctgcctctcaggttcaagtgattctcctgcctcagcctcctaagtagctaggattacaggcacccaccaccacacctggataatttttgtatttttagtagagacagggttttaccatgtaggccaggctggtctcgaacttctgacctcaggtgatacgcctgcctcagcctcccaaagtggtgggattacaggcatgagccaccacgcctggccaaaaactcattttctaattgtttaatgctagcacataaaaatttaattgatttttatagctaactgtacccagcaacttgcttaaaatcacttaatactaagtgtgtagattattgtaattttatgcataaaatgatagactatcatgctttctctagataacaggtttatgtatttctttccaatccttatacatttttccttgcctttatgcattgctggaatctgtagtacaatactgaagtacatcctatcttttgactttataactatgagaaagtattctgttccaaatttaaaatatgcacctagtaaaactttcaaaaatacagtaaaaacaccagccaaaaaaataacagccttctagttaaatccaaaggccttttcttaagcccttctcatgattctgcatcagtggacactgtttattaaccctttttttttttttagtttttttgagacagtctcgctgtcgccaggctggagtgcagtggcatgatcttggctcactgcaatctccgcctcccgggttcaagcgattctcctgcctcagccttctgagtagctgggattacaggagcctgccaccatatccagctaattattgtatttttagtagagacggggtttcaccatgtcggccaggatggtctcgatctcctgacctcatgatccgcctacctcggcctcccaaagtgccaggattacaggcgtgggccaccgcgcctggcctatcaagccattctaaagcattctttccatgtccagcttcttcttttcctcttctaacccattacagtcaggcatttccaagatttcgccttagaccttttctctttgtatattagtccttgttagctattgggaaacattttaaggtccattattattcagaaccaggccagcttcaggtgctttccttttcttcaggaacaaaacagaaacctattatactttcctgtttaaaaaatgccatactctcccctcgcccaggttcttctcctaactgtggaatgcagtcttctctgcgtctgcccttttgtgctgtgctcgaatggaatcttctcactttactggttttactaataaacagaagttacaaaggtccctaaatctttccaacgttttggttcctgatctatatgcagattcccttctgcaggaaactgcatggagtgccacaacattgggtgttagaaagctggctggctcagaggcctcagagtgaggagcatttgacagggtctagcttttgtgttacaggaccaaagaagctgaatcatgttcattagaaactgctgcataaagaccaacataccagtgtattaatttgtaatgaaaaataacgactgtcaaggaaaatggctattcatttcatttggccagggcattctctccttgtaggaaaactatacgggaattaaaataatattcagaactgcatttattgagaaaaggaacagaataaaaggtccagttttatgattcaaatatttaatggaatcacattaagctttaatagagagatgagactatctctactactagaaccagatagttttgtacacacacaggagacttttcacttcagaaatatttacttcccagggttttcttggctcaattcctgagttagatatattatttctctcagtaaggtttgctctggccagagacgttcatttctggtttgatccactctggattgacccataatagaattattacaagacagtattttcaagtgtttggagagtatctgctgaaccccaataccgctcagcatacatctgcatactagaggctcacagttaaatcctcacttatttctacttattcgtcagtgggggggaagaaatcagaaaaagaggaaaagaaaatcataaacagcccccaatgccaggcagcctggcacgcagcagatgccctcaaatctggtgaaggaataaacgcagtttcctactcctttcgccgaatgcaattcagaaaagcattacagagcacaactccttccaggctggaaacgctgccagaaagcagctctcgcttcacctctgccgggggactccgccctctcccccagcgctccaagcggagaccgcaggtcagcaagaactgaaaacgcgtctactgggccaggtctcatgtttatcttatttccccctcactccacagcactcactccccagctattaaaacagagaagaaaaaaaaggaaagaaagatggtaagaataagacagtagggttaggatcggggagaggggcttcagcaaaaaacagttgcatcgctcagccccggaaactcatcccgtcatccccagactctctctcgggaactgggccctacttcagagatccagaaacaaaaattgtagcgtcgagatggttagggccgagtctacttctttcgccggttgggcctcagagccccaaggccgccctgctatactgcgcgactgcaccgcgggccagagcgcgcccctagctcgaggctgccagcggacaccgggaaactgagcggcctgcgggtccagacatctgaggaacgccgcgctcaggcccgtgcctgcagcccggtccgcagagggggggggccgctccccccggtcgcccagtcgggtcgcgccggtcctttctcagggtgaccgcgttccttccgcccagagagggcaaagagtcccgctccctcgtgtgcatctcccgcccgcgctccggagcgccccctaggaagaaagcccgagcggcggccacgcctcggtggcgattttattagcgcttggttggggtggcccggctgcctgcgagcggggtttccccgcccctccccccttcccctccccccaggcggccggaacctccctgcggagcggagtgataccggcggcggcgtagagcgcggtgcggccgaggggcgcccgggactgcgcggggcgggcggcggcggagggaggaggggagagaggcggggccggggcgggttgttgtgaggcgactgcgctactgccggagcggggcggttatggcggctccatattaacagcctcctcctcctccgccgccgccgccgtctcctcctcctcctcctttccctcccgcccgcgctctaagccatctccgccttcaccctgacgcctgcctcttcccctcacctttccccctcccctgttctaccatgcccggcatgatggagaaagggcccgagttactggggaagaaccgatcggccaacggcagcgccaagagcccggcaggcggcggcggcagcggcgcctcgtccaccaacggcgggctgcactactcagagcccgagagcggctgcagcagcgacgacgagcacggtggtagcctcgaactcctccccgccagcccgcctgcccccctccctcttcccctcccccagccccctcccctcgccgctctcccgccctccctcccctcagagcctgggcgctgcggtagcctcgaactcccggtgcagtgcagcagcacccccgcgaccccccgtccctccgccctcgaccaatcctccgcctttgcccccccccgctccccgcccccaatccgctgccatctcccggagtgccccgagttgatatcttcccatccacccgccgcttctttcctccatctagcgatttttattttttaagtgtctcttcctttttctttcttttcttcttttttattttttatatatattttttggcattgctttgcagatgttgggatgagagtcggagccgaataccaagctcggatccctgaatttgatccaggtagatatatttgcttaagcaaaatctcatatcccctttcctgggcttggtttggggtggacgggctaggagtccgggcatggggccgggaggggatgcggggttgggctgggcaggcatccgtggcggggaggctgtcaggcttggccgggctgtgacactgggcgtgtgggcagatgtgtgcactgcaaggttaacatggttcccttcggaggccacttgcccgctgggggcatcgccttcctagcccttgagcctggggcagggtcggggtgagcagagggagacggcccttggcggagtccagggtccgaggccgcgggctggaggagcaggcgtgcggactgtatggacgaaccgtgcaaatgtcaattgccacctcgctcgccccggcgccgagggccgcgctctgtcgggcgggtggcagaggccagggcggctgtcaccggccggggaagccaagggcgagccctgccgacctgtgcgcagccgggattgtctcttttctttctttttggctaggtggtgtagctttggtcgcggcagctctgcggagtgcaggagccgcggagagaaaggggtgggggaagggggtggggagacgccagcggcaggcacacctcgctcgccagccagctctgggaagttagaccacaggacagtggctgcagctgccaaggagacattttctccccgaccagccaggttccagcgtcctctgccaacccagcttgcgggctccctgtctacttttctccaaacaggctccc

SEQ ID NO: 4685 - DNA, 6000 bp, Homo sapiens
ccttcatggttagctcctggccggcgcagcacacagatgggcaccaggctgcagaggagggtgagcaccagcagcagcaccagggcccccaacttcacctccagccccacaggcactggaggctctgaagctaccgcctcggggcgccacaccaggagctctggctctccccagggccccatgatgcttctggtagctccagtgactctcagacctaggaagacagaccagagtggttgggaaaaatcatgcaaaggaagatggggcaaggaatggggaagcttggtcagcagagtgcagctccctggccccagccactttgtgaccttcccctacccagggtgactcatctactcctgtaccaggaacattcctctcttctcacactttctttcccaagtgacttattcagggagactgcacgggggaaaccgaggcatgagaaaggctgtatggatatctcatcaccctttcacctggtgcccccagaaaactaggaaactaggagccgcctccaaataggacctggagctggagttcccctaaggaatgtagaggccgggtccccaactcccgaacggagtgggtgaagccaaaaaggctagggctgtgcagagatgtcttgggtagcttcgtgggccacctggacagggtaagtttgggtgctggatcgctccatcgttccccttttcccagcgcagagaacaagcgcttcaggccccaggatgggacctagaggcagatggccaaagagaggggccctaagagtctgcggtcccgggacggactgaggcgacactgagggcggtgcctgaaagtccgggctccaggaggcggggtgcgaggccgccaagcgtcgcgggaagcagatgaagaatgcgtgagctgggactcctgttcccgggcccggggaggcctgggcagccgacatggaccccgctgccagacagcccgcactcacctcgcgagggtctcactacatggtctccgcgcgcttccggcctagagtcgggaattcccgccccctcccatagctcccccctcccccacaggagccgcgtacccacgaccgactgccaatggcagcaccgagtgggcggggacagaccgggagtgacgtcagttaggagcaatcagagatcgggagcgggagcgggcggagcaggcgacctgaggagagtgagcgagagcaagagcggatattaggaaaaggacctcggggctggggccctggggcgcatctgtggaggactgaggggccggagcgggccagtcaacaaaggctttgattatatggatatttttaaaagagggagaccccgcattgtcaagtcttccggcccacatctgaaaacatcttcctggccttgggccaaagtctcatctgtccctcagaaggctctgacacctcgtcagtgcctcttggcgcccaagggaaagcattcccctcttgggaccaacttccttgactgctttccctcaccagcacccacaacaaggaaaaagacaaggcagaattggaaaggggggaaagcaaagagagggtatgtcttgaaaatcatcccttctcgactacttatggcactcagtgcagcctccgccttctccaggtgggtggggacgtggtgggaccggaatgcggggtgctgaagccgcgcccagggaagagcccccagcgcattccaggatatctgcgtaccgcgcctgcgggcgtctggccggttctcccacctgatttccagcccagctcccgccaccctcgccggtcggtttgctgtttgctgttccttgaatgccccaaggtagttgtttcagctcaggactttcaccgtttcctcaacctggattcttgtggcccacaactctgtgccttgagaatcctcttctagcctcaagggacggtaagacaaaagaaaatttaaaaagggggctcagctgttcttttatgcaaaggtgaaaaaagcttcattgcctaaagaagggacagatgggatcttgcttcctacaggaaaattaattttaaaaaagaaaaaaaaaaggggggacagtgtaatgcttctcacaaggctccagaaacgaagcccagtaattccttaagtaaaagaggaatgtgaagacttcttaaggggccgggcgcggtggttcacgcctgtaatccaagcactttggaaggccgaggatgaatcacctgaggacagaagttcaagaccagcctggtcaacatggtgaaaccccgtctctactaaatatacaaaaattagccgggcgtggtggcgggggcctgtaatcccagctactcgggaggccgaggcaggagaatcgcttgaacccgggagccggaaattgcagtgagccgagatcgcgccattgcgctccagcctgggcaacaacagcgaaacttcgtctcaaaaaaaaaaattattcgtaattggtaacattaacaaggaattatgactgggggggtcaggaaacctggattctggtccaagttctacctttatagttgtcaaatatatatatttgtttatttatacacatacatatgtcatatatgattaataattgtatatatttatggtgtacaacatgatgttttgaaatatatgtacattgggccgggcgcggtggctcacgcctgtaatcccagcactttgggaagccgaggcgggcagatgacgaggtcaggagttggagaccagcctgctcaacatggtgaaaccctgtctctactaaaaatacaaaaattagccaggcgtggtggcgcatgcctatgatcccagctactcaggaggctgaggcaggagaatcgcttgaaccggggaggcggaggttgcagtgagccaagatcacacctctgcactccagcctggacgacacagcgagactccgtctcaaaaaaaaagaaaaaagaaaagaaatatatgtacattgcagaatgggtaaatcaagctaattaacatatgcattacttcacatatttatttgtgatgagaacatttaaaatctcttggcaactttatttcttttctttttccttccttccttcctttcttctttcctcctttctttcttgacagagtcttgctgtgttgcccaggctggaatgcagtggcatgctcttggctcactacaacttctgcctcccaggtttcaagcaattctcccgcctcggcctcccgagtagctgggattacaggcgcccgccaccacgcccggctaatttttgtatttttagtagagacgggatttcaccatgttgaccaggctggtcttgaactcctgacctcaggtgatccacccgcttcagcctcccaaagtgctgggactgcaggtgtgagccaccacacccggcccaatagatctcctcaattttaccttaccttgatgtatgattttaggcaagtcagttttcctcaccagagtttgataaatcaggggcaaggaggaagttaaacaagcagatgactgcagagggtccttccagttctaacatcaacggaagctaactacattccccactcaaatcatctctgcacatacagcccgcaggaagccctttgaaatgtatttaaccacctttctcgctctcagaatgatctcaacaagaacagctttgctttccttggagctctgcatcaatctaggaaggctgctttgtctcttcactacttgagcaggatggagagatatgagcgggaaagacagataagaaatctgagaaagccccacaaggtgggttgatagtgtgaagaacatgggctgaagcatccaaatcttggttcagctacttacagggtaaccttgagaaagttacttaaacttgtcagctcggacgggcgtggtggctcacgcctgtaatcccagcacattgggaggccgaggtggacggatcacgaggtcagatcgagaccaccctggctaacacggtgaaaccctgtctctactaaaaatacaaaaaaattagctgggcgcctgtagtcccagctactagggaggctgaggcaggagaatggcgtgaacccgggaggcggagcttgcagtgagccgagatcgagcctctgcactccagcctgggccacagagcaaaagaaaaacaaacaaacaaacttgtcagctccatctgctgtaagaattatatgagtaacatggaaatgcctgactagaccctgttcccgtttttacccttagcccgttcaaatcttcataaggataattagtagcagtttgagttctgggattcacactccaaactactgttttactcacccagctacccttttctgaaatactactgaaaaccatacctgtatcagtttacctccattgttttacttgaagtgaattcctggaccatcagacattagaccaaggcaaaaaaataaaaataatcaatcaaccctgagttttggtattactactttctagtcatggatctgcctcctcataggtaaaatttgcaaaatattacccgccgtgtgtgcctcagaactgttatggattaaggaagagaacaatttttatgaaaacgttttgtaaattatacaagtgtgggacataatgttcccggtaactgtatgcaaacaataagacaacaaacgcaaaaggctttttaacttgttgcagttttcctgccccgtgtccctccgtgaatgagcagcgtgcagcgagcgtgtgcgcacagctgctgttctccattaacgccacactgctcggcttgcggacggggaaacccgccatcgcgctcctgccgcctgccgagcgaggatcaccgctccactggggtcagcgggctgttgactccccgcctgggtgaaaccggagcttccgagtcacgtggcgcgcgaagacaaacctggctgctcagggtttcccggagctttctcccagcttcccggcgattcatattctggcgcttacccctccctttaggctggcggaacccaatccccgcctgacaaataagtcccgccggccggacgcagtggctcgcgcctgtggtcctagctgctcgcggtgctgaggcgggagaatcacctgagcccgggaggtcgggggctgcatggaaccgtgatcgcaccaccgcactccagcctgggcaacagagcgagaccctgtctccaaaaataagaataaagaaaaaaaaaagaaagaactgcggccccattggcctgactctcctgaacagccaaactgtctccgaccagttacggaagaggcggccttgagagggtagtgtgccattggctcgatgtcctgcccctccgaaacctaagtcttcagcttccaatcaggactcagctttgggaagagcgccacgcggtgggcgaggggatgccctagtaaattcgcaggtctcttgactctttccgcctttgtttacaaccctgccatgatctccctcttgcaaaagcgagggctacagaacaggcattcaggagtcctgtgctccagtcacagccttttctgttcttcagctaggagacaccaaaccctcaggaagatttactatagctaagagaaaactgcagcagaaagggcgcggctacctacttcttaaattccgtttgtggaccctcagactcttagtcccctactcccagatacagcggccctaccgtggctcctggcaaggtggcatccacttttgtagtgtaaggctgggggcggggtttggctggcaggtccaggatacgagatcctggaagaaagaaaaggtgtagtgtttggggaggtcaacgggctatgctggcttgacagggctgggctcttcagaacaggtaatgcttggggggggcctctttgtctaaacctgagggatagggctgaaggtgaaatatcgaggggacaggtgagggggcttgctagtgaggaaggagtgggggggcggggataatggaaaagggagcagaggagcccagaaactgtagggggtagtaagcagccatcattccgtttctgcaaccctccgtcccacacgccttcctgcagaagcatggatct

SEQ ID NO: 4686 - DNA, 6000 bp, Homo sapiens
gcgagagagtgagactccatcttaaaaaaaaaaaaattaattttttaaaaaggatttatataaatataaagcagtgctactcagtaatatttttgtttcaaaaaagttgcttttcataaatatatgttttgttgttatataatttattatttttatttttaaaagtagtaattatatttaatttttcttagttttctttttttttttttttagagctagggtctagctctgttgcccaggctggagtgcaaaggcacaatcatagctcactgcagccttgaactcctaggctcaagtgatcctcttgcctcagtctccctagtagctaggactacaggtgcatgccaccaagcccagctatttttaaaaatttttttgtagagatggggtcttactacgttgcccaggctggtctcaaactcctggcctaaagtgatcctcgcaccttggcctcccaaaatgctggattacaggcatgaaccaccacacccagtcagttttaatttttaatatggaaaatttcaaaaaatataactcatataaactgaagctccctgaggtcctcaataatttttaaatgtaaagcgtttctcagaatatatacctagaagtagtattgccaggttatagatgatactaaattgttttccaaagtaattgtaccaatttataacttgtcataattaatatttttactgctttctccagaagcattttatcagatagtctaaatcacatcataaaatgagtttcttatctgaaatgttctttttagacttctaactctatgagtgagaaaaacagatacagacatagataaagatatcactcataatcgtaatctcagaatccagtaataatcactgtaatttttttggtctatatgcttcctgacttaaaaagagggagctctagatttccagttaaataaacatgtctcattgaacacaaatgcttatctctgttacctcccaaaatgatctaaaatgacaatcttggagtgcaaaaggaaaagcctataaggacaaagagaacaggacagtaagtaactgtgcaatagagatgtcaatacatttctttaatgaaggaaagcagagggctcactagtaatagagctaggaaaaactgaactctaacccaggtgcctgcagagggaggcaggattgggggaaacatcagataaagggttcctgacatcaacccttgacatcagcaagaagaaagctgattctcaactgagaaccttccaggcttgggatgggagggaccagggcctggctctacctcccggggttgttgtaaggattaaattagctaaaacatgcaaaatacttaaaataggggctgatactcaatggtagctgttattgtctgaggataagctccaacttgaaagccagagaccaaaataaacaacagagacaatctaggaagcagaagaaaacagcagaaaattacaactggaatcctcagaaatatgaaataagagaagatcctgaatccacaacataagagcaagaggctaccaaaaaggaaagtcggggatcaaacaaaaactcttggaaattaacatttttgtagcagaaatgaaaaaattcaatagaagaaccaggggatacagctcaggaaaatctcttgtaaattagaataaacaaaaccaggaaatggaacatgaagaaaaatttaaaaacagggaaactggctgggtgcagcagctcatgcctgtaatctgagtactttgggaggctgaggcaggaggatcacttgaagccaggagttcaagactagcctggccaacatagggagaccctgtctctatttgttaaaaaaaaaaaaaaaaaaagagaaactgatcacagagaacgtttcccagaattgaagactttgtttcccaattgaaaggggccaccgagtgcttagcataatgaatgaaaaatacttaaaggacagtttgttatgaacgttcagaacatcaaggataaaggagaaaaatatcctaaacaaattaacaaattaacaaacaaaatatatgggaagtaacacaagtcagaataaatcagtctcctcaagagtagccacatgagaagctagatgacaatgaatcaatgccgttaaacttctgagggaaaataatttccaatgtggaaatctgtcactcaaggatgaaagaaaataaagccatttttagacaagcaaggactcaaaaatttagcttccatgaaccccttctggggagttagtggagaacatactcctccaaaatgagagaataaaccaagaatggaaaaacataagatccagagagcaggggatttggcacaggagaaacaagaagagaatccccagaatgtggttaggtccctaatcctaggacaagagctgtgaagcaaggctaagcagaggagtttggagcaaagagaggatgagtctaaggagggatgctgccaagaaaaaaaaaaaagacactggtaaatgacctggttcacatctgtagtaccagccactgaggggctgaagcgggaggatcacttgagcccacctctgaaaataaaaaataaacaagggatgcatagatcattaagcaaataaaaatagataattttttgactctagaaaaaatattattcaataaagtgaatataatcttagtgtagtatatacctcaactgtaaaaatattctagttatattactataaactcttgctagtcattcaacaaaccaggaaattctgcagcctggccaagagtccactggtagacacaaaagagacagacaaagcataaactcatggaaagaatagagaggggactttgacagtgttcagcctcaacattcactccctcctggctccaaccttcaccttcccaataaagaatgtagaatcccaaactggtatctccagttccgttcttttctgaaatcttctaattgctcactggacaattcttcttgcctattgccacttgaagcgtaatctagctctttctctctctcggtccctctcttgcgcgcgcgcacacacacacacacacacacacacacacacacacacgctcctaacttatcctcttcctcaccgtttcccaaaccaactcatcacaccttctccactttcaacagtggctcagtggcaccactacttttccagtcttccatgtggcttttccactcctccattccctatagctggtttgtttttagctggcttctaaaggtcctgccgtgtcttcagctgtaatctagttcatagcttatatgaacgttataaaccataccatgtgacacaaatgtaaaataccagtactacatcaagatttctgaaatagactctgacttggttacttttattaataataatcgaatcagcatttgtatagggtttttaaaaagacatttaatgtactttcctctgattgctaaagtataaacgtttactgtagaaattttggaaaagctgggcgcaattgctcacatctgtaatcccagcactctgggagactgaggcaggaggatcacttgagcccaggatttccagatcaccctgggaaacacagtgagactccatctctacaaaaaaattttaaaaaattagccaggcatgatggtgtgtgcctgtagtcccagatactttggaggctgaggtgggaggattgcttgagcccaggttacagtgagttatgatcacaccactgcactccagcctgggtgacagagcaagaccccatctattttttaaaaattaaataaataaaaaataaacattgtgcagtagatctctagaactttttcaccttacaaacctaaaattctataccctttaaacaattcctcttttccctctctcctagccactggcagtcaccattctactttctgtttcttagactttgattgctttagatacttcatatgaatggaaacatgcagtatttgtctttttggggcattgtgctcacttttaaggcttttgatacctagtactaaactgacctccagaaaggctgttaacgatttacagtttgactggaagcgtgtgtccatctgggctgagttcattgcttgcttagcatctatcagttgtttcaattcttgccagtttgatagaggaacaaatagtggacccaaacagggttttactttggataaggccattgtcctatgaatcctggctgaaatatttgctccagcacttagaagctgtgtgacccgggacaactcacttaacttttcaatgcttctgttcccttatgtgtaaatggggataataatatacacgtatacattatacacacttattatgaggaattagttaataaatgtgaagctgtaagaacagtgcctggaatatagtaagcccaaatgtaaggtagctattatcatttttgtcaatccttgctaatgtaatacctggaaaattacagccagctattttaatttacatctcctcggtaatcagttgaacgtgaatgttctctgtatttatactggctattggtacttctgtcaagatttcctttttcaaagcactgtggcaaacgggatctcacttgatcctcccaataaactcatgaatgaagaaggtggcaatcatcaatccccacttttcgaattaagaaattgagcctcggaattcgaattctgagcaattccaattccaggattcggatctcaccctctaaaacctagtagctgttgcagaaaatataacgggaaaaagctttggttagccgtaaccaccacccaccccggtgtggctccgcccctgccccgccccggcaccggcttgccccgccccgccctctacgcgggtttccagccatcctctctgcgcacgcgcggccgctcctgcgggcggaagcctcctggcgctcggccctgcgcccctccccccggcgcgcggccccgcccaggacgaggggcggtgggcaggcagcgctgggtccagtggtcgggggaaggcgaggattaccctcccggaggcgttgtctgcgactcggcggaggctccaacttccagtggcccggtcgggaaaggtacagactcccaagcctcttggtcggcggctccagcgaccgccattttcctccaggagagggaagagggcaggaggcgggggccgtcccctggggccgggcgggccggggcggggtcggggggccgggcggtggggggcgggcccggctggctatggggcccggccccctggccccaggagcggctgctgcggcggagttaggccggccgcagtgggaaaaccctgggcgccctctgggtctcagcgtcccattaggacggttccgcgctgggtgccgcacgccgcacagtgggcaacgctttcacaggggtctttgcatttcacccgcacacagcagctcctggagggaggccaggaaaacacttaacccattttgcagacagaaaactaaggctcaaagtggggaggagacttgcccagggacacccagcgaggttgtggccttgggactcggttcctactcccccacatccagcgcccttgccaccagaccactctgcctcacctggcaaaggatggggcggagctaaaggattagaggagtaactggcagggtattttttgttttgttttgttttgaagatctgcctctttctgtaccacccagatcagagcctcctaagaaatatccagaagtcaagccatggatccacctgcacgtaaagaaaaaaccaaagttaaagaatctgtcagcagagttgagaaggccaaacagaaatcagcccagcaggagctgaagcagagacaaagagcagaggtgagattaaggcggaggctctgtatgcctgtagtctgctggagatgatgctggaatagagaaacagcagaaaggagaactgacagcgagccatacttgcctccaggcaggatgggtgttctcccaggtttagaggggacaacactgaggttcagaatggtgaggtggcagcccagaatcacatgccaagttagtgtcagaacccc

SEQ ID NO: 4687 - DNA, 6000 bp, Homo sapiens
atgcttatgccaggtaaccctctctttccccattttctaagcctctgggcttctgttttttctttagtttcttaaaagaaatattgtaaatagccgggcaagatggcatgcgcctgtagtcccagctactcgagagggtgaggcatgagaatcgcttgaacctgcgaggcagaggttgcagtgagcagagatcacgccactgcactccagcctgggtgacagagtgagacttgatctcaaaagaaaagaaataatgtgagaattgcaaaagagtctaaccctgtctcagatgaaaggaaagggtatttctccccatattacaggaaagcaggacattctgtagtcccatatcaggccaggagtgggtcatagtgatagattgcccttgggaactcaggaagagtgagaactgaggtagagagcagggggctttgggagggacagattcagggccaacaggggcagtggcctaccttccctatcccctcccagctataggtgggtctctccttgctccttgcacactcattgccatctggccatgccggagtccttcatccatccaataaagaacctactctatgtcggctgggtgtggtggctcacgcctataatcccagcacttgggaaggctgaggtatgggcagccacagacaggctctgaggcagattttcgttttagctttaggatgatcactctggctcaagggatgtgtgtgtgcatggcagggggaaggggaatgaagagaaaagagcagaagcagggagagaggaggaggccgatgtgccactcaggcaggaatgaagagggtcccttctgggcagtgagcatgaagatatggattgtcagacaaatctgtgtgagggaaaccagaggagttggtgatttgtcagtggacttgggtgaggagacagtgacggtgccaactagcattgcaccgagtctctactctagatgccccctgagcgtggcacctccgggtgagagagaggagctcattcaagatgagaggagcagggtcagttttgaatatggtgggtatgaggcacccttggagcacccaggggagccatttctgttgtccttggcgttctgggacacgccttgtctttctctcccaggtctgttcacgctgttccctccctccactggcaacactcttcccctcatctgtcagccccgtgttttctccaggagacatccttgaccttttctgctgaaagccaactttttgttgtcagagcctctgtagttctactgtaacgtttctttggagacaggtctcatttccctgcttttctgggcatcttccacgggcttcatgcagtctgcacctcgagaagcaggaagtgatgaaacacttgagtgctgcttcccgtggctcaccatcagccaggaaatggcactgcatgctacagaggggagatcctcccagggctgactccaagcaggaagtgactctcaccaccctaggggatttgaaacacctctcccatgcccaggaacctagagcaggccagctggtgcagccactgcccagacgtgggatgttctggtttcagaggtggggcagggagatgtagcctcccaaccaccctcagggaatccgctgaagaggcacaaccgaagggaggtgcagttgccagagaaaccagctgataacaccaaacacttaaggcctcatattgaactagcatgtgagcaaatgcgaaggactcaggtccctcacctctccctgggactggaaaccgaccaccttcccaaggctggcatccactccgtcctctccctacctaagaggagaaaccacaggcctgactgaggagaccctcaaggcacggtttatgaggctgagataggagtgaggagtttgctttggatggggcggggcttggggtaggggaggaagggtctctgaggtgagatcctgagatggagacaatgacaacggcagccgccattttattgccaatcagccatgagccccgccttccatacacaatgacatttcatccccacaatcgattaacacaaccatgatagccatgaactcccaactcctccagctgctagtgctcaacgggagagtcccctccaggtctgtctcattgcagagcccatattctttctgcctggccagcagttactctcctcaatgagcaggcactggtgcagtcttgggtgggcaccagtcacccctatggaaatccttgatggatgttacaggacaggattggatgtgaggggtcttggaaatggggctcaagaatcttcatcatgaggcgtttctgcgcctactgacctgagatacagagaggaagttccatggacaccaacacccagttccaaggaggcacacattaaccttcccatgatgtggatgtgtgggaacacatgggcttttaatcacacgccatgcaatccacagaagagctgacccagcctgggggcatacacgcactcatgtgtactcaacgttcacatgcactcacaccctggctcggctctggggacgctgaggccgctgtgagaagaaggacggctctggctccgtcagatgaggctggcaatgctggatgtggtctcgtgacgccggccagcagacaactgtcctgagatgctgaagatgctgccatggccgccatggccactgtgggtggagggagtggccatacagatggaggggcagtgtccgctcacacccacttgatacagcagcaggcccagcagcaaaagcgagcccaaggcagccagagcaatgcccacagacagcatggcggccagcggccgagcaggggcaggggcggcggccagcccggccagggtcaggccggtgaccagcagcacgaggccactgagcagcaccacgagggcgtcggcccctccaccactgcgcagcagggccacatggtgggcctggcggatgcagttcatgtcctgcacagccgagctcatcagctgtttcaccagaaccagcagagccagcaaacagagcacagtgcccgttgctagccgccattcacctgagcggctgctggtggttgacagcagtgccacgccgcccgcgccacagcctgccacgaggcccacggccacgacgaagcagagcgccgagcgccgcggctgctgggaccaccacagctccacctgctctgccagcatgtccgggggcagcccccggccccctggggcttgagcctcctgttcagacatggcttggtcaggcaggggtcagggtaggaggtcaatgtcaggggtcagagggttcagatcacagcctggagcacctgccacctgcttggcagctacaggcccagagtcccattcctctcacagtccaggatatggtcaccctcacctgtaggggaaggatcacagtcttaccttcccagcccacctgtcccccacggtcccacctgggagccttggggatgatccctgagaatccaccccagtgttcccccgaatctcccctgggatagccccctctgcagtactgtcccttgggaatggctctccaatgaccccaggggagtaccctgcccatagggtaccccctaaaaccctccagggaatcccctcacccaggccctgacctctctgcctctggctctctcagtcgctggtcccatcccggctggctgagggagctggtgccacggtggacgatgggacgaacagccagagataaagcctcattcaggatcctactcacatggcctcagctgtcaccactggttcctcgggaggagctgtggggatggagggggcgcttatgacttaacccttctggaaccagaagcctgactgaccttgacacttctcttttagggctgtgtctcctccttctctgtgggttaggaccagacccctaacaccctccctcccctaacatcccatccaatctcacagccatgagtttggtaatataagctgccagttcccaaattcctctctccaacctacatctccgtcctgagtcaattgtcaccttgatgtccctgtgatgcaacaggtcccaacccaagctcgttgtcttactccaacctgttccttctgcgttcctcacttcaggcatggcatcactgccctctcagccagctcctcctccctctgctgtatctaatccacgtcctgtccctggggctccacctctaaacatttctctagccagttccctgctctcgtatccttggctcccgcctccacctcctcactggtctttctgctccccttgctcttctccacactcgccattcccccatgccatcctcctccacgatttctctaaagtggagcaaaggaaaaaggagggctctggatttgaaccccagctccagtccttcccaccggtaggaacatggccaggcacctaacagtggctgctgatttaacctgtcctccagaggaaagcatgtctcacattgggcaaaaataaagcacatgaggtccctgccttcaaggagccccagtctgcagcagaagacagagacagaagcaagcaggccagtgcctgtgctaagtgtgggtgtgggttagtcagcccagagccctgcagagcccaggagaggggtctgggggaggggccaggaagcctgaatggttcgtctcttagagcctcagtctccttgtctgaaaagtgaagacaataacatttatcttgaggggtggggatgagtcacctgacatcttcgtttcagaattccagtggggcctagagcctgcatagatgctcaaagcgtgctttttgaatacatgaaaacgatgttacccctccaaggcaggacagggcagaagacgtaggtcctgggtcattctgggaatattactatgtggccgtgcacaggttacatcctgacgaggtatctgtcctcccggagactcctctgcagaggctgacccctacccccgaggtgggcgggggctggtgccgatgctctcaaggaagtgggggaggtgggcgtggccgtggagtcagtcccagcattcccctgggctgtgacttcgttggtctgaaaatgcttgcacaggtgtgctgagacaacgggtgtcaggctgggggcggggtggaggttctcaggggagaagcgagtgggagaacatgggggcggtggggcgttgggggacaatgggggaactcacgagaagcctggatgtgctggatccgatccgagaaggcagggccgagcaggtggggcactctagcttggtttccggggagacacttcacctgcctaacctgcactcaggtgagcctgccgggaggaggatgaacaggtgtcgtttccagggcagggcctgagccgattggctgacgtggcactgctccttctgctgggctgaggcattcctgtgaagggaggggcttctgtccgctgcagttagggctcggaacacaattcgcagacctgggcagcaggaggaatgtcgtctatctgccccagagcctgggcgccaacccattccacagctccgaccccgatttagctttagctccagcttcaaaaccaacccctaactctagctgcagctgcaaaccctagctagaactcccagcttccacccctgccccagctcctgcgtcacatctcagccccaacccccagccccatttccaaattcaattccagtcccaactccaaatccaacccctaatctggctagaaacctcagcccccaactcctaactccaactcaaattctggactaaggtcctagatcccaacctcacgctcagcccgaacctcgactcctgttcctgaatccagcccccaaacccaacgccaacctcaaacccagctttagccccaaattccaacatcagcggacccccaaacacagccccagtacctccatcccttggccctaggctgcagcctccaaaagccccgtgctcattctccctcaaatgagccccacagactggatcctactggggaagcaggatttgagtgaacagggaggaggggtgaaggcctttcaggcaggagacaggaact

SEQ ID NO: 4688 - DNA, 6000 bp, Homo sapiens
cccacgttcccattcaacagcaaactccagattccaaacaattttggggccaaagagtattgcaaaagattaccaaattaaattctaattcctcatgcctatatcaaatacacacaatcaccagaacactatccaactactgcagcaacagacaagcccttagtgtccaaactgaaaagtcagggtgcttcctctctcttctgtgtttgggcttgatcaaccagcaaatgggaattccttaaggaatttcccaaattgagaggagctgaccccgccatctgctacccaaaaaagacgctcacttgccgggacataacacacaagtacaaacaagtccccaagagtgtccatcctgaaacagtcatggtgcttccctctcggtcagttgggcttgttccgtctacaaatggaaattcctttaaaaatttcccagattgagaggagcagatcctgctgtctggacccacaaaggacactcacctatctaggtgcctagcttgagtcggaggctctgtctaatcaactatagctgcagtggtgggtcagaaaacataatctggtcgttgggattcttccttgcagtgaggatggtcatggtgaatgggaccaatactccaaaagatgtctatctcagggaactgtcactcactgagaagggagtgggtgcctggaggcattggaagcctgtaggtgctatgccttatgcccattgttccctgagactgtcctcaggacggaaagaacagtgcctctccacttaacactatatctccagcacccccacaacacctggtccacaggagggatacgatcagtggatgctgaatggattcattcttttttttttttttttttttaagacgtagtcttgctctgttgcccaggctggagtgcagtggctcgatctcagcttactgcaacctccacctcctgggttcaagcgattatcccgtctcaaccgcctgagtagctgggattacaggcatgtgccaccacacctggcaaattttttatatttttattagagatgaggtttcaccatgttgtccgggctggtcttgaactcctgacctcaagtgatctgcccacctcagcctcccaaagtgctgggattatagctgtgagccaccgtgcccggcctaattatattatttaatccccttacaactatataaactaagttctgtcatccccatcttacaaatgaaagagactgagacacaaggaggttaagcaatttttctccggttacacagctagagctggggcttgaaccttcaagatcaatctagctccaaatccagtgttctttccaccatttattcattcaacaaacatttattgagcacctactctatgccagtcctattccaggaggtagggataggacagtaaacacacacaaatctttccttcataaagcttacaatctaggagacaacatttcagattgataagacagatatatagcatgtcagagtgatagtgctgaggagaaacataaggaaataaaacacaagggcaggggataggaagtactgggaggttgcaatttgagatgaggtggccaacaagtctccctgagaagatgccatttgagaacattcctgaaggagggagggagggagggagccatgtgggtcagaagcattccaggcagatggagctgctggtgcagaggctctgaggcaataggaatgaagccagagagggccttatggcggtgggaggactctgttcctctgaggaaggcgggctgctggagggactctgcacctcctaactgaatcactcgggccactgggttgagaacagcctgtggtgggaacatggcagaagctgggagacagccccacagcctctgtgttctccccacagtactcccattcaccaccttcttgtggatctgcgggtggttcgtccgcaccttccgctttgtgcccacggccacctcctcctcctgaccttcaccgtcaccaatctgaattaccccaacaacctctgctttggggacagagttcaacagccctgtgaagagcctgcctttccacttgactccaagttacttgataagacccagaactagaatagagacttgcccaatcaatgtttaaaccaacgaagcttttaggtgttgtttctcccatccaaaaatttcccttcaaacccctaagggaaggggtaaaggaaggaaaatttcatgggtcccctgctgcagctctgcctgggacagctggcccatgggtctggctgggactggacctggggaccagggtgggtaaataaatgtcagatgtgtgcaagaggaatctgcagccagcaagccctgttgggcccctggctcccctgctcctctgagtcaagcccctttattataaaggggatacctttataatgctttgcaaattggcaggatgaacacctgcaatgccacaccactgtctccccaccccactccgcccaaccatcctcctgatccagactgcactgacctttttctgagggaaaggacatctaaagccatgccatccagtaaggacacagccacatgacagatgtggtgcctgggcatttgcagtgtggctgggataaatgagatgctctgtaagtataaaataatacctaccaaattttcaagacttttggttcacgcctgtaatctcagcactttgggaagccaaggcaggaggatcgcttgaacccaggagtttgagaacagcctggacaacatagcgagacccccatctctatttttaaaaataaaaataaaataccctgtacaaaataaaactgtaaaatagctcatcaataacatatataaaaatgtgttttggaattaaaatgtattaatttaaatgtattaatctcatgggtttctttttcatttttgaatgcagctattagaaaagtttatatatgtagctcacgctatatttcttttttcttccccgtgccccagcccccgcccgcagacggagccttgctctgtcacccaggttggagtgcgatggcacaatctcgcctcactgaacctctgcctcccaagttcaagcaattttcctgcctcagcctcctgagtagctgggattacaggggcctgccaccatgcctggctaatttttgtatttttagtagagacgaggtttcaccacgttggccaggctgctcttgaactcctgacctcgtgatccgcccacctcagcctcccaaagtgctgggattacaggcgtgaggcaccatgcccggcggctcaggctatatttctagcggacagggctgttctagaattatgactggcctccagtcatctccgcagaacaaagcaaagagatgcgaaagcaggtcgagcaccattattttgtgaactgataataacaagataagggtgatcttgtttttcttttctagttcatacacatcaggaggagaaagcaagagacatcacaggggctgatccaggagatgagggacagcctacaacagctccagccagcctgcccttcaccagtccggagggtggtgtgtgtgtggtgccagatttgcctattagaagctcccaccatgtccctattaaactttagaaccctccatgggccccttacacagcccaagtgcctcactatgggccttcaagaccctgaacagcctgagccaaacttgtctttccagcttcctctcacatgcttcctgctcaaaacccccacagctgtcagttcatgctatcatttagtctgctaatcaatcattcaacaaatatgtattgattacgtcctacatactagctactgaggtcatgatgattagcaaaagaggcactgtccgtctgcttgctggggaccacacatctagcagggaatgacaggtaaatacataataggcaattaagcatattgcagtaagagtagttgttggggaagcacaggggccatgggtgcaccaaagaggcacctctaaaccagcctgcaagtcagggaaggcttcctggaggaggtggcatctcagttgaagaatgcaagttgcccagactgaggctggggagtggcaaatatcccaggcaagggagaactcttgagttcaaaaactggaagggcagagaggagggcagggtgccagtggcaaatgactggcctggtgtatatggcaggggctttatgagccttgtgaaggagtgtggcatttcttctgaagtgtttattctgggagttcctgtctcctgcctgaaaggccttcacccctcctccctgttcactcaaatcctgcttccccagtaggatccagtctgtggggctcatttgagggagaatgagcacggggcttttggaggctgcagcctagggccaagggatggaggtactggggctgtgtttgggggtccgctgatgttggaatttggggctaaagctgggtttgaggttggcgttgggtttgggggctggattcaggaacaggagtcgaggttcgggctgagcgtgaggttgggatctaggaccttagtccagaatttgagttggagttaggagttgggggctgaggtttctagccagattaggggttggatttggagttgggactggaattgaatttggaaatggggctgggggttggggctgagatgtgacgcaggagctggggcaggggtggaagctgggagttctagctagggtttgcagctgcagctagagttaggggttggttttgaagctggagctaaagctaaatcggggtcggagctgtggaatgggttggcgcccaggctctggggcagatagacgacattcctcctgctgcccaggtctgcgaattgtgttccgagccctaactgcagcggacagaagcccctcccttcacaggaatgcctcagcccagcagaaggagcagtgccacgtcagccaatcggctcaggccctgccctggaaacgacacctgttcatcctcctcccggcaggctcacctgagtgcaggttaggcaggtgaagtgtctccccggaaaccaagctagagtgccccacctgctcggccctgccttctcggatcggatccagcacatccaggcttctcgtgagttcccccattgtcccccaacgccccaccgcccccatgttctcccactcgcttctcccctgagaacctccaccccgcccccagcctgacacccgttgtctcagcacacctgtgcaagcattttcagaccaacgaagtcacagcccaggggaatgctgggactgactccacggccacgcccacctcccccacttccttgagagcatcggcaccagcccccgcccacctcgggggtaggggtcagcctctgcagaggagtctccgggaggacagatacctcgtcaggatgtaacctgtgcacggccacatagtaatattcccagaatgacccaggacctacgtcttctgccctgtcctgccttggaggggtaacatcgttttcatgtattcaaaaagcacgctttgagcatctatgcaggctctaggccccactggaattctgaaacgaagatgtcaggtgactcatccccacccctcaagataaatgttattgtcttcacttttcagacaaggagactgaggctctaagagacgaaccattcaggcttcctggcccctcccccagacccctctcctgggctctgcagggctctgggctgactaacccacacccacacttagcacaggcactggcctgcttgcttctgtctctgtcttctgctgcagactggggctccttgaaggcagggacctcatgtgctttatttttgcccaatgtgagacatgctttcctctggaggacaggttaaatcagcagccactgttaggtgcctggccatgttcctaccggtgggaaggactggagctggggttcaaatccagagccctcctttttcctttgctccactttagagaaatcgtggaggaggatggcatgggggaatggcgagtgtggagaagagcaaggggagcagaaagaccagtgaggaggtggaggcg

SEQ ID NO: 4689 - DNA, 6000 bp, Homo sapiens
tgacctcccaggctccagtgatccttccacttcagcctcctgagtagctggaactacaggttcataccactatgcctggctagtttttgtattttttgtagagatgttgtctctatgttgcccaggctggtctcgaactcctggcctcaagtgatcctcccgtgtctgcctcccagaatgagccactgtgcctagccaagacttttctaatatttcacagattaagagactcaaatcaccatctcccaaagtaattataactggtggtatccactgttcaacagagatttaagtactttaagcccctaaaaggaaaaaaaaaattattcactgctatctatttattgataatctttaacttagattctaaaacctgggatttaataatcaaatcccagtactttgggaggctgaggccagcaactcaacgcctgagctcaggggttcgggaccagcctgggcaacatagcgaaaccctgtctctactaaaaatacaaaaattagctgggcgtggtggcgcacgcctataataccagctgaggcaggacaatcgcttaaacctaggaggtggaggctgcagtgagctgaggttgcaccactgcactccagcctgggcaacagagtaagactctgtctggaagaaaacaaaataaaacaaaacccaacaacaatcaatctataaataaatttccttatctgtaaagctaaaagaatactacttacaggattattgagtttcaaatgagacaatacatgatttggcgtaagaaaggaatgtggaaacctaaaccctgaaagggtaatattgaactttaccagtaccccaagatctctaccatcaccctattcgataaacataactaagtccaccatgttaaaactatggatcctgggccgcgcggtggctcatgcctgtaatccctgcactttgggaggccgaggcaggtagatcacctgaagtcaggagttcaagaccagcctggccaacattatgaaacctcatctccactaaaaacacaaaaaattagctgggcgtggtggcgtgtgccggtaatccagctactcaggaggctgaggcaggagaatcgcttgaacccaggaggcgcaggctgcagtgagccaagattgcaccactgcactccagcctgggcaacaagggcaaaactccgtcttaaaaaaaaccaaaacaaacaaaaaagactatggatcctgattcttaagcaaaattttaaagatcccatcttctattcaacaaatatagttgatggaatagcacccaaataaatcaaccaaacttagtttcacaaaaacttaagcttcattcttccaagaccaagagcaacagctaaaaatgtatgcacctgctcctctccatcttatttgtaaatacattcgttttctaggcttcagtggttaccaacccccacattacaacaaaaaggaaaaagtatagtcaaatcctgtaaaataaatccctactaaatttcaactttgtgtctgaaaattgtaaagtgttccttaattactgcataaggaaatactacctttataggacaaaatgaataaaaagttaattctaaagaaaaataaatccaatttaccttgtttgaaacttttttcaagtcaactatatatggggctctcatactgttttttaaagctatacacaaaagtattcaaacatttactcttcctagtgctacaaagttcaatgatgttgtaaatggtttctgcctataaatttggttcgttcaaattaaattttacttgactgactcacagagggagtggcctgacttttgctgttctgagtcagaaaataccccgttcagcagttcaaaactatttttcatctataaaggtgttctaaaatgccagccttttccagctacaaaatctgttgccttagtagaaagatcttagtggtaataatactttgaatctgtagttcaatttataattaacaaagtgctttcacgtgtattttctcacttcttctgatttaagtgtcccacacagctcaacagagaaactttgatacagtggtaagttctagttcactcttggccccaataaatatactctcctctttttccaaaaaataaaaaacataagacgctgctgcatttctttaatcagacttccctcacgcagacatatcccaggtgcctcataaaaactgtctcaaagcacacaccccggggccccaagagagtttcaaggcataatctcctcccacataaaagcctagcttaggccccaaagagcctccagtcagcatctcctaaatgatccccttgcctccagccttctccattagtttcaacagctctcctaagtactagctgctaggccatcacgttgatgagaaacctcaatataagaggagctactgagagagtagtatgacgtattggaaaaatcaagggctttagagtcaaagacctggatttttaatccagcactaattattatctgtatgacctgggacaagttacttaaccttttgagtttctgtatctcttcttctcaccactgtaaatccatgggagctcatcgctgtatccctagtgcctggcaaatagaagtgattcaaaataagctaaatggatgcaaatgaagataccacctttcttgtagttgtgagaattaaatgaatataaaaagcacctgtagcacaggaggaaattaatactaatcaattccttccctcactgaatagtaacaatactatttactatttctttcttcttattttttttgagagagggtctcactggctcactgcagccttgacttcctggactcacaagatcctctcacctcagcctccgggatagctggaactacaggcacgcactaccacgcctaacttttgtattttctgtagaaatggagtcaccatgttacccaggctggtctcgaactcctgggctcaagcgatcctcctgcctcagcctcccaaagtgctaggattacaggtatgagccagcttgcccagccgaaaaatataatttctaacttttaattacacatcagtgattttgcctgtaattctattatgttcactatcaaaaggaccaccctcacgcctgttaatcccagcactttgggaggccaaggcaggtggatcactggaggtcaggagttcgagaccagcctggccaacaaggtgaaaccccatctctactaaaaatatgaaaattagccgggtgtggtggcacacacttgtattctcagctacttgggaggctgaggcgggaagatcatttgaacccgggaagcctgggcaacaaacagagcgagactccatctcaaaaacaaacaaaaaaaaaacaaaaggaccatactactctttgcttatactgaaagactaccaacttctatcgcttctcggccttttggctaagatcaagtgaaagactaccaacttctaggagacattatttttaagataacatcatttttaagattatatcaatgtgtaaaatccctatcaaggtactactcttcaagaatccctacttttacaacacaagaatgggaaaagtccatgataataattagtccattcattatgaaacttaaaaatgccaagatcagaataccagcaaacaacttctcaccatcttcaccaatacaatggtgtgctggcaagtgattctgaagccctgataatgtgtcattctgtatccttaatctccttttgcacactcagcaaggcataacttcactcacttccctctgaaactactctctcttacagagcatgacagcaagtaccatattccaactcagcagtgtaatgtagtttggcgactccggacagacaaacatttgctgaatgcctacagtgacactagaattgctagtcactgctaatttcttgacaaattccaggaaataataaaccagactacagttcaatttacctaacaataaaatactcttcacctgaaaaactagcagtactttacaaaagtttatgctcctgaacactctacaggccagagtgtaggattttgggcaacagacaaacttcttttcgttagctctcaggggccccagactaggataggatggcatcattgacaaatttgaaaatttactttgaagtcatgaaacgtgggagaaaaaaatgtatagaacaacaacaaaaaaacacatcacatcctttctgggggaaaaaaattaaaatcccagagccagaagatcatagtgccgctggaggagacttataccccctttcctcatacttgaacctgaagacccacggacaagatgctcccggaaagaactccccaacccaacacaccagggttcactatcgccacacacaaagaccaaggggaagggcctctaggatgcctgctcacacactggacacacgccggcacaccctaccacactcctgcctctgccacgcaccttctcaccgacacacaccatgttctccccccacactcacccgctctttaccacactctcaactctctcctcccccatttactcactcattctaccaccacccctcatgcccacacgctccccacacacccataccctcccctgccctcacccacattcccccaacatcgacactgcctcccgacgcgctcccactccccccacctcctcgcacggacactcagccctgtcccccactcacacgccctcccttcaccaactcactctcccccacgctcgcacagctctctcccttccacacacacgagcccgcccctcgctcacccaccctcgctcccccgccccggcccggcccggccctccttccggggacgtgtctccggcctgcactaatggctgcggcgcctcccgccctccccttccccgaggcccccggcgccggcgcgggggccgcccgggaggggcgcactcacgctggcgagctggggactgggcattgaagtccggcggtggcgggagcgaggaggcgcctctctcctcagtcacctcggcggcggcggcggcggcggtagcggtggcggcggcggcgacgactcccccccagcctcggcgcgcgacacccggcccggcccggcggcggcggcggcggcgcgtctccacgagtccgtcttgctgctgctgctgcggccgccgctgcgtctcctgctgccgccgctgcctccgctgccgccgctgccctgtggcgtcacctcgcgccgtgcccggccgccgctgccgctccagccgctcccggacagacgacggttacagcccggccgatcgcgccgccaccaccaccgctgcgcgcgcagccggaaccagctcccgccgccgcccctcagggggcgctgcggggcgcggcgcgcagggccaccggcccgccctccgcgttcgctgactggctggctggccggctcgcgggcagttgggcccgcccacctgccccgcggggcgctgacccactgccctgggcgcctcccccgctcctcctcctcgtggttcgttccgctccgcactcccggctacggaaggcgagtccatgtgatcggggagggaaggcagaacgtggcctggggagtcgctcgcccacgctgcgccccgcccatccgcacctgggctgggtcgagggcctgcagccgaggtgtgacctgcaaggtcgaagggttctttctcgctacttggccctaaggcctcgggtcagatcctgatgggacggggtggccgccacgtcctgggcttggggatttccaactcagaagtgggaacctggccagctcagttctcggctgcccttcctgaggccccaaatgaatggcgtgtgcatcttcgtcgaagatattaatacgccacccccagctctgcccacaagacacacacccaccctaagaactgtccctgacaagccaaaattcagactttcaggatgtaggatcttgggcaagtgattccaagtattatcaactattaaatggaaataataatcagctacctcatgggctctttcacgtatcgataacaacgtatgaaaacgct

SEQ ID NO: 4690 - DNA, 6000 bp, Homo sapiens
gggtcctccccttccctccttcccttccctcactgcctgcagctgagcagctctcccggggagctttctctgtcccacaccaggagcaggagattcaaagtggattgctccctgcctctcccactttctagtttttcatccaaaacatggcttctctggacattgaggtccagagaagttttgggacttgcacagggtctcatagcaactgagagactgaagattagaactcacaaaccccaagtttccggaaggaggagtcaaacttttagaatctattagaaagggcaactaagactgggccagggaagggtggccttggaagtgagaaatgagacctggcacgttggcacccccacccccaactcacaacacatcctctccaaggctggctctcccctgttaaggctgcctgtttctctgcttcctcatctgtagcccctgcaggggcccgtctagaccatgtaagggagcatgctggcgtcttccatcaggtgctcccctcccctccctggattttcagactgtactcttaaaaaaaaaaaaaaaaaaaaaaaaaaaacctaaaattactctggttcccagtagaactcactccatcttcttggcagcttcttgcagctctcacagcccccaactacacacacacctatcctatgcctttcatagaacaggactgcttccctccctcccatgctagctccaggacttcctcctccaggaagacttccatgactgacatttcttggccctggtcaccctaataacaacactggctaacatttatcgagctcttcccatggaccagacattatgccaaaccctttgcaaacatcatctaagtgaatccacacaacaaccctatgaggtagatcttaaccctgtttacaggtgaggaaactaagtcacagaagggctaatcaactggctgggggttacatagttagtaagtgatagcttgaactctgctttgttgtggcaaatgccacaacctcttactctctgcctccagcatcctgcctccatcattttggctgtagacatcccctgcaaattaccctgtatctacacacacacacagacacacacagacacatatgcacacaccatctaacctgtcaaacaagtccagtggttatcagttatcacaggcaatcttaaagggagtgaattcgtaagaaagcaatcagcagtctgaatgggggttgcttggtgtagcggcccctccctcagccctggtggcagtgggcgatgaaaatgggtgcttaggtgtgactgcaagtgcatgagcctgaggtcttttacaactagctgcgtgagacaccttttctggcaccatctgtttactgacactgctcagccttgcgggcccagagtaactacccagatctttctgctcagcaacaactccggggattgtctgcccaacaagttatgtgctgtctgtgtattcctgtctctgcatcatgtgcacatgcaatggaatagaacaagaggtgatacttttgtagttaagaagtgtgacaattgggttttcgtgctcacatgtgagaagtgcctccctcaaaccttgttatgaagtcagcacattactggtcttctttttttttttttaagaagaaagaaaaaagaatagaacaagaggcatcatgccttctcgtcaccatcagattggatgtcccagagccaggggctccatctccctcttggtctatttccagaacaggccctaaccagggagaatgtcaaaaccccggtgagtgtcaatgagcctcgctgagactatagtttaagaggaaactgttgcaaaaaagagagacatatggaggattgtgagtatctgaagtccgtcttcccaaccttgatcaaacagggctggcattgagcccaaaagtggtaatagtttttggacatgtgtgtcaaggcaaagaataccagttggctataaagacgcctttctggtcttccctagaaccaagatggagaggtggaagcacctacctcatgaaaggtattggctagaaggagaaaatctcacagccgtggagtgggggaagagatgtgatgtcatttttattgagaccaggtcaaggaatgtgcaagaggacttgcgggtaccttctggagcccatagctcctgggcgcctcctatagttctgtctatggcttcttctaaggatcttcgagtcttctctggcctgctacttcctgcatgtccaagtgttttaacatttttcattttaactctgtgtcaggaggacctaagtccccactctccctcccgatccccaacccccaattttcaccaactggttgggctccaagtccccagaaccagccaagtattgatcaagagttgccctgacagtcacctccccagcacacagctctcttcctccagccacaaaccattcccttgaattctacactcacccactaggctcaattttcttctggtgtggagaggcctggtagtttacctccacctccatggagcacccataggaggcatgataatactagccaccatttcagagttaccctcgggtgtcaggcactctggggactttcattgaacatattatctcatttaatccactcagcaacctgcttcctcatctccatgtacacatgaagaacctgaggcttagaggtgttcagtgagtgattctcagtaggtggcagagctaggaaggaaccaaagtttgagtggctcagagagaggcactgctgattatatcatcagatgcgaatctgtgctctcctcagcaagggctgggatacatggggcagggccaagctggacatctcctaacatcgctgaaaagagaaaggagccccaagacttccccaccctggctcttctgcatgccagctctcaaccccaccttcaggtgcctttctggtagagctgttctccagagagggcaaagaaagaaaattcctcctctgagacaccctcaggacaactgtaggaatccttcatgcaccatccagatgggacccctccccagcccagggcaggggacacggtcctctgccacctccttccaatattccagaccccactgctaaattccccatattgcctcaggacccatcatactctttatagctcccactccctctcttctctccacaactctcagaagcatcccctgagtcttgagagagaggggctttctcaatccccaggaagacacagaccagctcagaaaaccccacctccactgaacccaaatgcagacttcacagctccgagggaattgtggcaagctagtgggaaaaacttctgccagcatggatggtaggatgcttgaattccaaaggtgacagtgtacctccttccccaagtccttctagaaaaagggtcattaaccagtctaggaagacttaatgctgggaaaggaagctctggaaggccttatctcccctgccccttcaacccaggcaagggaccttccttcagctcacccagagaaaggctccacagaagtcacatctaaactctttagccacaggaccctgtcttcaaatgaaccaatgtcacatactcccaggatagaaaactgctgaaagaggggctggcctgtgtgtagggtggggccggagcctgccctgctttgccagatgctgagcgcccaggctctgtgcagttggtacctttattcccatgattgcctctgccgtcacctactgcactgtgaaggattccatttgtccttctagatggacattatttttctcttcccactcccttacctggcccacagcctgtgccttttggagtggagggggacatcccaacctggggacagggacatttggagaggagccccatgaagagttgccctctgggaccctctacctcccaccaggacactcccaacactgagcatctttagttccacaaattcttgctaggcccctataaagattcacccagcctcctcttcctctaagctcccatgtgctggaaccccaaagccataaggagcctctctcaggccagaaggaactctgggatcctagccctcagcagaaggccccaccaggctttcccacctgctcccagctcctctgaggaagttgatagagcctgcagagctgggctggaggaggtttccttgccccagagcggggctgggggtgcaggtgggtggcctggaatgtgctctctcaccctcctcctgcccaggtggtgagcagccagagcccccagccctccagctctgaggggaagctcccatgagccagacagacaggacagctgcccccagtagggtccccttcacgcgccatctcaccccaactcagacgctaaaaatggttctctggttttcagcctcggcgcctgcccacaaattagtgtctccaacacagcctcttgggacatgactttagggaggcccctgggggagccaggaggccccagtgaagggagatggtgctggcagagtccctttctgaggagacaagagtggataaggcccccctcccagcttctaggaaacccgccccccccgcccccacgaaggccacccagcctcagtgtgacagccctgttgtcctcaccatggcagaagaacagacattatttccaccctactggggcacgctcccctcacctccacctccagttctgtcagctttaccctcagccaccatcccgggcactgctctgctagaagagaatgcagcaacaggagatggagcagccagccccgcgccctcccgctcagggtccagaacccacctcgccaagcctgggctcccatagtcagcccacaagcacggaggccaatggggaagccaagtcagggaagcccggtctccctgctcgcctggtatttagtctcagactcttctcccctccccagtcccgcaacggtcaacttggaagggggcaaaccctctccgggatgcccatgccccagggcaccaagcaagcaggtgccctgctgaggccgggactgggcgctagccagcagcccgcaggaccaggcggggacaggcgggcagtactcacaggtaagccgtcagggggtccaggtcccccggaacggcggacagcccgagctcagagcagtcggcagacagcatgatgccgtcctcctggcagtggcagggggccgggcaggcggtgggccccgggccgggctggggggcgccgccggccctccgggaagcgcacagcgcggcgcaaagccatagcgcccggagccccggcgggctgggcatctcggcggtcgggctactggggcacctggcggccgggcgcggacgcacggcgcgatggccgcagctgcttcctcccggtcccggcgggctgcaccgtcggtggggaccgccccaggggctctattgggcggcggcggcggcggtgggagcgccgggacggtgcagtcagagaggggcaggcattgttgagtgatcttcgttattcagtttcacaggctgggcttggcaagggagggagacccagccggaggaggagtcaaggaaactttctacactgcggctcgctcctcttccctccttccttcggagctggcaggaatttcatccaggaaagaaaaaaaaaaaaggaagaaagcaaagaaacccaagcgagcaaagctcagcccgtcagagacctgcatttgtttggatagggtgtcccagggccttggccgcagggctggggaccctcttgcctttggggacagccacgaggtcacatgggacccagaggaggtctctgaaagaggccttggggctcccattgcccctcatgcctccaccacgtttcacactgcaggaaactgagacccaagaggcaaaatgatttgttcaaggtgacacagctgatgggacatccccagagctggaactcgtccaccctccctggcctgtctgctaggacaggagagaggggagtgaggggctaccctggaagaggccaggctgcggagggttccactgcaggctgggatgacccgacggtgggcaaccaggagc

SEQ ID NO: 4691 - DNA, 6000 bp, Homo sapiens
ggcacaagtcaaacagccagggatggccttggaaggcattcggctgggggtttgggtgctgcagaggtatcagtctagttgctttccatggaatgtcctaattcttgagacatccaggctcaaaggagctccttaacccttctggaggcctcctgtatctctacagcctccctggaggaaaatctgtctaatagatcaacaactttatctgctttacactagggggcagtgtctgtctatggacaacaacagttttcctgagggtgtgggggccagtgtgggtttggtttctttgaccaaaccactgtgtttgtctctttgccccacccacctaaactggtgaaaggcaaaagttcccagatcaccataaaccctcaggagacccaacctccaggccactgtgtgagggctaattgaaataaaatttgacagtaggagctgcataaaacttgctcaaactgacagagagccctggtaaatggccacatgttttggactcatgaaagggtcttagtaagaccataggttctcatcatggctgaagcctcagtgatggtgagaacatcctggggatgacagttagtcttttataactgaacaagagcttcactaatgcttatggtgtgaacttcatcacttgcttatgccagggaggttagaagaaccagctatgatctcagccatatctcatcagacctaagaatttcctgtggagggacatggtgccacgtataagcagatagggaaggtaagctgtgatagcattctacatgaagtttaacaaaacaggctgaataaaactcactctaccccaccctcctgtgtttaaaggaccacaattcacagccataattgatcaaaggaatattgatttttaaaaaagaatgaaccattattctcatacagcaaactatagtattctctcttagatatgcatatcttcttccctttaccatcttttcacttaaaaatatttaatatggaaaagcaaaaaataagattcatgaaactactatcacaattaacaaatgataacagatgcaatctcctttgtaccctcccctaagcccaccccttcccttccttcccaagaggcaaccaatctcatgaattgggtgtggatctttctactccatgttcttatatttctatactgtttatatatatttatgaaacaaatatagcattggtttgtgtgtttttaaaatttgtattaagaatatgtgtcacatagtatacactgttctgcttttttttcacttaacattgtgttttagaaattcctccatatagtcatatatagatctagttcatttatttcagacgttgtattctattaaatttataccacatcttatccagtcttgttttgaaagtcaggtggttctaacttttgttataatagacagtgttgcagtaaacatcttacacatatctccctatgcacgtgctcaagggacaatgtgggatgtgtacctaggagttcaatgctaggttttaattctactagatggtgccaaattgttctctaaatggggtatagtttctatttatcatttcatcacacttgtactgttagattgtttaatgtttgctaatatagcaagtgtgaaatggtatttcatatccattttaatatgcctgtcccagatgaccactgaagttaaaacatcttttcgtgtgttgactattacagtttcctcttctgcaatcattctactttctaaaatgctgagaaaagctatttattgcatggataatattaatgcactggtcattccaggatctaaaaaataaggttattaagtatatatatatacttaatatatatataaaaataatgcattcctgaacaccagaatctaagatgagattcatagcacagcatcacaattttgctggtgaatgcttgttatagattacatgttcctgatagtaaatgggggctttaaattctgtgcaaattataatataatgtacgattcatgattttgaggaaaatgacaaagcaggagcctctggcttagaacaaagaagtaacgtccattttcattgcatgtctaaaggaatcaagaaacaatgaattgtattccaaccctcctcctccagagagcctagacaacaagcaaacacatacacaaacacaaaatagtgacgatggcagcaactcggaatcaccatcagaagagaaacagtaatatgctaaatagaattattcctatttaaatatcgcagatagctctgatcctagggagagcaagtacattttgatggtaagaatgtttctaactgtaaagcttattgtttattcataagtcaaccatttttacataggcaatctttttcccttcactttttgtttatgtacattaataccacatatcaccattttcagggcatttgcatcttacgctgaggaaaaatctgcaaaatctgcatctgttctttagttatctcaaagttgaatgctattgagattccaaaaattgtgtttgcaaggagtatgagggcaagtctcctagccaaaggaaactggatagtgaagtaacttttgatgatctacatgatggtaccaataattcaagaaaacagttaaccaaaaaccctttagaattggctttgctatgtggttttgtcctcttagtttgaacatagatgtgtttggggtaaagggaaaatcatttttaaaaataataataatggtcccagaagaaggaaaatgttaaaaggcctgtaaaatttccacctctgtccttctggttttgtgcctctcagctggggttaatcattatcaaatcgcagatggggagaaggctcccactgaagcagaggctccctctctctggccttgttgctgtgttgttggtctgccccttccttgggcaatggtacgaaaactcctttgattttaaaagcagaaaaaccccctttcatttaaggcaactgtgtaaaaagggcttcttactctgctgggggaagcaaaacctcatccccaagaatgatgaaatcacctgtgatacaactgagcaatgggactccacagtactcccactccacagaccagctgccgtaatacaaaacatctccaacaacagacttggtagagaggtctttggggatatccactctcatacccagggtagctctgggtggctctacaaccccctggatcatgtatctcaatggggtaactgagtccttaaaaacacgtagcatgtgaaggattcacttttgcctaggctggcatctcctccactggtataagcacagctacagggcatcttcccacccacatctataagataaacaatcagtcactcatccccaacactctaagacctggtccttgtaccgcaaatactgaccataaatcatccaaggtttagtgaacggtcataggcatgggcttggaactttttgatagcaaactctaactaactgggtcaaccataaataaaagtaagttagagaaacttaacaggtcctaaaccgagaacactggcctttttagaacctcactctactgaagacaaacttactccaagttagtggatacttggctaggcaaataagaaaatgataacaggaagtgaagggtagggatagagggatggggagctgggattgttcaagaaaggatgtatgttcctggaattcatggctggaacagaaaaaaagggttttctcaaagaaactgttataaataaagatcaggcatcatggttgcaattcttctttctcggtattaaatactcttatcatttagcttgaacgttttttctccctggggaaagcttgtttaaagctaaaacaacgagcttaaaagaacttcagaataccacatattcgtgagctgagaactgttcggctagaaaaagaactgactccatcatttgaaccgtttctggctgatgatgaaatcaactgaacttccaaacattttaatcaataagtcaacccctaccttcccccatcttcctgttgagccactgtcttatgcaagctttaagcaacttgtggactggtggctatatccatgaccactctgtacttcctgcagaataactatcatcacatgctaactaaattacttaactgtctgcctgccccacccgcagccactggaatgcaagctcctgagggcagtcaatgatttgtccaccatggcatccctatgttcagcacatcctagcccgtattaaacctgatgactgaaggaaagagtaaaatggctggctcacagcaaatactaagaaaggatttgtgaatgaaatgcctctggcatattgagagaagcgactaatgtcaaatgagccatttaagttggtgaaggactaatccttgcctggcgcagttaatctgtagtgacctttcgcatatggaatcgatattttgaggctggggtgtacaagtaggttctgagaattctttataatgaagaagtgattccatttgataaccacacatggtagatggcactattcggctcacgggagtctcagcccaaggctggcgcagggccgaatgagccagcagaacttaaaccagagggaaataaatcctatgctttgaaagcccctagaagagtaagccccctcaagcccaggaaaagaggcagaggacacccggcgcagagggaggcgatcctagacacaaccttttgtctgcagattatcaagactgtgtcctagattccaaggtgacagtgccacaggtagggtaacaattcccttcatatttgcagcgtgttataggcaacagcgtagggcaggtaacacaattttgcatccctccttaaccagcatagcggctgagaaacctcccccaacacgctccttccaccactcaaggtggcggggtggagggcccagcagaacccaagaggctctgaggccggccggcgaccttgacgctgccggccgggcccaggccaccgcgcggcgcctcgcccctgccccaccccgacgctcgccacacctcggtgtttgcagagcctcggcctcggccccggccccggcggtctgggagcggacgcctagccctgcgccgggcggccctgaagagggaaatgcggctgcggggccgcggggacttacctgcagcagcacggccagcaggaagcacaagtacatctggtagatgcccatctcccccaccgcctggaacgcctcctccacctccatggcgggccgcgcgcaggaaccccgccaccccaccgccctctcaggcgctgccctcccgcccagcgcggcaacccctgggcgcccggcaccggcttggacccgccggggcggggatggaagcgctggcggcggggccggggcgggccgggccggggcggggcgcctgcgcgggcggcggggctgtcaggctcgagaggtggacgccgggcggggagcggggagcgcagccgggctacgcggggcgaggggcgaggagggcgttcgagatccggggctggatgccctggacccgggcctctggacttcctgtttaaaaaaaaaatggtgttttggtgtacgttttgttttgagagggaccgctgtctgcgccttaaagtgaggaaagaggaagtgggccgggctgagggcctgagaagaaacatcgggaccgcgtccgcgtgtgacccagggctctgcctacaggggacccgcagctggcgggcggcctggcggctctcagcaatgcctgtcgttttgcccaaaccagtttaatgcgggggcttggggagccctagagccttcagagaaaagtgctgtctgtgcagcatttctttccagtcctattctgtgctagccatgggttaagtacactggtaggcaagcaaattcttgtaaaaccgtcggatacatttgcttatagaagtatgcacgaggtacaaaggaagtgcaaaagacgaaggggcaggatgtgatggctgccaaggtatttaaaggataaacggcagtttgtcaggtggaaattaaaaaaaaaaagcgtggcagggccaagggacgctgg

SEQ ID NO: 4692 - DNA, 6000 bp, Homo sapiens
cacgagcctgttctgaaaatgtggacgtaagacaaacacgtgctcgtcctttaatggagttcaccagcacacttgttaaccagtcctgtttgctttcgtctttttttgtgcgtaataaagtcaactgaccaagtgaccatgaaaaggggctgtctggggctcctgttttttagctgctgttcttcagctccgaccatgttgctgtgtgattatctcaattggttttaattgaggcagaaactgaagctctaccaatgaactgtttagaaacaagacacacttttgtattaaaattgcttgcagtaacaaatattttgtatttcctgattttcttttcaactattaccttatctataaatgttaccctggggtataatcatgttgtaggtacttaaatgcattccgcaaatcaaaatatcttgatggataaattatagagcttaatagatcttgttttatttcatccttgttaattttgtttaatatggctgggcatggtggctcacgcccataatcccagcactatgggaggccaaggcaggaggatcacttgagttcaggagttggagaccagcctgggaaacatagtaagaccttgtatctactaaaactaaagaaacaattaggcatggtggcacatgcctatagccgcaactactagggaacttaaggtgggaggatcacttgagcctgggaagtcaaggctacagtgagccacgattgcaccactgcaccccagcctgggtgacacagcgagaccctgtctcaaaaaaaaagacaagctattaacatgaacatgtaggatatctgtcctacttacatgattaaacaaatagtattatgtaaaaagatactagaaatcatggagatcctgggttctcagaatgggaccagtttgtcacactatgtcacagtatgctgaaatttctggttaaatggtagaatttcagaggtggaagcaaaatcggtcatcatatctagctcctttgttttacagatggagaaactgggatgggaaagtacaagagaaagtgatttccctgagctcacaaaatgaataaatgacagaagtgaaccttgaatccagtcctcgactccctgttcaagtctggcacttctatttcctccagcctctagtcagttggctttataatagagcagccaaatgttaacttagtaataagaagaaaagggctagaggcttcggaggtaaaggggctaagactcatgccacctgtgttcttggtcattaggccgcattccttaggacataggcatttggtgagatcgatgcatgtttgccaaagctgttaaggccaaatacccagattaaaaggaatttggagcctaatggattctgaaggaagtgcttactctgttctccatggaactggggaacttcaggctgccaggactttgtataggatagtgttttcaccctaatttgcttccccttctaggcctcttggcagcagaagcatgtgagaccagcttgacctccatcttcccagattgtgggttatggtccagaatcttaccaagtaattaaggttttctggggttttgtggcaaagttcagctggcagcggcaccaacgaaaagtgcatttctttttttttctttttttttttttcttttttttttttttttttgagatagggactcattctgttgcccactggagtgcagtggcgcaatctgggctgaccgcaacctccgcctcccaagctcaaactattctcctgcctcagcctcctgagtagctggagttacaggcacatgctaccatgcctggctaaaaaaaagtgcatttccattcaacaaatgcctgtacacaagaccatgtaggaaataacaagatgctaggaaaagggttaaagtataatcacagtcctgggccgggtgtggtggcttattcctgtaatcccagcactttgggaggctgaggcgggtggatcacctgaggtcaggagttcaagaccagcttggtcaatgtggtgaaaccccgtctctactaaaaatacaaaaattagccaggtgtggtggtgggcacctgtaatcccagctactcgggaggctgaggcaggagaattgcttaaacctgggagacggaggttgcagtgagccaagattgcgccattgaactccagcctgcaagaaaagagaaactccatctcaaaaaataaataataagtaaataaatatatatatatataatcacagtcctgtgatagaaatgctaaatgaggaaggaaaatttggtgtctgctggggccttgaatgatgcaataactagctcatatttattgactgcttactgtaagccagtgattgtgctaagtgctctatatacattctcactgaatacgcttaacagttctatgatcattagcccccttttcttgataagacactgagcctgagagaggttaagatcacagagttgccaggtggctagggaaaacccttgttttgacactactttctccaagaaacctaccccacctcagttcccttccagtcctaatgttctggattccactcatgtggtctgctcccacttccccgctcctctgcccttacagccactttgctggctcctctgggagcacagctttcattttgctttgggaaattgccgtgttcaccagctgtcacccctgttgctgtgggggctgctcaggggcagggggcttgtctgctccatctctggttcagggcacagcacagagcagctcacggtggttgttgctgaactgaagcgtgggcagaggcccttggaatggctaaaatctgctgtttaggtttatgggaatgtgaagcccgttgtttagaaaacacagctctatctccacatcctaaattgagaaatgatttctgttataagaatcagcccagcactgggcagcttgcagtctagctgggagcccagaattgcacaaaacaaacctgagaattgtacaggctggatctagggcctcaagtgatgtgcagtggattcaaaaggggcgtgcagagaggacagtgaagggggtgtgggcaggagattccgagactctgaccaagatgacatggggacaaagccctgtggattcagcctcctaaacagctttctcctctgcccctccaccccatcaccattagagactcatggtcattgtacccacccccacatctgattgctgtacctgcctccaactgcagggccctgactcctgtctccctctgatccatattccgctctgcttccaagctctggtcttgggtactttcaacggttattctgcattatccttagctcagtatccttatgggacagtcccagtccgcagggtagccccggcttctaggcggtggcatccacatctgctctgcccggagctgatgcaggtgcctcatggggggcgctctggggaccgcgcagaaaatttacgagcagtgtggaaatatacctgttgggtaaaagacaaactaggcgtgtgtttaaggcaccagcaaatgactatttagattaagaatttgttgtagaaaattttattgaagtgatgacttccaaatgtgatttttgggggcattatacacttgcttcgaggtttaatcttcaatccacatggcggggcaccataatctctggtgcccagggccctcgtctagcccctgtgaggccctttgcggtgcctcccttgccagcccctccagcctccgccgtttgccccctgggctctccagtttccactgcccccctgcccgagcgcagctccactgctgtgtgacctggcgtaagtcccttaaccgccgtgtgcctcagtttcctcatttattaaaagaggaggttccagtggtatgtaccccctaacgatgtgcgagcatcacagaaatgacacgagacacacactcagaacatgccttggcgtggcaagtgctgactgttgccattattaggctccccagccggggtctcagggccttggcacaagctattccctctgcctggagcactttcctccactgacctttcctggcgctccaggtcaactccaggagccttcccagtgcagtctaggtgccttctccttccgcagcgcctgaaccacacaggaataagtaaggcgagagcgcgcccagggaagagcaggtgtgcagaaagggactgagtcagtcgagacgtttccgcggggatccttctcttggcaggcctgcaccggggccgtggggactgagaagatgtgcacaggtggctcccgagtgctcgggaagggccccagagcttctggcccagctggaggcaggaggcggagcctcctccgcaaagctggatcagtaccggggacgcagggcgcacagctagggctggcgggggcggcccgactggggcgctgcctgggctcacgcgggagccaggtgggggacgcagggagaagcagccgagcaggtgccgagaaggaggcgcccgcagaagcgcatgcaggggccacggggaaggcgccaggaggcggtgaggggccgcggtggccggaacccgggccggctgctgcgggcagaggaacaggccccacccgcggggcttggctggcaccgcccggctctccagacggggctacggccgcgtgtcgggcccggtggcgaccacggcacaccacggcgaggcagccgggtggcaccactggcgggaccgggacggcgccgcggccttaggatctctgcgccgaggcccgcggcgggagccacgacggccctgaccacgctgacgcccaggctgcgggctcctcgcccggaccaaccgccagccacgccgaggtcgcacctcggggtcgccccacccgcaacacctgccgccgcccggggctcctagcgggcgcggcctccgcgcccaggccccgcccccgcgcccccattggtcagtcccgggggtgggcgggcggcacagacggctgagccggggcaaggactcgcgggaatcgcgccgcccgggtcgctgccggagctcgccggtcgcccctgcgctgcgcggaccgcagccacagccggactggtgggaacggcggcgacagacggattggctgacagtcccagccctcagaacagccccggcctcgaagcgttggcgtctgcgtccgcgtcagcgtccgcttgtcccggagccggggcaggtgcgcgcggggggcgctccagggaccgcgctgaggccgcagacgccgcccgccgagccccgccccctgctcgccgaactcagctccccgttcgccgtcggggcgtccccgggcccaggggcggcggcggagctgatgtgcgcccgctgagcgcccccggcccgccatggccgcgcgccccggaccgctctggcttctgggcctgacgttgtgcgcgctgggcgggggcggccccggcctgcgacccccgcccggctgtccccagcgacgtctgggcgcgcgcgagcgccgggacgtgcagcgcgagatcctggcggtgctcgggctacccgggcggccccggccccgcgcgccacccgccgcctcccggctgcccgcgtccgcgccgctcttcatgctggacctgtaccacgccatggctggcgacgacgacgaggacggcgcgcccgcggagcagcgcctgggccgcgccgacctggtcatgagcttcgtcaacatgggtgagtgcggccgcccgcgcggggaccctcggagtaagctggctgcaggggaggggcgcgcatccgcgggcggtgccgggccctggccgaacggggaatcacagacggtggacgcgaaccacaggggagtgggaccgccgtggttagggaaggtctaagggtcatgggggccccctgggctgcggggtggtcaggagcagagtgtgggggactgtggactcccaggcgctgccttcaccctgccccagacacacccaggagtaagaattaggtgatgtctttgcccacctgggctgccccgggaagacagcctggtcctggggagacaggtgagtaaacagaggccggga

SEQ ID NO: 4693 - DNA, 6000 bp, Homo sapiens
acatatttcttttaaaatagccaagtcaaattcatggtatacaaattttaaagatagtaaaggggccgggtgctgtggctcacgcctgtaatcccaacactttgggaggccgaggtgggtggatcacaaggtcaggagatcgagaccatcctggctaacacggtgaaaccctgtctctactaaaaatacaaaaaattagccgggcgttgtggcggggtcctgtagtcccagctactcgggaggccgaggcaggagaatggcgtgaacccgggaggcagagcttgcagtgagccgagattgcgccactgcactccagcctgcgtgacagagtgagacgtctccaaaaaaaaaaaaaaagatactaaaggtagcacctctcagttacccagcagcaactactattttcagtttcatattaatctctcttacctaagagggttaccagagccccaggaaataaattttttgttgtaactttttacaaactcccattgtgaaacataagatacacaaaatacaggtaacatagatgtacattttaaataattataaaaagcataataatgaacacctataaccaatatccagtttatgcaatggaacattaccactaactttctttttttttttttttgagacggagtctcgctctgtcgcccaggctggagtgcagtggcgcaatctcagctcactgcaagctccgcctcccgggttcacgccattctcctgcctcagcctcccgagtagctgggactacaggcgcccgccaccacgcctggctaattttttgtatttttagtagagacggggtttcaccttgttagccaggttggtctcgatctgctgacctcatgatccacccgcctcggcctcccaaagtgctgggattacaggcgtgagccaccgcgcccggccctaccactaactttcaagtcttgtgtgcccatccctcattgaatgctccgcaccccaaaccttaacttgtcaatagtcctcatacacttcttcactgttttatcgtgtcaccctaaaaaagatgcttagctttgcctggttttcaacttgatacaaatggaaaaatactttaagaatccctctgcaacttgtttaaaaaaaaaattttttttttttgagacagggtcacactctgtcacccaggctggagtgcaatggcacaatctcagctcactataacctccacctcctgagctcagatgatcctcctgccttagcctcctgagtagctggggttacaggcacacaccaccatgcatggctaattattaaacattttttttttttgagatggagtcttgctctgtcacccagactggagtacagtggcatgatcttggctcattgcaacctctgcctgctgggttcaagcaattctccttgccctcctgcctcagcctcccaagtagctgggactacaggcgcatgccaccatgcccagctaattttttgtatttttcgtagagatggggtctcaccatgctcgccaggctggtctcaaactcctgaccttgtgatcttctcatgtgggcctcccaaagtgctgggattacaggcgtgaaccaccgcgcctggcccatttttaaactttttatagagacagggtttccccatattgcctacgctggtctcgaactcctgagctgacgtgatcagcctgcctcggcctcccaaagtgctaggattacaggtgtaaaccacctcgcctggccttaaattttttttttttttgatacagagactcactctgtcacccaggctggagtgcaatggtgtgatctctgctcactgcaacctccgccggggctcaagtgattctcctgcctcagcctcctgagtagctgggattacaggcacacaccgccacgcccagctaatttttttgcatttttagtacagtcggggtttcaccgtgttggccaggctggtcttgaactcctgacctcaggtgatccacctgcctcagcctcccaaagtgctgggattacaggcgttagccaccgcacccagcaaaatttttcaaatatactttattgaggttgaatttacatacaataaatgcattcattttatgtatataaattgatgagtttgacaaatgaacatacccccttcaccaccacgtcaatcaaagtaaagaatattttcatcacctggaaatctcccctctcccagcccaggcaacatgatgtactcttttacagttctgcctgttctagaatttcatataaatggggtggaagcacatggtacatattctcttgtgaacggcattttggctttcttcactcagcatggtttttttgtttttggtgagacagagtctcgctctgtcacccaggctggagtgcagtggtttgatctcagcttactacaacctctgccacctgggttcaagggattctcctacctcagcgtcccgagtagttaggatttttttcttgtatttttagtagagattgggtttcaccatgttggctggtctggtctcgaactcctgacctcaagtgttatctgcccaactcggcctccctaagtgctgggattaccggcatgagctaccatgcccggcccactcagcatgtttttgagattcatgtttgcaatttttttcattcagaagtattttgaggacttgtcttcatatatttatcttcagtttttcattttttacactattccagaatatgaatataccactacctattttttagaaacaaggtcttgctcttgcccatgctggagtgcatcagtgcaatcatagctcactgcagtctgtaactcctgggctcacatgatcttctggcctcagcctcccaaagtgctaggactacaggtatgagccactgcactcagcctatataataattgaaaagtggacatttgaattaagtttcttcttcaaatattatgaacaatgcccctataaataatcttgcacatgtttcttggtacacatgagcaaaacttaatttctctatggtaggagagaaactgttggaccatggattaggtacatgtgcaatcttaccagacaatgaccagttattttccaaagtggttttactaatttatactttcactagcaatggttgagaatttagaaaaaatttttaagcaaaaggaatattgctctgaactagaccaagggacccctgaatagccaaagtattgattggttcatgatgtgctagaaactaaccctatgtctttctcatgaggcaggcaggactgttaaggtttcaagccaggacatcctcctagagccttttcatgtactatgtcagcaaagaacaaagaggggaaggttaatagcacttgttaatgaaagtacagtgctctaggagttgagggagtcatgagctctagctctacaactaacctgtttttcattcagcaacaaattacagagtacctgctatgtgtaggccctggcactaacctgtttttcattcaacaagaaattactgagtacctactatgtgtaggtcctggctttatagtcgtgaacaaaactggcatggtgcctgcattcttgaagcttacggtctagcggaagagagaggcatgttttaaacaaatggacaaacataaaaattatggtaaatgctatgaaggaaaaatcagggtaccatgtgaaaataaagagagggggaacctactttaaaataggtaataagcattccttttttggaagtaacatttaagctaagatcaaaagaatgaatgagctagccaattgaagaccattccagatcacaggagcaaaaagggtggaaaattcagccagtggagctgggtcccagtgatctggggagagccacacaaaagggggttggtaagggaagcaggtgtcttttacttagaagcgaaagactaaagaagcagaatgagagtggcagtgggatagcaataattctgattcacaaatgttgggtttgagatgtctactacaaatctaagtggaaatgtcaggtaatcagttggcaatatatgtaaggaactcaggaaagagttctaggatagagataaaatttcatctgtagctaaagccaaggaaaggaagacagtcacctaaggagaaagtacagacaaagataaaagaccactgggttattcacttcctatacgtcttctggtaaactgcctccttttcttgggcttcttggtaacatgaatggtggaattagatgatttatggagctcctcttaagtctaaaattatgtaaaggtaacccttctcattgctcttgggttaaccttaatgatctcaaccccatcctaatcaaacaaaaaacactgggtagtttaagatgagctgggaaatattttactacaaacagttgggaacttcgacccaagcccttcattctgcagatacaaaaacagaagttccaggatgagccacatgcttgccacagcactgagcaggtaagccaagttccaaagcgcacagtgcctgctcaacttagtaagtacaaggacaagtgcacgcaaagaaacatgagaattaaagtcatcactaaaggcagaggaaatctcattcttgaccctaaaagatctggagaagtatgtttaacttgtgccctaaggacctaccttgggggcattgtgtcccacagggacatgaggtccccttcgagatttcattgcaaagcgcatgatttgcctcttcacaaaaataaatagcagtacaaacacctgtccaaaaagatgtaaaaatcctttaataaaaagtcagttttgttttgttttttttttaaaaaagcatgccttcattccaaatccccagattccggctctcaggaatgtttcagggtaaaacttggggcaaagcaaggccgttatgatgggggtggatctaagaagccagcagcagggaggcgtggggtctgtgctctagcgttaaagggagggttctagactaacgagggcgggtcggcccgactaagtgacttaaactcccacctactcctggaataaggagtcaaagcccggataggcgcaggtgagtgggtggagaatgcagacggggtacagctcaaaaggagggtctctactgggtaagatgcgacagcaggaatggggtggggtaatctcctcaccaggctcccgtaggccatcaccagcacgacattcaccccggagagccagttactgccggacgccatggcctccctacctcgcgcagaattgttcgggtttaccccgctgtcctggctggtcagcccaggctccgccgaagcgacggcgcctgggtcccctggagctccccggccatttccttacgggggaagaccaagccagacccggcctgaaaacatggcggacaggcaggagagctgggaaaggagaacgacgccttccagcttccccctgacacgtgactcaggcaggcaatggcacccaggagcgtcgagcgctcagacgcggaactacgacagtaagaggaagcggcggccatccgtgcgtcacgtggtggaggcagggccgccgtgaaggaggcggggtggactcgcggagccggaaagaggtgtctcgtggcgaggcggcacgcgcacgcttgcgtgcgcgccccttttagcgtcacgcgctgagggacgcaggaaggcaagtgggcgggggaaggcgcgagagcgagcgcgagagggaaaaggagggagggggtggggaagagggaatcttatatcacgtgacaggggcggcgcggcccggggtgtcagtgtggaggagactgaggtaaagttgggagcgcagcggcgttggcggcggcggcggcggcagcggcagcgcggcggggccgggtattgtccgcggcccctttaaatccgcgatcccccttttaccctccctcttttctcccctgcccccgccgtatcccctccctcggtaggcccccccacaccgtgtgttcccccactgtacacccccccccgagtcatgcgagccctggcgccccccacctcgagtcggcccccggaggtt

SEQ ID NO: 4694 - DNA, 6000 bp, Homo sapiens
cctgtaatcacagcactttgagaggctgagtgaggcaggaggatctcttgagctcaggaattcaagaccagcctgggcagcataatgagatgccatctccacaaaaaataaaaaaactagccggatgtggtggcatgcacctgtagtcccagctactcaggaggccgaggtgggaggattacgtgagcccaggagattgaggctgcggtaagctatgatcacaccactgcacaccagcctgggcaacagagggagactctgtctcaaaaaaaaaaaaaggagaatagaaagtatcaggtatggtaggggagcctttccgaagaagatgacatttgagggaggcagccatgcagatatctgagggaagagtgttccaggcagagggaacagccagtgcaaaggccctgaggaaggaacatgcctgggatttttctgggctagcaaggctagctgggtggctagagtgagttgagtaagggggaggtagcaggagatgaggccagaaaggttataaggactgtaggtctttgtaggccattgagaggttttgtcttttacttagaatgagagagatggctgaccacatgccaggctctgcattgagttcttcacacaaatgcctcctataatctttagtctagagtaccgtggggcaggtctttttatactccccattttacaggtgaggaaaccagagcatagagaggttaggtaatttgctgaaagtcacacagctagtaaatgtgtagagatttgtctgatgctaaagcctatgctttggaagccaatcatggaaggattcctggaggagttaatatttttccagcccttttatgttttctcacactgaaccctcacaaaagccagcatttggggattcccatccccgagaggaaactgaagctgaggaggattaagagacttgcccagggccacagtccctaagagccaggattcagagcagatgggtcaagggtttcttgggtacagtagagtccctgtggggaggaacaatgcctgatgacctcctggggcctcagatggcccccaccatgagcctacaggtgattggaccccctagcccaggctccaaggtggtgctgtgggccgagagccgcctgccgcgccagacgtggagcatcagtgaatcgggccacatctgcagccagatgttcgaaggccagatcctggacgtgaagggtaaggtgggatgtatggggaagagggctcctgagggggctgagagccatggagtcccagctctctctgactatctccctatcttttaatccccatcccacccccaggaggccggggctacgaccgggaccacgtggtgctatgggagccggatgaggacagggcatcccagatctggactatccacgtgctttgaaacttttcccctcaccctccagccctggaggcttttgctgggatgaatgtttttatagggtttttgttgtaacataagctattttctaatatgctgccaggtacccttgtctctgtgcaccttgatatttcggggtggggtggggatttgttcacttgccttcttccctgacgctcaggctggcttcttccctccaggccccagctttcgggttcagatgttaggcctccttctgccatcagagggcgccctgggaccagactaactggggagtgtagtctcgcgcagccacccaaatgaagtgttgtgagagcaggctctgagccgggtggggccctaggctgtgcgggcacagacacaaactgagcctttcggtccctgtccttagggaacgcacagtcccacagaggatcctgacaggtagggtgatgcatccatgagaagggaggaaagaagtagagggactcacacagcaggaacatcacccccacaagtgcagggcaggctgacatgtctctctgcacacgtcagggacctgcagctgagatattagggtggggagttagccaggctccaggaggcagagaaagaatattctagggatgcatacaagtccagggtgaaaacgtggaggttagtgtgatgggggtgcagtgggccaggcatgggagatgagtgtgagccacaccctgaagggctgtgcccccagggctctgctgcactcaccccaactctggtcttagagaagccaggacagggcatccaggtctctaacccagctcagagagggcaggacatagaagagagggagctccctctgtccctggaggtcctcaaggaagaagccaaggtgggaggggcccttggggggtgccctggggctcccttccatctctgcagcacccacctccgatgcctcaagcccaggagggtgggagtggtcagagcagctgcttgcccttcctgccttcccagcccctgggccagcgtgggaggtagacagccacccatcatccttctccagccccagatgcctgtggggctggtttgctggggatctaaataccttgttgaggggtgtccctgggactggggatttccctggatctgtcattctgaagacacccaggtagtggggtaggggctctctgagcctgggatgtccagggtggtggcatctctagtaccatcattcccaaacacccagggatggatgaagcaaacgcaactgcagggttggtgaggctgccaggttctgggccttgtccctgcaatgtgcttctaaggggaagggccctcagcattggaatttaggtggggaagctgggggctgctccctggtgccaatttccctgctgatggggacatgggaaactccctggtgctgctgcacagctggctcttggggcgtagggatgtccagtaaccacaagcaggaccccactgcaagtacaagggtaactttattgacccccagctgggcactgcttggcccctacatcattacccccctattttggctgttgcccccatggcactgcctgtcaacttctacaacctggtgatgtctggcatcaacccctcccaaagatggaggggattctcttgcgagtgatggtggcagctgtttcagggggcacagggctaaggctgagacgtgtcacctcaactgaagcagaagaggtggattatggcattggccacgaagaaaaggaaaatgcctccgcttatgttgctggatgctgaggggctgctggtttggctggtgtcgttttgtcctgagagtccagtttgtatctgtaggaggagaagtgggataagatcaggggacttttttttttttttttagaggtggagtctcactctgtcacccaggctggactgcagtgatgcgatctcggctcactgcatcctccacctcccgggttcaagtgattctcctgcctcagcctcctgagtagctgggactataggcacgtgccaccacgcccggctaatttttctatttttagtagagacggggtttcaccatgttggtcaggctggtctcgaactcctgacctggtgatccacccgcctcggcctcccaaagtactgggattacaggtgtgagccatcgtacccagccctcaggggacttttgaatagcgtgtttgttatttaaagatgcagtcccctttctaccctccccgccctccatccgcccacctccataaaacagtcctcagttctgccccatgtgaccactacttcttccacaaggtcctgtcaggatgtttgactgcttcctgctttgacacaggcagggacagaggtgatcactgcccctgtccaccccctttcacagaaactttctgtttttttgagatagagtttcgctcttttgcccaggctggagtgaagtggcatgatctcgggtcactgcaacctccacccctcaacctcccgagtagctgggattataggcagccgctatcacgcccagctaattttttttttttttccgagacagagtcttgctctgtcgcccgcccaggctggagtgcagtggcgtgatctcggctcactgcaagcttcacccccaggttcacgccattctcctgcctcagcctcccgagtagctgggactacaggcgcccgccaccacgccacgcccggctaatttctttttgtatttatggtagagacgaggtttcaatgtgttagccaggatggtctcgatctcctgacctcatgatccacccgcctcagcctcccaaagtgctgggattacagacgcgagccagcgcgcccggctcgcccagctaatttttgtatttttagtagagacgggattttgtcatgttggccaggctggtcttgaactcctgacctcaggtgatccgcctgcctcggcctcccaaagtgctgggattataggcgtgagccaccgtgcccggtcacagaacctttcttttcacctttccccagcgaccagcccttctggcatagagggagacaggggagccctggcccttgaccttcctagcctggcaaagggcttagcttccctgagcctcagtttcatcttctgagtggggagaagttcatcacagttgtgaaggtcacatgagccagggctgagtgagaaagcacttggcaaagcgtgggtggctggatgtggggtggggaagtggccagatggtgatcgagctgtccttaatgcttgatggagctgcaactagaactgttcttgatggagattaagctggttttgatggtgatcaagctgttcttgatcaagaacttgatggctccggtctgctgtactgactcccctctgggcacctgggatgctaccaaagctgcctcctggaatagcagtcgcttttgagactccagttgtttctgaaatgggagagtcctgtcttctttgcattcctgaacatccaggcttctctctggcaggggagtgggggttagagtgtcccctgtcacctccataaccacagcaggctccacttggacatctcctggcctctccccaaaggaccatctccccagactccctgtgggccgatgccttcctcactcagggttgtcttcccaagtctcttagttctctattattccacaacaccccttgggtgccccaacgcgcctagcaccctgtaagtgctccccagctgtggatacaggtttctctcagggcagcccgcaagcagtgcagccccagccagaagagctggaaggctgggcggccaggcccgctgtgtccccagttttcctgttggagtccatctgctgtgctctcaggagagaaggctgggtctctgggagctcacatcctgtatgccctccctccatgccaagcaactttggggagtcctggcagtggtgccaggcgttgctcttacctgtaccataaccaggaggctgatggtgagtaggaggaagaggaagcgcttcattttggtaggatcttcgtggctgtcttggtagcagctttttaggtgatctcagggctgtctggaggcttcttttggtttagctgcttttgaaccaggaggcagaggaggcggggtgaggtagggagaggaaggagggcttacaaggtggaggaggggtgtggcttcctttctgcagatctgggggtggataataccaggctctaggttctaaggccctggctgggggagcaggctagatcgtacaagataggagagaggtcaatccagaggcaacggtgggagtaagtagggcccaaggcctggaatcatgcatcctgcaggctgaatcctggtttaatcactgaccagctctgagaccctgggccagaaactctacctctctgaccctttaacaaaagaactgccggattacatgtaataataaccaatttaaaaagagccagaacatagcagatattccgtaaatgagtttgttgtttaaagaagattggggcagggtataggagctgaaggagaagggctgggatagatttatgtttcaagggaaggttgtagatgggctgcaggttctgaatgaaagcttgggaaatgtttagattgtggaagggttggtggatttctgtgaaggtgctggaggtgaggaatcgggaagcc

SEQ ID NO: 4695 - DNA, 6000 bp, Homo sapiens; identical to SEQ ID NO: 515

SEQ ID NO: 4696 - DNA, 6000 bp, Homo sapiens
tacaggcatgcaccaccatgcccggctaattttgtatttttagtagagatggggtttctccatattagtcaggctggtctcaaactcccgacctcagatgatctgcctgcctcggcctcctaaagtgctgggattacaggcgtgagccaccttgcctggcctaaaatttatcttgattggctccagctttaagcttcagctaccactggattggttcagtttataaccccaagtgtggcaggatgtattttccaaagatggttgcatcaataataaaaattgcatccccaggctgggtgcagtggcccacacctgtaatcccagcactttgggagtccaaggcagaaggattgtttgagcccaggagttcaagacaacctgggaaacatgacaagaccctgtgtctacaaaatataaaaaattagctgggtgcatggctgggtgcagtcgctcacgcctgtaatcctagcactttgggaggccgaggtgggcagatcacttgaggtcaggagttggagaccagcctggccaatgtggtgaaaccctgtctctactaaaaatacaaaaattagccaggcatggtggcaggcgcctgtaatcccagctactcgggaggctgaggtaagagaattgcttgaacccgggagatggaggttgcagtgagccgagatcacaccactgcactccagcctgggcaacagagcaagactctgtctcaaagtaaaataaaataaaataaaaaattagctgggtgcagcggtgcatgcctgtagtcccagctactcaggaggctgaagtgggaggatcaggagcccaggaacttgaggctacagtgagtggtgattcctccattgcacttcagcctaggtgacagagggagaccttgtctcaaaagtaagaaagaaagaaagacataaataaataaattttatcccttattctcttcttaaaatgtgacactggctgggcgcggtggctcatgcctgtaatcccagcactttgggaagacaaagcgggcagatcacgaggcgggcggatcatgaggtcaggagttcgagaccagcctgaccaacatgatgaaacctcatctctactaaaaagacaaaaattagccgggagtggtggcgtacgcctgtaatcccagctactccagaggttggggcaggagaatcgtttgaatccaggaggcggaggttgcagtgagctgagattgcgccactgcactccagcctgggtgacagggcaagactccatctcaaaaaaaaaattaaaaaatgtgacattaacattcatccttgaggtggggtctctgttccctccccttgatcatgggcagacctttgcaattgcctcaacagtaagaatgtggtgaaggtgccactgcatgacttccaaggacgggtcctgagtggcaattctcttcagtctggtgctctcctactccctctgagctgctatagaggatgttcagctaccttgaagctgccatgttggagaaacttcatggaaagcccacaaagagataaaggagagaactgtccaagcaactccagctgttccggccccagcggttgaaggcttcccagtactgacatcagacatgtgagtgaagaagccttctaggtgacatcaggcccagccaccatctgactatgaccttataacagaccccaggccagaccgaaccagcagagtcactctcaaattcctaatccaaagaaattgtcattttaagctgctgaatgttagggtgatttgttatggtgcaacaggtaattaatacatcaatgtgtgctgtccagactgtgaaactcatcctctttccataatttccacacacaaaaagaaaacttactcacacaaggcctttcttgtggttagcccacaaaagatggagagataagtgatgtgaaacaaacaacttaaaattgaatttggacatcccagttctaaaaatcctttataggtttaccccacccaccccaagcaatgcccaccatccctctcttacatcctcctcctcttgctctcatcttccaacaaacttcaaattcttcttcactctgttaggcagagcaattacattctctcaagctctttctcccaaactcagctccaggacaacctttcaaaatccagagccctttgctaacctgcccaatggagttggacttttctagcttcaactaggttcatcattttagctgatctgcctgtggccagcttccccacattggatgccaacctagtaaaacagtcatccataaatcataaggaaagctaaaatgtatcaagcacctactatgtgctggttcgaggttaaatgcctcgcatgagtcatctcattcaatttccacaaaaaccctttaagataaggacaatttgctgggcacggtggctcatgcctgtaatcccaacactttgggaggctgaggcaggcagatcacctgaagtcaggagttcaagagcagtctggccaacatggcgaaaccccatctctactaaaaatataaaaattagccaggcattgtggctcatgcctgtaattccagctactcgagaggctgaggcaggggaatcatttgaacccgcgaggcgaggttgcagttagctgacatcgtgccactgcactccagagccttttaagactctgtcttaaaaaaaaaatatatatatatatatatatggactattagtatccccattttacagatgaggaaaatgagacttcatagagtttggggtgcctgtggtcatatctataattgtgaaaaagtcagattccaaagcattttaccaatattgcctaagtgagtgggagggaagggaaggctctctggagtcgggctatgctggacagcggggttcggaaactctggtgaataaagtggtagttgtttctatgaacatggagtgagaaggcccaatcctaaacacaccagtgcttaaggcagctgcagagaattaaaggcaatagaaaaaggggagctggatggcaggagcttggatggggaagacttcaagggcaggtgaagatgccaacagcttcctgcctggaggaccgaagaagggttgggcttcactgcagacctccaggagacagatttgcttgttgggacagagtagggaggtgaaagcgaggtgaggaagttcgggggtgggggaggtgcacacagctccactaaagagctggaagaggccgatggagtattcatgagacggctgatccaggaaggactgtggcatattaatatggaaaaggcctgtttgtttgtgcttggagaggaaggagccagaggagaggggagcaaggtgggcgggagctggggagagcctgcagcaagatctgcagagcccgaggtgctctcggcctgggccctggagaggacgtagggtaagtgatggggcacaggctgtgcgtcagggggaaggtgctggggcctgaaggtcccgaggggaacctcagacggccttatgccttctcacaaagaaactggaccatcatctccgacccgcaccccggtcgcccctcgaggacagagggtgggcgcaggaggctggaccgagcggggcggagctggatgcctggcgccggcctccctcccggcaaccccgccggtcctctcaggtgacagctcacgccggcccccgccccgccccccgcatattcaggagccccagcccaccctgcccgcgaacagccagcgctggaggagcgccgggagactctgccgtcggtgcgtgcgcggacacgcacccgtcccccttggtctcgccgccagccatggccgccgctacggcctccccccgcagcctccttgttctcctccaggtggtagtgctcgctctggcgcagattgtaagtttcgcagcccctccgctgccagggtccagggtgcggggtctggagtccgggatggaggagctctgcctgtgtcccgcgcctactgacacccctagcccgagaggccacctgaggacagcgccgcgggcaggtcccctcggtgggtgcatacatggtgcccatcgcggcaccgtgaatggaggtggctgagccggagagtcaaacgggacccgtccccagacgcgcggcccggcccgggacaggcagcgtggggcaggagctggcgcccggtcctggcagcccggggagcccaggtggcggggcatacaatggtgctcattcacccgctgcgcagcctccgcccccgccgcctcccagggggcgccggctccaaccagacgccgctgtcgccccgaggcggcctctcggccctgcccgcctacccacgtctcccttccgagggccgccgggggctgcgggcgcgcgggtagggcagagactgggcccggtcgggtgctgggtgtggtttcgagctcgcctgcggggcgccagcctggcacttcgcggcctggggaggtcgtgggcaccgggacccctgcctgggtccgagctggcctcttaaaagggccgccttttaagatctctgatctgttcagagatgggcagcaggatggagactctccagctgtgagctcgcctcatcttgatatgacttgtgacctccctgaaacctcacacccacccaggggcattgaattgcaggcaaacgggatccagagagagggtctgctttctgggaggtgccggctcctcctgctcccctgcagcagtcagggcttagcagagggaggaccgggcagctgtgctgccgaaggggcgctccgagtgggaagatagtacccgcttcacctccctacacctcctttctctgcgcctcccccactttcccgtcgggttttcccgcaccatggggagaggaggaggcgctgtctctgcctgtcgttcacgtaagaacaacaacccgagccaccgctcactgagggccggcagcctgctaggcacaaccttacattccatctgtgatttatttgagctgtccacgtctccatctattccccaccgcgaccgcgcaagggcaaactggcacagtggaaggagtcgggcagatccagggcggactcctggcgccgccgcccactctcagtgaccatggacccttcacgttctgagccagtttcttcgactgcaaactggggcccgtaatagcgcccgcctcccggttctgagtattctgtaagataatgaatgcatgtaatggcacacagtgcctgctatacagaagattctcaatacgtgggagttcgcggaagagctgcgcccctaggaccccgctcccagggtcgcttgcagccccggggacgcccagcttcctgcactgtctgaggactgccccaccccgtgtgtgtttttcagagaggtccaccgggagagcggggccccccgggtcccccgggaccgccgggagtgcctggatccgacggcatcgacgtaagtctctaacctgagaccagggcgggagggaggcggcagacaaaggagaactttgtgagcgctgtggtgggggtggggacttcggggtgcccggagatgtagtgcccctcgtcgccaataggcggcgccggcccgcaccacaaggacgccgtttgttctgcaaaaacctcaaaccagccctgacatgcggagcccgttatagccgccgacagacaaggagctgctgttcagtccgccggccgcagctcacagcgaggcctcatccccctcctctcctttcccctccttgtggggtaggaggcgactcaacccctcaccctgcctctggcacatctggacgcttcttcaggttcgcttgggagccttggccagaccaccgaccagcttgggccagactcctgtctcttcccttcggttttctctccccgatttagaatcagctgggcttgttccctgcagggtgagggttaaatacctcattctgaaagctcccgcaggagggccgcttgatgtttaccagtctggacagacttctattcaacctggtgcccccaccccccaaacacaggatgctgggcccccggccaggccctggctgctgaggg

SEQ ID NO: 4697 - DNA, 6000 bp, Homo sapiens
tttaattttttcatttttcatctctttaaatgttaatttgtttctgatcattcctataagtccttaggagtctatgtcagtttagctgtcccttacacatatgttttacagtttttgactctgagcctatattggacaatcttaaaatctgggagtattttaaaaggcttaactaagggtgagtcattacagagaggatccgtatttgttttttccagacagtatggcacattaccaacccgggccaactttatgttaatttcttggcttctggttttttagatcatgtagatatgtaaatttgaaccttgaatgagtgatggcagaccctccagtttcaagttttcaggtggtatctttattcccccacctggagctgtgatgaaaaggaacaaatttctctgtgatctccctttgccaggagggagacatttttctggcccacctatgactgactgtgtagacttttgtgggtcctggctgaatgtggggcaaggtgcttctccaataccatgagttgtacaatttcaagtggaaatacttaaactttattctatgaaaacatcaccccctgaaacacaggtaccatttacctcaactaccatggaatggcacccattgacattgaagcatgtgcctgggaggttacagggatatgaattctatctctctgctttgggtagagagcagcctgtcacctgtccctgattgtgctctacttctgctatcagccaaatgcccccaaaggaaacacactgctagtatactactctagtttcagcttttttattgttgttgtttaactttttagccctggagatttccctgtctttcgtagaagacctgtcatgaatttaatgagctaatgtaatttattcagcatttaggtgtattggtaaaagagattttcaaatattttgtccacctcattgctagtagcaaaacctcctccccctttgttttacatgtctaaatccttctttttcttcaaaagctcaaatgctatcttccacagataactttacctaagccctttgtatgtagaaataagcacccctttctctgagaacacttgactttcacatcttttagagctcattgtctctacagtatgaaaattgaggacggtgtctttagggaataagatccttccacttctctacctaagcatagcagaggaccttacccatagtaatcactcaattatttgttgaatgaacagccaaagcaaaatccttttatttcccaaaactattcatgatttttctatttcagtaaacaacattaccatttttttcaggttatgaggattctaagacttcagaggaatcttaggttctctcttataaagtcctcacatgctgtcaccaagtgatggcaattctatttctacaagtcatttaaaccattcttcttcccagttcacactgtaaccatgtgattctgactttcaattctcttggcctatctgcttttccttccccttcacccattccacctgcattacctaattaacattcctaaagtattcctctgctcaaaactttttttttaataaaattgtgtgaacttcagcaagcttcataacttctctgaaccagtttctcctttgaaaaatggaataatgtgaggctgggtgcggtggctcaggcctgtaatccagcactttgggaggccgaggcaggcggatcacgaggtcaggagttctgagaccagcctggccagcacggtgaaacccagtctctactaaaaatacaaaaattagccaggcatggtggcgtgcgcctgtaattccagctactcgggaggttgaagtaggagaatggaggctgaggtaggagaatcgcttgacccagggaggcagaggttgcaatgagctgagattgtgccactgcactccagcctgggcaacagagcaagactccatctcaaaaacaaaaaaacaaaaaaaaacaaagaaaaatggaataatgttatcaacacagattgtaccatctgctatagcaaccactgctacatgtaactatttaaattaaaatctcgatagattaaaattaaataaaatttttaattcctcagtcacactacccacatttcaaatgctcaaaagccacgtgtcaccatcctggccaacacggtgaaaccccgtttctactagaaatacaaaaaattagccgggggtgatggcaggcgcctgtagtctcagctacttgggaggctgaggcagaagaatcacttgaatctgggaggcggaggttgcagtgagctgagatcgtgccactgcactccagtaaaaatttagaacatttccatgattggccgggcacggtggctcgcgcctgtaatcctagcactttgggaggtcgaggcaggcggatcacgaggtcaggagatcgagaccatcctggctaacacggtgaaaccccgtctctactaaaaatacaaaaaattagccgggcgaggtggtgggcgcctgtagtcccagctactcgggacgctgaggcaggagaatggtgtgaaccccggggggcggagcctgcagtgagccgagatcgcgccactgcactccaacctgggcgacagcgagattccatctcaaaaaaaaaaaaaaaaaaaaaaatttccatgattgtggaaaagttctattggactgtgctgagtagtctttgtacagcttatactgatagcacaagcaaagaacctaacagattgctggtgcataataaatggtagcttttagtattatctgttaaatagtataaaataatacccatttcatagaggtttattcaaggattaaataagatacttattttcagagatgatcagtatgtacttgttcctcttataatgtgaaaaatgaattacctgttttacaacttcacaaaatgttagtcttcagacctgctcatacctgcaccttttgtaaatcctaaaaccgacacaaagaaaataagaagtttttctctcaatccacacaattttaaacatgtacagttttaagtcaacacgccaatattgttcatgggcagaatactaggctacagcattgttaacaggttatttttctttgatgagttgacacttgagttttttacaatgatgttgtaccatctggaattaaataatgttttaattccaggatataaattttcatatgcattctcacatccaacaccttcactatcttaaagaggaaaaaagaaatatcattgcgtcttctcctatagagagacatgaggaaaaaaataatagattattaagcaaaataaagcaattgcaagtccatgtgatgtaaagaacacagctgtgagatgagatatctctaaacacaagtcctacctttactactacccaactctatgatttcaggcaatttacttagcttctgagttacagtactcaaacagttgttccttggagtggagtagaataagcatacaatataataatgatagctgatttattaattatgtagtcataaggccacaggtatggagtacaactttatgtatgatttttttctatgtacgaattatcttggattcgtatctccttaggctttgagagtcccagttgtttaaactgacagtttatagaagcagggcttgaaatggtttaccagtttgcgaatgacaactgaggaatttaaatgcatggactaggtgaggaagactaattgtcaatgtgtttttgcctttgaaacctgaaagcattgctgagtaattgccaaaccaacaaaattagaatttcaatgattcataattcaaaaagcctttcaaaataattgagagtatgcaggaataaatttcacagggcagtaagaatgtttataaaaatgttcttgcaggccgggggcggtggctctcgcctgtaatcccagcactttgggaggcccaggcgggcggatcacgaggtcaggagattgagactatcctggccaacatggtgacaccctgtctctactaaaaatacaaaaattagctgggcgtggtggcgggcgcctgtaatcccagctactcaggagactgaggcaggagaatcacttgaacgcgggaggcggaggttgcagagagccaaggtcgtgccactgcactccagcctggcaacagagcgatactccattaaaaaaaaagaaaagaaaaagtcttgcatctctaacctaacctatcttctctgctctctttgaagttctatgaatcaaaactgtgattacaattttttaacaaatatttaaatacccgtggtaataaaatgaattcctcatgctgtcttcgccaagtggtgaatgctaagaaataagaaaggaaattctggaagttccaagtgaacggtcagaaagccctaagctgcttttagagatgcacagaaccatcaggctcaaatcaaaatataatttaaaaatacttacttttctaaactctaacttggcctcctgacaaacataatattctcctaatggttaaatcctaaagagtctagaaaattaagtttttttataagctgcatcaaatgttacattaagagaaatgaggacaatccgataatgcaatgcaaaatacagagttgcatttggttactgatttataaattaaaatttgggagaactggaaagattatttctacagtgttttgtgtttttcagatgtatcctacttgaaagcacggttgtgaagatacccaggaccagcaatttcctttctgtgtgggacccacccgctgcgatagaattgagtgcagaagactgagcttcgtgtaaacacaaggtcaccagggatcgtaatttcaaactctcccctccccctcgctccctccagccaccaaagtatctgaacccagaactcacaacaggaacgtgtactcaacaggaacgtgtactcaattagcttttgtgggaaagggttgaagattcttggtaactgcttcaacaaaccagaggaattaattagaccgctgattttctccggaagcgcgaagcactaggccgtttgaggatctccgctccgctttgcctgggaccaggaaaagacgcgagagacggaactcggcatcaggcactgcttggggcaggaggagagtaggggaaaccaaggaagagaacagaaaggtagggcacggggagctgagcccagctgcactcatccccgcccccggaaacccccgcagctcccgccccaaccagcccccctctggcgcctggcataaggtagcccccggaggcaatgagggccagcaggagtctcgcgcgcctgcgacgcgggtaagggggctccaggctgcgcccacttccccgagctgccagatcccaccctctgacgcacccttctagagggagcgggctgcaagcgctggggcctgtcccttctcccctacttcgacttaccttaccagaccgactagcgctggccgctggcgccgaagcccctatgctaaaaggagacagggctgggccacggggcgcgctcccgagcagaccggccggccccggggcgcgctcacggcaccgaggagcgcgcctgcggcgctgctcgttcaaaccttgttcccctttacggcaatcgcgaaagtgtcgtgaacgtgctgccgccgatcagtcacccagtcggctggagtcggaggcgatatttctaggggtgtacttgttggggtcagggtaaggctgcggagcgcggtcaccggacgtgaaggatttgaagggcgttgtaggggccagtggagagaggactggatgctctggggcgggtcattaggatatagctgtgtatggactcgcgcgaggcgaacgccgtccttcttcctggcgcagggtggcctcgcgcgcggggttgtggggaggcgaggggcgactgcccccttgcccctctgtggagactgcccccttgcccctctgtggagacattggggtggcggagcgccggcgcgggagccggggggctgttgtgtgggagcccaaggtaggggtgggaagaaccgtggagggccagcgctgagcgggccgag

SEQ ID NO: 4698 - DNA, 6000 bp, Homo sapiens
acattcgcatgcatgtgtctttatggtagaatgatttatattcctctgggtgtgtacccagtaatgggattgctggagaccctatctcttaaaaaaaaaaaaaaagtatatatacacacacacagactcacataaaacccaaatatatatattaaattattaaatatattattctccccaaaacccagccatttatatatatatatttatataatacttaaaagccatttatatatatatatatatatatatataaatggacctcaaaggtatctttcactcttcttccttagtatcttggcacatgttgtgccttctaatccattgtcttgttccacttactcccttatgcctatatatatatatatatacacacacacacacacacacacacatatatggcttttgagtttttgtttttttatatacatatttatatatacatatacatttatatgtatatgaatatattatatattttgtatatgtataaaatgtgtgtatatataatagatatgtgtgtgtatgtatataaaacaaaaaataataaatactcaaaagacattttttcccaaagatcaataaagtagtcctatctactttatacatgtaatattaggcatgtatacctgtagataaaatggaaataggagatattccaaatggcatcaggtatattatacaagtaaattttaaaaattagatgaaatggccagtttaccagaaaatattgaaatttggctctatacaaaaatgaaagactaataaaaatttttaaaaattgatatagctatattctcccaaaaactcacccagatagttttacatgtttggtaaacgtctggttcactcattcaatagatactttttagtgcctattatgcccttaaaaaagtattgttgttctaggctcagggtttattttctagctaacattttttgagtgcttatttggtgctagataccattccttttacatgtattagcatatttattcttcacaataatatatagtggggagcaggtgattactgttaaagtatagaaactggtacagagaggctcaataccttgtggccaaaacgatcttttaaaaaacacagatcgagttaacctgcttataactattcagtggcgtattactggtctctgcaaaagacccatatccttaacaaggacctaaaagcccacaatgatttggttgctgttgctactgacttctctaaagtagacttgtaccacttttctctctctgtatcctatctttcaggacctcaaaggtatctttctctcttcttccttagtatcttggcacgttgttgttcttttttacccattgtctcgtaccactcattccattatgcctagtgaaagtctgataattctgtagatcttaactctacttctggatgtctttcaatttccagataaaatgaagtcctcctactgagcccactcatagtcttatgaacttaccttcattacccctagtaaatattttgacatgtatttgtgtaataatttgattaattaatacttgattgtatgagggcacagactatacacacacacacacacacaaacatatatatatatatttttttgaggcagggtctcgctcttgtcaccgaggctggagtacagtggtgtgatcacagctcaccatagcctcaacctcctgggctcaagtgatcctcccacctcagcctcccaagtagctggaaccacaagtgtgtgctaccatgcctggctaactttatttttggtagagatggggtcttgctatgttgtccaggctggtgtgaaacgcctgtgcttgagtgatcctcccaccttggcctcccaaactgttgggattacaggtgtgagccactgcacctagctgatattttcactcaccattgtatccctagcaacttggatagtgctgacacatatcaagcacgcaagaatgacttaaatttctaaatggattatctattttagtcataagatacatgaattggcattaaagttttcaagaacctctatcaatataatgtgaggctagtcaattatccaaaaagtattctcctaaaacctaaaaagtaagaaattagtaaaattttcaataagtaaccaaggacaaaactagattgttctataaaattttaaaaactaactttaagacaaaaattagtaggatgtagttactgggaaattaaacaagttgggaaatacaaacagggtggaagatgatagttaccctacacatctcaccaacactgtctaggattacagacaaatgattttacctctttccttaatcaaaacaaattgtttagggagaatgttttaaaggaatagtcccagccgggcgcggtggctcacacctataatcccagcactttggaggctgaggctggcagatcacttgagatcaggagtttgggaccagtctggccaacatagtgaaaccccgtctctactaaaaatacaaaaattagctgggtgtggtggcacatgcctgtaatccagctactcgggaagctgaggcgggagaatcacttgaactcgggagatgaaggttgctgtgggccaaggtcgcgccactgcactccagcctgggtaacagagtgacagagggagactctgtctcaaaaaaaaaaaaaaaaaaaaaaaaaaaggaacagtccctttaagagtgactaaagatgtaaagaataaagctaaaccaagccagctacataactatagaggtataaatgtaaaattaacattcattgattatttactatgtgtcagggatgatctatgagcattttttaatagactactttacactgaatatgagcatttattaactcatgctttttcaaatcaactctatgatgtagttacaattattatctctattttacaagtgagaagatcacataagttttaagtaggcagagtcaagatttgaacccaggctaaggttaagagctggtgctcttaactataagaggacagtagttaaaatagatatcttccctaatatgtgtgtaaatactgaagatttttttattaatacaaattgttttcttatctagactatttcactagccctctagttagtttccttgactctaattttgctctccttaaatccattttccacactgcatccagtgatctgcttaaatcttaaatggacttgtacaaaattaaggaaaacctactcagcacggcaaacaaggctatgattcatgcttaatgaccccagccttctggcctctccgatgtccttttctgctactcccaccctagactttatatgtcttaaagtctaatacaaactcagtacttgtagtgtccactacacactaaccatccccacttacactatgtattttaagaactatggatctttttgttcgcttttctgaaatgccccttgttcctggcattttcgtctcaattaagcatctttctggattaaattttattttctccaggaatcctcttctgaaacccttagaagtgaccctcctctactggtacttagccatcctttattgaaattacctgtttatgagccagtaacctttattaagctctttgagaagagggattctttctttctcttttacctacatcccgcacaacccagctccccctccgtctcccccacctccatgcacaattcctggcacgtgttaactgttcagtaaatgttgaacttttgaactttactggaaatcaagaaacactgagttttagcctcagttttgctcactatgtgattttagatattttattctctgtgcttatcgtgtgtatctatatacaacttaatcctaaagttccatcgtataaaaaattctacaactttttattttgctctgtatgtgacagtacctggtatttaaaaacaattctctacatcaacttaaaaaattaacatttgatgattataattaacttctaaaaaactgaaagatgaaacacatcaatgccttttctttcccccctgtactgctacctgaaaacatcggaatttgctgtggaacgaacaagatttcttctaagaaattaccccctaccaccatgactacataaaataaggtaattcccagcaagaatattatgcagatactaaaaagaaaacatgctaggcatggtggctcacgcctgtaatcccagcactttgggaggccgaggcgggtggatcgcctgaggtcgggagttcgagaccagcctggccaacatggtgaaaccccgtctctactaaaaatacaaaaattagctgggcatggtggcgcacgtctgtaatctcagctactcggaaggctgaggcaggagaatcgcttgaacccgggaggcggaggttgcaatgagccgagatagcgccactgcactccaactctagcttgagcaacaaagcgagactccgtctcaaaaaaaaaaaaaaaaaacaatgacacgagggaaatgcttacaatgctcaatgaaaaaatgaaaagaaaggttataaagttttaatatacgatttgatcttttgaaaataatggatatataacttaaacggaaatgtatcattaaatatagcaacagcgtcttccaaaaaatttcaaaatcgggcttaatgccaattacacgatcataatccaaaaacccttaactgaagcaaagacagtgatttgtaacatctgaactgtgtgaaaggggtgggggtgattcaaacaagtgtcatcaccttgtccaatgatgaaggagaacgtgtatcagttctgcattgtgaaattctcagtatgagagcgtgtagtggctaagaaaagcagtgggcgaattaggaaacaaagagaaaagccagcgacatcaccagttctggcctccttcccaccggaggaaaggggagaaggcgggtagtcatcaattccaggtccagcctaagttctgggtccccggccccagcgagagcctcgcctcgcctcgcgcgcctgcgcggagcgggctggcttcctgaacggccctcgcctcttcaccaccagggccgtccaccagaagtttctaaacgggtgagaggcgacaacgcagtgcagctgggttaaaggaaggaggctggtttatcctccgcacttacttggtactcgatctccagcgaggccttcaggggcatgggctggtagaagcactccttctggccggcgggaagggtaaaggtgaagtcgctatcgagggaaggtgtgaagccggccgccccaggcagcagcaccggaggcagagcggccagaaggagcacggggaagggcagccagatcttgtcgcccatccctgctggggcgatcccgggctgaaagaggcgtcaggtactgttgtctccgctccgcgtttcctctctggactcctcgtggttgacagggaaatctggagtctgaagaaactccaggtggcggccgcggcggcggcgaacactccctccgaaagagaagcgcagttctccaaagggtagggactctgggcggggctagcagtcctattccgcaaccgcctcagtctcggccccctcaggccaggcgtgagcgccgcccgcctctccccctgacggcctccggttcccatggcttcccccaccaatgggcatcatggcggtaattgtgggaaatgtagtcccgggcgggctccgctagtgggctcgggcgcgctcgccgaccacgatccccggcaagccccgcgccttcggcggcgcctcacgcagtctgcgccggggcggggcagtgaccgggtaggcgcgtcccaacggctcccgcggcggttcgaattctgtgctgccggggttcgctggttctccgagttgtgtccgaggcttccacgcgcaggggcccgggaaagggtcagaggcttcctaacgcagactcgagtgcgaagcgcgcagtcgccgggtgggtctctccccagcgacgatttgggtggtgagcgactgcgccttggcgtggggaaaccggcttacctgggggagttctgttcctttccctc

SEQ ID NO: 4699 - DNA, 6000 bp, Homo sapiens
acagagtcttgctctgtcgcccaggctggagtgcagtggcacaatctcggctcactgcaagctccgcctcccgggttcacgccattctcctgcctcagcctcccgagtagctgggactataggcgcccaccactatgcccggctaatttttttttttttttgtattttttgtagagacggggtttcaccatgttagccaggatggtctcgaactcctgacctcaggtgatccacccacctcagcctcccaaagtgctgggattacaggtgtgagccaccatgcccgacccatgtctcctttataacaacctcacagtgacaacttctcatctgtttgcagtgagtgagtgattcacctgtcctccccagtatggtcccagatctccacgagggtggggaacatgtgcatttttgctcatcatcattgcatccccagaatatagtacagtgcctggcacaaactatatgcttaatagctactgaaaaaaaaaatactgtgaaataaattaaatggtggtaaggtttagcttctgagagtgggtcagccaaaaataattcaaggctgaggaaggttaaggcttaaccattctgtatcattaaccattccatattttgttattttataacaaaatatatagaaaaaattttgctgtcacttgggtgataaactgattttagagataattttataactttctaaaaaatagaataagtactgatttttgaaaaggctcacacaagttaggccaaattaaaaaagaaaagctaccactttactgaggacagtattaagcactttatatactttttttctttcaattctaatggtcagttattatccagtttacaggtaaaaaaacagagagagagagagagactatggttgcatactgagggaggatttgtgtccagatctatttgatttcacatgccatgtttttaggctaagaataaatgctgacattgagtaataacgtcttgctccctgacactcaaaaacctcatctcctcccatgacaaggtacaacacagcagtctcgtaacaccaagtggggtaaatgcccaagtatttaaaatattaataggatttgggggccagtgatgttgtagcagggaaactagacaattaaaggaaaagaagtaaggaggaatataaacaggatttactgaaagcatgttttacgccagatactatattagatatgttaatgtataacatttattttaatcctaagactcctgtgagaaagacaatactagtcaagaaaaaagagatttaggatagctatggtgtttggatacctccaaaattccccacttttttctaaggatttgagtctcccacttttttttatttagctaggaataagactgtctggaataaggatagtatttcccagtctctattccagctacctgaggtcatgttactaagttctaggcaatgacatataacaagaagtatatgacagcatccaggaattttccttcagagaccatgggctcttgcctttcccctccttcctttttccttctttcctcctttctgctacttggaacttgggggtgatggctgaagctccatcttgggatcatgaagctgagggcctcatcttatatatggtagataatccaaaaagtagaatcagcctagttctcagaagactgtagaaccatcataccagccatagaatgcctctctgcaagtttgtttaatgtgaaagagaaacaagcatcattttgaataagccattgttctttgcagtctctgtagctggcaactaattttaactaatccacaactcatccaaagtgatggcacagagttcagaatcaggcctgtcagtctatgaagtttgttctcttaggtaaaaccttgaagaactcttgcttgtaatttgcaagagattttgaaaagagaaaagtttcaaaatgctgaaaaggaatttgacagaagaaaataaggaaagtttgaatatgctcttaaatctgctacctgagaagaaatcaaaaggaatatgctactcaacaataaagaatgtggtctccatgagagatgagcagaggaagatctcagtcacctgcatggagctggatacggaagagaaatagaagctgtgcagctggcagcgtctgtgaaatatgctgtgcttgttagctgaagaataggcattgcagaatggagccctggaaatggtcacaggatgacagatgagaagaaagaatttaaagggattctgaaatttaaaaaaagcaagagatgaagtttaaatatatacagtctagaaagaaacaagcagaatcacatgacccatatcaaaagcagcaaaaaggtcagaaaggcaaaaaggaaaggtcaaggttgaagccctgacaactcatttttattcatttcctttactcaggttcacagcagcactgaaggagtaaatgtaaattgtgtggcaattgagtagaatcctaaaggaaaggcagtcatagaacagggagtttattgttaccctttgttcaatttctaaatgaaccacagtgataagaacttaggagagagatcagtgattggagctaggcctaattttacttaagatcaaccttaatgatcagaaaaagaaaaataggttattatgtctgccaaaggcattattttaaacaccagagaaattaagtcataataaaggcatgtaggaagtttagaaaatacagatggggaataaaatgaaagtaggcaatagcaataaaaggcagcaatatgaaaacagatatgacacaaattagaaggtattttacaaatggttaaataaattctacactataactgggtctcccaaattcctcttgaatggtcacaggtctgaactgtttgctgatgtacccagtgctctgggagtcaggatagcagtggagaacctgctccatgcaaggcaatgcaaatcatgccaccaagtgtgtaataacatgacagaatcagaatgcattcatttctaataatatcagggtgtggtagaaggatgctgggaaggagaaataagagtaaaattagagaattcaactttagagacaccaaatgaaaatccgggattgggttaaacaggctatgaatagtaaaaagtccagaaaacataaaatactcaggtactattagaagaatttgaaaactaaaatacaaaaacaaaaacccttgtttataagaaaaacattggctaaaacaaggatgttctaaattgtaaaatatttttccccttaaacttcagaaaacaacaaaaaataacaaatttcaggccactacaggaaaatacatggattagtctaaaaaacttggaaggcttagtatcctttaagttttattaagccccttttcattttacttactgttggtgttttcactctgaggattctgaaaattaaaatagcaatgggaaatggtgatagtggtagagaagaggtttaaaaaagcaaatctcaactagtcaaatgaaatcattcaaaatgtgaaaagattcataataggctgaacatgttggaacaccttaccaattgaggaaaaagagaacacatttcaaagaatggtaaacttaattccgacatgcagatttaaaaatgttgttggggatactaagtataaggaaagtgccatgacccaagggtgcactcaatgacaacatcacccccattcaagagacctctttttagcttacagaaatatcagacatgttagggcttatattctaaaattacacaggcccaattaccttgggggttggctgtcactttatattctctgagtagagctgctgacaaggaaagccaggagaaaaagaaagtcacctcggcacccacaattcagagagcatttggggtcacacctgtaatcccagcactttgggaggccgaggtgggtgggtcacttgaggtcaggagtttcagaccagcctggccaacatggtgaaaccccgccaccactaaaaatataaaaattagctgggcgtggtggcgggcccctgtagtccccgctactcgggaggctgaggcaggagaatcacttgaacccaggaggtggaggttgcagtgagccgagatcgcactactgcactccagcctgggcgacagagtgagactccgtctcaaaacaaaacaaagaaacaaaacaaagagcatttggggttctcaggaggtgtagcctgtacacatagagggtactggaattgtttaaaaaattacactgcagtttgacttcttttccatcctcactcctacacctaggtttaggggacagaaccatctgataaagataaatctgttttaagatttctggggtgttctgcaaagactactatatcatttgcaaataggttgtcttttaataaaaatcatgctacgtaatgtcttcttaatatacgctgaacaaattgcctgttttaatttggctatatatctacaatttaaaatgttcatactgttatcttttaccagtggagtgtttttttgtttgtttgtttgaagtctttaggcgaagtgaatttattcaaggaagttcacatgtcggttttgttcttttagaggggtgtctttttgaccacaaagaaaaaaaaagttttccacaaatgtcatctaactaaaggcaatctatggactttaggaagtcagttgagcacacagattaatgagccaatactgagcctcctcccttctgacctctcagcacctgctcaactaagctcaggggaaactcttgagtcttcttcttaaattggtaacgcttgccctttctttctcaaacaaatcaacgcccaacaccaccaccaaattataggcaaccaacgcgtatccaacagcataaaatagttcccaagagcataaaatagttcccaacagcgccagcgcagggggcaaaacagagcgaccaaatgggggcaccctcaggggagttgcgctcatctggagcgagacgccagcctgggaaagcggaacccctttcccgccccgccccgaggactcacgctcaggtgcaacgccgagactcccgggggaaagagaggtgaccgtctcggcgcgaccgcccacacctcttgctccaaatgaccccagcacacaggagaggtcctctcagcgtgggactccgtctctcccgaaggcagggagcacaacgaagcggccactcgtctctgcagccgcgctaccggcccgcagcctggctcgcaggtgaggcgtgaacaggtaaccgcacctgttcggccagccccacctgctgcgtccccgtatccggtcctcctcctccaccacctcggtcggcgcggctcgccctcctggaaccggggtgtcacgctccgacctacctgcgcgactccagccccggacgcccgcgctccccgcggcgtgctcctgggccgctccgggcgggcaggctgcggccccgcgcccgcactttcccggctgccggaggctgcgggctcagcgggaagccccggcgctgtccggctcgccgcctccgaccggctccattgtgacgcgacgcgttccgctggccaatgggcgctcggcggcgcgaaccgctgactaagttcgcgggtggaggaggaggggacggggcggaggcagggcgcggaggcggctaccacggtggtggcggtagcagtggcggaggaggaggaggaggaggaagaggaggaagaggctgcagtcgcttcggtagctgctcctgctgtgaatttttcagctgcctgggcctgagtgtttgcccagctctggggctgcgggagccagtgactcacctatcactgctggaaacaaagcgcagctgccatctccccgagcgcgccatgtggccatcgctgccccctcgcccagcctggggtccgcaggaggtagcgcacagccatacgccccgcggagcagctggaaagagcggggactgctttccagaagcgggagggaaatgggcttcggcgtgtcccccaggcgcgccacaccggtgacttcggcactacaccgcgtgtgtcgggc

SEQ ID NO: 4700 - DNA, 6000 bp, Homo sapiens
tttttttatatacatatttatatatacatatacatttatatgtatatgaatatattatatattttgtatatgtataaaatgtgtgtatatataatagatatgtgtgtgtatgtatataaaacaaaaaataataaatactcaaaagacattttttcccaaagatcaataaagtagtcctatctactttatacatgtaatattaggcatgtatacctgtagataaaatggaaataggagatattccaaatggcatcaggtatattatacaagtaaattttaaaaattagatgaaatggccagtttaccagaaaatattgaaatttggctctatacaaaaatgaaagactaataaaaatttttaaaaattgatatagctatattctcccaaaaactcacccagatagttttacatgtttggtaaacgtctggttcactcattcaatagatactttttagtgcctattatgcccttaaaaaagtattgttgttctaggctcagggtttattttctagctaacattttttgagtgcttatttggtgctagataccattccttttacatgtattagcatatttattcttcacaataatatatagtggggagcaggtgattactgttaaagtatagaaactggtacagagaggctcaataccttgtggccaaaacgatcttttaaaaaacacagatcgagttaacctgcttataactattcagtggcgtattactggtctctgcaaaagacccatatccttaacaaggacctaaaagcccacaatgatttggttgctgttgctactgacttctctaaagtagacttgtaccacttttctctctctgtatcctatctttcaggacctcaaaggtatctttctctcttcttccttagtatcttggcacgttgttgttcttttttacccattgtctcgtaccactcattccattatgcctagtgaaagtctgataattctgtagatcttaactctacttctggatgtctttcaatttccagataaaatgaagtcctcctactgagcccactcatagtcttatgaacttaccttcattacccctagtaaatattttgacatgtatttgtgtaataatttgattaattaatacttgattgtatgagggcacagactatacacacacacacacacacaaacatatatatatatatttttttgaggcagggtctcgctcttgtcaccgaggctggagtacagtggtgtgatcacagctcaccatagcctcaacctcctgggctcaagtgatcctcccacctcagcctcccaagtagctggaaccacaagtgtgtgctaccatgcctggctaactttatttttggtagagatggggtcttgctatgttgtccaggctggtgtgaaacgcctgtgcttgagtgatcctcccaccttggcctcccaaactgttgggattacaggtgtgagccactgcacctagctgatattttcactcaccattgtatccctagcaacttggatagtgctgacacatatcaagcacgcaagaatgacttaaatttctaaatggattatctattttagtcataagatacatgaattggcattaaagttttcaagaacctctatcaatataatgtgaggctagtcaattatccaaaaagtattctcctaaaacctaaaaagtaagaaattagtaaaattttcaataagtaaccaaggacaaaactagattgttctataaaattttaaaaactaactttaagacaaaaattagtaggatgtagttactgggaaattaaacaagttgggaaatacaaacagggtggaagatgatagttaccctacacatctcaccaacactgtctaggattacagacaaatgattttacctctttccttaatcaaaacaaattgtttagggagaatgttttaaaggaatagtcccagccgggcgcggtggctcacacctataatcccagcactttggaggctgaggctggcagatcacttgagatcaggagtttgggaccagtctggccaacatagtgaaaccccgtctctactaaaaatacaaaaattagctgggtgtggtggcacatgcctgtaatccagctactcgggaagctgaggcgggagaatcacttgaactcgggagatgaaggttgctgtgggccaaggtcgcgccactgcactccagcctgggtaacagagtgacagagggagactctgtctcaaaaaaaaaaaaaaaaaaaaaaaaaaaggaacagtccctttaagagtgactaaagatgtaaagaataaagctaaaccaagccagctacataactatagaggtataaatgtaaaattaacattcattgattatttactatgtgtcagggatgatctatgagcattttttaatagactactttacactgaatatgagcatttattaactcatgctttttcaaatcaactctatgatgtagttacaattattatctctattttacaagtgagaagatcacataagttttaagtaggcagagtcaagatttgaacccaggctaaggttaagagctggtgctcttaactataagaggacagtagttaaaatagatatcttccctaatatgtgtgtaaatactgaagatttttttattaatacaaattgttttcttatctagactatttcactagccctctagttagtttccttgactctaattttgctctccttaaatccattttccacactgcatccagtgatctgcttaaatcttaaatggacttgtacaaaattaaggaaaacctactcagcacggcaaacaaggctatgattcatgcttaatgaccccagccttctggcctctccgatgtccttttctgctactcccaccctagactttatatgtcttaaagtctaatacaaactcagtacttgtagtgtccactacacactaaccatccccacttacactatgtattttaagaactatggatctttttgttcgcttttctgaaatgccccttgttcctggcattttcgtctcaattaagcatctttctggattaaattttattttctccaggaatcctcttctgaaacccttagaagtgaccctcctctactggtacttagccatcctttattgaaattacctgtttatgagccagtaacctttattaagctctttgagaagagggattctttctttctcttttacctacatcccgcacaacccagctccccctccgtctcccccacctccatgcacaattcctggcacgtgttaactgttcagtaaatgttgaacttttgaactttactggaaatcaagaaacactgagttttagcctcagttttgctcactatgtgattttagatattttattctctgtgcttatcgtgtgtatctatatacaacttaatcctaaagttccatcgtataaaaaattctacaactttttattttgctctgtatgtgacagtacctggtatttaaaaacaattctctacatcaacttaaaaaattaacatttgatgattataattaacttctaaaaaactgaaagatgaaacacatcaatgccttttctttcccccctgtactgctacctgaaaacatcggaatttgctgtggaacgaacaagatttcttctaagaaattaccccctaccaccatgactacataaaataaggtaattcccagcaagaatattatgcagatactaaaaagaaaacatgctaggcatggtggctcacgcctgtaatcccagcactttgggaggccgaggcgggtggatcgcctgaggtcgggagttcgagaccagcctggccaacatggtgaaaccccgtctctactaaaaatacaaaaattagctgggcatggtggcgcacgtctgtaatctcagctactcggaaggctgaggcaggagaatcgcttgaacccgggaggcggaggttgcaatgagccgagatagcgccactgcactccaactctagcttgagcaacaaagcgagactccgtctcaaaaaaaaaaaaaaaaaacaatgacacgagggaaatgcttacaatgctcaatgaaaaaatgaaaagaaaggttataaagttttaatatacgatttgatcttttgaaaataatggatatataacttaaacggaaatgtatcattaaatatagcaacagcgtcttccaaaaaatttcaaaatcgggcttaatgccaattacacgatcataatccaaaaacccttaactgaagcaaagacagtgatttgtaacatctgaactgtgtgaaaggggtgggggtgattcaaacaagtgtcatcaccttgtccaatgatgaaggagaacgtgtatcagttctgcattgtgaaattctcagtatgagagcgtgtagtggctaagaaaagcagtgggcgaattaggaaacaaagagaaaagccagcgacatcaccagttctggcctccttcccaccggaggaaaggggagaaggcgggtagtcatcaattccaggtccagcctaagttctgggtccccggccccagcgagagcctcgcctcgcctcgcgcgcctgcgcggagcgggctggcttcctgaacggccctcgcctcttcaccaccagggccgtccaccagaagtttctaaacgggtgagaggcgacaacgcagtgcagctgggttaaaggaaggaggctggtttatcctccgcacttacttggtactcgatctccagcgaggccttcaggggcatgggctggtagaagcactccttctggccggcgggaagggtaaaggtgaagtcgctatcgagggaaggtgtgaagccggccgccccaggcagcagcaccggaggcagagcggccagaaggagcacggggaagggcagccagatcttgtcgcccatccctgctggggcgatcccgggctgaaagaggcgtcaggtactgttgtctccgctccgcgtttcctctctggactcctcgtggttgacagggaaatctggagtctgaagaaactccaggtggcggccgcggcggcggcgaacactccctccgaaagagaagcgcagttctccaaagggtagggactctgggcggggctagcagtcctattccgcaaccgcctcagtctcggccccctcaggccaggcgtgagcgccgcccgcctctccccctgacggcctccggttcccatggcttcccccaccaatgggcatcatggcggtaattgtgggaaatgtagtcccgggcgggctccgctagtgggctcgggcgcgctcgccgaccacgatccccggcaagccccgcgccttcggcggcgcctcacgcagtctgcgccggggcggggcagtgaccgggtaggcgcgtcccaacggctcccgcggcggttcgaattctgtgctgccggggttcgctggttctccgagttgtgtccgaggcttccacgcgcaggggcccgggaaagggtcagaggcttcctaacgcagactcgagtgcgaagcgcgcagtcgccgggtgggtctctccccagcgacgatttgggtggtgagcgactgcgccttggcgtggggaaaccggcttacctgggggagttctgttcctttccctcccggcaccttggatgcgctgggactggtcctcgtggttgctgagcatgctgctctgaacggttgtattttatttgatgaaaaataggaggccgggcgcagtggcttacgcctgttacctcagcactttgggatgtcgaggcggaaggattgcttgagcccaggagttcgaggccagccttggcaatatggcgagccactgtctctataaaattaaaaaaaaaaaaaaaaagaggaaactgtcacttccgtcccccacccccgcccccgcttctttcagacggatgtaagattagctgtgtcaagcgatcttgagacaggagactactacataaagttatgacttctttccaaaatgaggaatctttttcgactacagcccattgtatcacatacatagggtataaaagaacacttg

SEQ ID NO: 4701 - DNA, 6000 bp, Homo sapiens; identical to SEQ ID NO: 3561

SEQ ID NO: 4702 - DNA, 6000 bp, Homo sapiens
gaaattttgagagctatattatacccatattcatctcttcttgatgtaccctggctgaaactgtcaactgttactttcacacttccaatttaaaataatgctaaaagacaatcagagttccttataattgaaacttttaaatcatacagacttgtcagaatgttacctgaagaaagctattcatttttttacttaaactttaaactttcagtagctgcaaaggagttacatttcaactgtaggagaatttctgcagacggtctgattatgttggtatgcaagtcttctaactacatgaggatgaactggatgcatatagccatctgaaaaaaaaactgcatattaatttatccccaaacacaccaatctaaaccaaacactgaaccatggaggtaaggagctaagtaattaatgatgctgccagccacacacctgccaaagacaatataaacaccctgatgtttctaggctttttgaaaagcaccacggggccaggcgcagtggctgacacctgtaatcccactttggaagactgaggcaggtggatcacccgaagtcaagagttcgagaccagcctggccaacatggtaaaatccggtctctactaaaaaaatacaaaaattagctgggcatgatggcacatgcctgtaatcccagctattcaggaggctaaggtaggagaattccttgaaccagggaggcagaggttgctgtgagccaagatcacgccattgcaccccagcctgagcaacaagagcaaaactctgtctcaaaagaaaaaaaaaaagaaagaaaaagaaaagcaccacaggcccttcttattgcttgcatgctagcaaccaaaggttatttaacagctctctgggtctacaaaggccctacatcccagagagctttcctgccactacttcagccatccttgcaggtgaagagtgcaaagggtcagagcttgggtcctgctcttgaaacggttgctgactcctatttaattaaaatcagggatgccaagaaaaaaaaaatctggtgctctgcttatccagggatatgcatttcattttcaaatgatatatcaattttacttttttcaggtacttccgaccatgcaattcagatatgccttactttctatcaaatctttaaagtcattttaccacaaacttctgaaagaactatacattttccactgtcagagatgtagttccacaattgtatggccaaaacaataaagatcatattttaagatgagcattttaaaagataaggaaaattcaatttgaatactgtaaataactctttagctcttagcctctaacaggaatgcttaaaaacaagtggtaatgctttaataaaacaaaacagaattctagtatttgaaaatgtcagaaggtatttttatttcagctgtcttaaatacctacactgaatgttacatacatgaaaacctgtaactaaaaacttctttttttttttttttgagacagtttcactccatcacccaggctggaatgcagtggcgtgatctaggctcactgcaatcttggcctcccaggttcaagtgattctcgtgcctcggcctcccgggtagctgggattacaggcacataccaccacacctagctcatttttgtaattttggtaaagatggggtttcaccatgttggccaggctagtctcagactcctggcctcaagtgatctgcccacactggcctcccaaagtgctgggattacaggcgtgagccactgcccctggcctaaaaactatttctatatatggatgctttaaaagcaaattcactaatatggttactttcatcagtgaagtagtatacagtatatgattaaatatttactgaatataatatgtggaacttattctttagttacttatgctgttttcaaacagaacaattgctcttaaacttttgggaagtatggaccttttgggactcttccaagaaacatgtatagccaaaagaaaattttgcaaacaacttcagggtgaacagacccaggttaaaaacacctaatataaaatcacacaccttaatgtaatttatcttaattgtgtctactcacataggtagcctacttgttagctttatcctggcctgtttttcattcagctgaatgaaatacaattcaatgaaatacaatttcaataaaaaaatcagtaacttacgattaatctggctcatttagaaggatttatttcttcagccgttgaaaactacaaatctgctctaatctgctctaattttcagaaaaatcattaacaactcttactagttttgtttataaatatttaaactggccaaataggcttacatatatgtcattagcaggacaacgggaaagaattttattaacattgttgaaaagaagaaatcagaagggggatcaaatcagtaccattgaccaggtatgtgaaatactgttcacgactgtcatgtaccgaccatagagcctcagacatctcactgaatgaatctacccattggcggaactttataaaaactctgaaactctgaggtcaacagcaatagcactgaaatattctatgatacgatgaattaaaaaacacacaacaacagagtatcaaatggcaattttttcccctttcttaaaaaatgttcagtctgggcacggtggctcacacctgtaatccctgcactttgggaggccaaggtgggtgaatcatgaggtcaggagttcaagaccagcctgaccaatatggtgaaactttgtctctactgaaaatataaaaaattagccaggcatggtggcacgtgcctgtagtcccagctactcgggaggctgaggcaggagaatcacttgaacccaggaggcggtggttacagtgagccgagatcctgccactgcactcctccagcctgggcaacagagtgagactccatctcaaacaaacaaacaaaaaaagttcataatagtagtctgaactattgtaagtagagaggtagataagcaactaccattttacaatcatttctatgactgcaatagttatactttttaaatttaaagctgggatggattaaaatacaaataatgcaaaatattcccctgatatttattgaaatatatcctctgattacgtataagaataaacaaaattacaataaaaattcatctaggaatgtgctagtacaaaatagaagtgtttttatcactttaaaattcacatactaggccctgtgggatccaaacatacaaaacaaagccccttttctaaaggagtgcccagtgctcttagaatagagaatgaaatattaagtgtataaagatgagaaatgataatagcccccatgttcacagccctcaagaaaagtcttcatttgttctatgtgaaacctattgctggtgcaaacattttattttgtgtcccaaagcaggctaagaattaattacaaccttaataataggacaagaaagtttaaaaacgatcttttccaaaactcacaggatttggaaagaaagcatctgctgtaaagcaaatcaaacaaaaccccaaagaaaggtaataaaactgaactttccaaggaaaaggaagctgtgtttcttaatcagtttcattcttacattttgtaaaaaatactgatcttaaatatcacttggtcttacaaaatacaatctttcattgccactattttgtagattttatgaagaatgtaaaatattgtctctttctaaaggtagacaaaggcaacagtatttttctccccacatagttcttacctacttggtcaaaagagctatgactcttcataaccgatctaatcaaagtaatgttttaattaatcaagttcaataaaaagaacttgaggaatttgtttctttttttcaataaatgtcaaagctataacatataataaacgttaaactaaaaatatattccaaagtcattacatatgtctcaagttttctaaactttggcatattgactgggccgtgttctgaaatgtcataaaattttgtcacgtttttcaactgaattcagcaaatcctcaatggtggcctacttacacatttactactgtgctagcagttgatcgcggctccaataagatataaacagaaatggaattaatggtacaatttctgcacacttcaggtaagtgaaacatatatatcacctttccattctatttcagaacgcggtatcagcggatgcaacaaagaccacacagtgtagcaacggagaaatgttagcataaaacagttttgttttgttttgtttttcaattaaaaatcctacgtccccagctggttaactacacactgcataaagtttactgtgatgacaactgtttctaaaaagcaaacctttcttcccttcaaagtgtcctcctccgatccttaggccatgactgattctaatacttttgatcttaagacacacagtgatgacttttctttgaaaactagcaggttcgaatgtaggccccaggtgtctgccgtcatgcttccgactccgggaagtgagggaagcccatctccggtcagggtttactgtaagcagcccagagccggagcaccgacgcagagagacgtggaaacagaaagcgaacgtactacggggccgcagcgggatccccgcgccagacgccaccccgttagcaacatatgggagagcagggatggttcccagccccttgacaagcgcggcgacggctccgcggggcctggcggcgaaggcgaggcgaggctgcggcgacgaggggcgcggcgggcgggccgccgggggagccccgcacattcctccccgcggcggaggcgcacgtggggttcgaggccgcagggcctgcagaggcggccagagcagagggcggcaggtgcgggaaagaaagaggacgggccccggaggccgcaagcccgagcagcggaggacgattcccggagcggcggcatgcgggtccgcgaccccgaggcaccggcagctcggacagggtgggggaagggagggaggcaccgggacgcctagagacggcagtgtgggggtctgaaggagagaccggatgggggccccgagggacgctcgccggcgcggaactcagctcaccgtgcctccgtccttaatgatgatcttcttggccagcatgatactgcggttcgcggcccgtttcttcttcttcccctgggtcattttaccatcctcgattcctggcgctgctgcagccactcccggggcggcaggccccagcagctagtgccgtcccaccactactgccgggccgagccgctctgggcgcccgccgccatcttgagggcccggcctgcctccggcggcgcgtcacaatcgtgcgatcagccgacgagcgggccccgcccctcccgcgtgataccgccccgcccgctcgccgccagcccactctacagtagccgcgcggccagggtaaccgcgggctcgcgtgggtgctgctggctacctgtacaacttcgtgctccggcgtcaccagctagctaaatcctcgcaacggttctgggcgataggggccgtttttgtcccccttcttcagcagatgagggaatttgtttcaaaaagttgttacctgctcacggaaacagacgtcctaagctattaacacaatctccagctgtgttctaaccaagacaggaaccgaagggaacagtaaaaaatcattttccgtaagtaatgggtaacttaagagataatgtagtgtttcagaaacagtcttgtccttttggtgttcagggacccccgctagaactcagctggctcacgcttgtttacctccctagacccaggaccttttttattccctgccaaaaaaaataccttacctgaccgatgtcaccctttgtggccctctacgtttttactgtattgtttaaaaataaatttgatgggaacattgctagaaagggcaatttacacaagtggaagtggactttaaagtatcacaatgttaaaattagatattgataactaccgtgttgtataatagaatatccttttcct

SEQ ID NO: 4703 - DNA, 6000 bp, Homo sapiens
gccaaggcggtctccaaggtcaggagatccagaccatcctggctaacacggtgaaaccccatctctactaaaaatacaaaaaaaattagccaggcatggtggggggggcgcctgtagccccagctacttggggggctgaggaaggagaatggcatgaaaccgggaggcggagcttgcagtgagccgagatcgcaccactgcactccagactgggcgacagagcaagactccgtctcaaaaaaaaaaaaaaaaaatttaactgggcgtggtggcccatgtttgtggtcccacctattgctgaggctgaggtgggaagattgcttgagcccaggaggtcgaggcttcaatgagctgagaaatgagctgagattgtggcactgcactctagcctgtgtgacagagtgaggctttgtctcaaaaacattaaaaaataaaagaaagaaagaaaaatgcagagtttgaaaaaaaatgtgaatctggatataccattttttttttctgagatggagttgcgctctgttgcccaggctggagtgcagtgtcaagatcttggctcactgcaacctctgcctcctgggttcaagcgattctcctgcctcaccctcccgagtagctgggattacaggtgtgtgccaccacgtccagcaactttttgtatttttactagagacggggtttcaccatgttggccaggctggtcttgaactcctgaccttaagtgatctgcccttcttggcttcccaaagtgctgggattacaggcatgagcaccacacctggcttggacattctttttttttaaaaaaagttacaattcatttaatagcaactggtaatcatgaaattttcttattttgtttaaaccctctttaaacaaaagtctgcaaattagcactgatcatttgcaaaagtcattacatatactgccatttttcttaaggttgaccaaagataacctagaattatagccgttacataatcacacaaaatgattatatattaatcagacctggtttatcaccagcatttataaaaacagacgtagggaaagaactaggtctagggacacgtacatggtcttaatatagcgactgtttatcctgtcctgactattacaaaatcaattttgacattctaaagtaaactatttgagctacaggattgtcatgggcattgatagctattttaatgatgtctaggcatgcttctttaatttggacttttaaaagttcttaatatatacgcgtaataaaaaagtaagctaagaagtatagccaggcatggtggctcacgcctgtaattccagcactttgggaggccgaggtgggtggatcacaaggtcaggagttcacgaccagcctggccaagatggtgaaaccccgtctctactaaaaatacaaaaattagctgggcatggcggtgggtgcttgtaatcccagctacttgggaagctgaggcagaaaacagcttgaacccgggaggcggaggttgcagtgagctgagattgcaccactgcacactagcctgggcgacagagcgagactgtctcaaaaaaaaaaaaaagaagtataaataaaatgccttgaagttttaaaaaaagattcttaatggattatctagctttcacatcttttccttaaccttgtcaaataatttgtcttgaagcaaacatactagttattctggaaaaacgctctccagtcggctgttggaagctgtggtgaatcgcagccagccatgatcatattaggaaatttaagatgaagtagttttcagatgagggcagctgtacttttgaaatcaatatggatttttccttttccatctgcttgatttttgaaagggcagtttatttttgaggccatttcaatagtgataacagttgagattgaatggtattgactactgtaattcatagaagagtaatacagaaaacattctttattcacttcaagcaaataatcgtaagaattttatgttatctatttcttttcttttctttttattttatttttgagatggagtttcgctctgtcgcccaggctggagtacaatggcccaatcttggctcactgcaatctccgcctcctgagttctggtgattctcctgcctcagcctcccgagtagctgggattacagattcatgtcaccacgcctggctaatttttgtactttagtttcaccatattggtcaggctggtctcgaaactcctgacctcaggtgatccacctgcctcagcctcccaaagtgctgggattacaggcatgagctacagcgcctggcccaaattcatgaatgttttaactataaatttacatgtgctaattttatatttaaataatacattttaagtaagaaaaatatatattgacaactaattactgactagagtagttgtctgttattggtgtcaagaaatagatgacataaggctggatgcggtggctgatgcctgtaatcccagcactttgggaggctgaggcaggtggatcacctgaggtcaagagtttgagaccagcctggccaacatggtgaaaccccgtctctactaaaactacaaaattagctgggcttggtggcacatgcctgtaatcccagctacttgggaggctgaggcaggagaatcgcttgaagctgggaggcagaggttgcagtgagctgagattgcaccattgcactccagcctgggcaacaagagcaaaactccgtctaaaaaaaaaaaaaaattcgcgaatttgttcataactaaagctgacttagtgtggcaggggaaataatcccttgcctgttttgtcttctgccatgctggcctcactcagtgtagctagtcctggccagtttgggggcatgatgtgctgccatttactcctgttatctttagtaccacagtgacctccagtctcgggatctatacaccagacctgtcttccctcggaccctgcaggtttctcccagtccatagccttctctgggcttctgggtctcactcctgtggagggatgatctctctcagctgattgcctcgtccatgaagggatgtacaggattctgtgtgtttgtcctcaggcccatcaggttagacacttcccttaaagagtgctaatctattgcatacacatcatgttgaaagcaggggctgggtgcggtggctcatgcctataatcccagcactttgggaggctgaggcaggcggatcacttgaggctaggagttcgagaccagcttggccaacatggtgaaaccctgtccctactaaaaatacaaaaattagccaggcatggtggcgagcacctatagtcccagctactcaggaggctgaggcagagaatctcctgaacacgagaggttgaggttgcaatgagcaaagattatgccaatgcacgccagcctgggcaacagagtgagactccatcttaaaaacaaataaacaaaaaaccttaatgtacaaaaatattttttattttaatgtatatatatttttatttaatttttttaaattatactttaagttttagggtacatgtgcacaacgtgcaggttagttacatatgtatacatgtgccatgttggtgtcctgcacccattaactcgtcatttaacattaggtatatctcctaatgctatccctcccccctcccccctatttttatttttattattgagacggagtctcactctatcacccaggctggggtgctgtggcacaatctcagctcactgcaacctctgtctctcaggttcaagggattctcccacctcagcctcccgagtagctgggcctacaggtatgtgccaccacacccagctaattattgggcttttttttttttttttttttttttgagacagagtttcactcttgttgcccaggctggagtacagtggtgcattcttggctcactgcaacttctgcctcccaggttcaagcgattctcctgcctcagcctcccgagtagctgggattacaggcgcctaacaccacacccagctaatttttgtgtttgttgtagagacagggtttcaccatgttgaccgggctggtctcgaactcctgacctcaggtgatcctcctgcctcggcctcccaaagtgctgggattacaggtgtgagccaccacaaccggcctaattttggtatttttagtagagacagggttttgtcctgttggccaggctggtcttaaactcctgacctgaagtgatctgcctgtcttggcctcccaaagtgctaggaatacagacatgagccaccgtgcccagccaatgttttgtatttttatacaccagcaacagccagttaagaaatgtaataggccaggcatggtggttcacgcctgtaatcccagcactttggggggctgaggcgggtggatcacgaggtcaggacattgagaccatcctggctaacacggtgaaaccccgtctctactaaaaatacaaaaaattagctgggcgtggtggcgggcgcctgtagtcccagctactccggaggctgaggcaggagaatggcgtgaacccgggaagcggaacttgcagtgagcccagatcacaccactgcactccagcccgggcgacagagcaagactccgtctcaaaagagaaagaaatgtaatcggggggcatggtggctttacaaaaaattagctgggtgtagtgtcgggtgcctgtaatcccagctacttgggaggctgaggcaggagaatcgcttgaactcgggaggcaaaggttgcagtgcgctgagaaagcgccattgcactgcagcctgagcagcaagagtgagactccatctcaaaaaaagaaaaaaaagaaatgtaatcaaagagatacttacctagctggggagataccatgatcaagaaatgtaaccagaggcgtagtggcctcccctaaggctgaggcggcggcgggcgcgcgaggctgttgtgctcccggctctcctgtttcccctcctgagcgggtggaggaggcccaagcgatgctgggcgcgctcccccttcctttccctccggcgtcctctcccggccctctcgcgctgcactgtctctccgacgcaagattctcctggcccggatatggctcgtggacagcagaaaattcagtctcagcagaataatgccaaaaagcaagctggacaaaagaagaaacaaggacatgaccaaaaggctgctgccaaagctgccttaatatatacctgcactgtctgtaggacacgaatgccagaccctaagaccttcaagcagcactttgagagcaagcatcctaagacttcacttcctccagaattagctgatgttcaggcataaggttgtttacaggtgaattcacgacacctttgactcttctactgtctcagaccttaggtaacatacctgcagctgcttttctaacaaactgttgatcagcaaaaataaaggggctacagaaacactcattttttatgctgttcccttttgggcttcatgcaaagacaattctgtgtaaatgtacagttgactctgatttggaaatatgaaaatcagtccatccttgttataaaaaaattttttacaattgtaattatattgatgttcatattgtgtaaaataactcatttaataaaatagtactttgatttacgaaaaaaaaaaaaaaagaaatgtaaccaaagagaaagatagcatttctgataacataaaaagtatgcaggctggacatggtggctcccacctgtagtcccagcactttggaaggctgaggcagacagatcacttgagcccaggagttcaagcccagcctgggcaacatggcaaaattctctctccacatggaaactgaccaacatggagaaaccccagatttactaaaaatgaccaacatggagaaaccccagatctactaaaaatacaaaattagccgggcatggtagcacatgcctgtaatcccagctgctctggaggctgaggcgggagaatcacttgaacgcaggaggcggaggttgcagtgagccaagattgtgccatt

SEQ ID NO: 4704 - DNA, 6000 bp, Homo sapiens
ccctgaatctgtctccccttctccccagtaatggagattggagagcaatgagagatttggcaacttccgatggatggtggtagcaaaggggagttcagagcccagctgtgggcagagactaagtgatttattatcagcctacaaagtacttgaggagcccttcaggcccccgcttgacctctatcctataaaacagcacactggttaacagggcaggccattgagtcaacctgcctgctgctgtctagctagtataaccctaataaaactaactagtataacctggttatcacagtcgttacttaacctctcccagcctcactctcccatctgcaagaatgggatgagaagggcaggacccgccccatggggctgctgtgaggtcagcaccatcacaggctcatagtgagtgctcaggaaagatcagatcttagaactgagaaatctcacagccgtgtgtccgcagccactgtgcctgtctggcttacttctatacagtcacaacgtccaggcggcactcatatgtatttaggagactgacaaacccacaatctcctgggcaggtgcctccctcctcttacgcctcaaaggtgcaatggtcataggtaagcactagcacagcaccccagactagggcacaaggacacagcccccatgccagagttatacctggtacaatgtgctcagggggtcacgcggccaggacaggcactcccaagcaggtactccttctcaacagccctcacctcctgcctgatgggatctaagatcagtaccttttcctttgcctaagacaagaattgcctcctgggacagcaccatcatcctccaggaaggtctgaaccatccccatgcccctctggtcagtacagggctctgtggtggcgtgggtgagggctgctaggatctcagcgggccaggccaggctgcagctggcaggggtggggtgaaggattgtgactgaggggtctctgtggtaccctgagctggagacatccttagggcagaaatggggacatagggacctcctcagccccaatggggaccaggggtgtcgtgcagccccgtccttccttagtcccctctgtgagctgctcagctctctctgcaggctctttgtgattgcagctgcttccccgaggcccagccctggtgctgacgtgccctctggggagagctgtggctcccaggctcatggatttgtttgatcttctagcattgggcaggggggagtctggcccttgatctgagcctagagtctttgcccctgcaagagagacctactctaacagagagaccctttaaagtagggagtggacagaagaagagaggcttccatcctcctgggaagctcaggatcagaagccagccacccccagaccttaggttttcctacttgcctgccctgctctgtgtgtggtgtgaggcagtgagtgagggctttagaaggatccctttttgagatgccaggcgtaagaacaatggtttcaacttgtttctgaaaaagcaaatcaggaagaaaatttcctcgtgcattagcagagcaatttctgcttgtcccccaactctgctgcaaggaggctccccccagttcctagacagcttcctccagggtggctcagagcttaagcctggtgggggtgaggtccaacctgctcctcctctcaagctagtttcctttggatttggggtccagattaacttcacctcttgggcagcactgcaggaaggctgccctccagccaggcacagggtgggagaaccccttggtcagggtgttcagggtggcaggcactgagaagatgtgggcttaggctggaggaagcccagcaggtttgactagatgggtgtgtgtgaggggctggggttgacttccccacctacgtagtgaactgaatgtctcattaggtaaaaaggacactgagatgcgtttgggcctgagtgtgtcctgggatgggaggtgttcaggttttggatgagaatatcacactccttgcttttgtttgcattctctttggtaaacaaagaaacatgggctaatcttgtagcaaggaatcatcaaactaagaaaggacttactctaggatggttaccgtcaggatacggagcccacagaaactcccataaatgttccaggttagcaacagcctctgggtggtttgtttagattggggttgtagtcctgaaggatgagggggtggccagcatgcatgaggggatgaaaaggatgtctgccttcttatggattcctgagtcacatccaccttttaccatttgaaagaggattactagaagttggaagaaatttacagggtcagccagcccaacctttgcctctaggcaggactctctaaccttggaccagaccccagttctccacaccatccttagagtcatctgaaaggagactgccccacctcctcatggctcactcttctagccaggaagtgtctcctgcagtctaacttaagtccctctggcttccctggcatattctttgctctggttcttcctcccctgcatatcaatcacctcttctccaaccccctggttctgccctaggaatccctccaaaaatacaaataccacccacactcaggcttagagattgtctttgaaatacgctttctcaccaacgtttggctcaaggaggtttctgaagagggcaccatgcatcctccaaaccaccccaaatgcgttgcttccctggtgactttagaggcagaaaggatgccttggggtacacctgtctatgtacatgctcctaaggagtaagtttggtcagccagagacgagatgtgcaatcaccccgttaagcacaattcctcggaggcccatcccacatgtgtctctatttgaacaactgctggcagagaaggtgctggaatggagttgcataaggagtgaaatctggcaggggaaatggtggcggcgggaggctgagggctgaagccggtggagtacacgcgatgagagaagggagtgcgaggaaagaaggagtagaggaagggaggagagtaagagagaaagagccgggaatgagagcagactcctggagtctgaggcactcatctgcataaggagtgtgcctctgcttccctcaccgctcatggtgtgagcacagtggtctctgcacctgtgaggcaggtggaccttgggtgactttgacatcatcaggtcaggggccctttcctgtctgtctcacctcctgcctccctcttattcgctgaggacttccacgggagattaggaaggactctgaccttgtggcaaaagccctgtccatggttctgcagcttggctagaaaggggttaactggtgggcaccctggggaggggcttggatgctgctgtctttaaggggagagctcccttctcccaaggccaggagtgagggcacctgttgtgacctccaggccatctccctgtccaggtgcgatcacagcagcctctcccacaggtggcccaccttttgctgcactcgatctccagtggctcatccggcccctctgagtgggaccaggaggtagagagactcggaggctaagtgagctgaggcgtctttggccagacggttgggagaggaggccgaaactgttgcccagacgagaccagaacatcacctgtgcactgggtttcttgggctgttcctcctcccagctccttctgagcagagggaaaagatgctgaaacccacctttctccagggctggggccatggcatgcacaaccccactccctcctggcctcactggacccccccccccaggacacaggctcaacccccaggggtctggggctagagggtgcccgtctccatccccaagtagcagcaggattctccccttccataggcactgccttctccatgccccgctgcttcccagacctgagagaccctcttggagaaggtgacaggattcagctctggacactcactggctggggctgccccccacctccagcccattatgtaagccccacggtgctgggcagaaggattgccctctctttccagaactccccagctctgccccttcccttccccataccattctggccccagcccctttccttactggaaagccaaactttgtgcaaattcttccctcccaccagtgaggatgggggggagggatttgaggagaagctaaggttgggagggggaagggaaggaaaggaatttcagcccggtagccccagcctctcgccctttgggatgtgactggcctcaggactctcctccccgagtcccagttcctggacaggcccttgcccaaacttgtgctccactctcccctctctcttccacagcccccctctccatccagctgaagcaagactttgcaaagaggtcaccctgcagaggtagaccctgggtgacctcaaaactggggactccggctcaattccatgcagggacttctggggcaggccagggcccagggcctggctgtatggactggtcctgtcctggaccgggtgcccagggccggcccaggagaaactgccctctccacaggcagctgccactgcccgctggccaactggaattcctggacacactcctggggtccagcttttcggccaggctcggcctgagagagccctgcgggatgccgcccacgtagacagggcggaggggagccccagcacccaccctggggctgaggggagaagtcagaacggccccagcctgccagtgttcctgtccctgttccctcccaagttacaagggggatatttacaggaactgagccgggagccccggcccataacagcacgcagggaagtccctgggttggaggagacaaaagcggttggcacctacctggggcgagagaagggtgttggctggggcaggtggatgctgcccgagtcggtgagccggggccggccgggccgccagcccctgtctgggccgctgtcctttgggccctggcggcctcagccgctcgctgtccgggtgcggcggcggccgcggcggcggtggcgggtgagggcgcgtgtgtgtgagcgcgcccggagccactgcagcatctctgcatcaagatgtgctcctccctctcccaggctccgctcactggctggctctggtcctcagccaacgctcgggggccctggagatggcttccttctgcccccctcccaccccacttccgtccccaccctcctggctttacctcatttgctgtcatttaaggaccagggagcgagcccagcgcgcgtcttccataatgcatgggccgctcatggacaggccgcggggcgctgtctggcccgcctgccctcccgatcctgcccagccccacttctagtccccctgcccagggctgaaggggcaggagaggggcggggtgaagagggaaaagaaagtggctcttactcctcaaaccctggagacccatggagccaaaactcctggtttccccagaaatcccctatccgaggaagagatccaaatcagaaatcccagcttgctgtgtggggcaagtggcagggaggggctgtctctgttgcccggtccaccccatgttcctctttattgtttcccttgttcaaaagtagtttgagctttttgtcaaaatatctaaatattagaggacatttaaaaatacatagtgaaagtccctcaaccactactcttaataaatctaagtacatgcccccaggtttattattttcgtgtatacaattacatgggttagtagggttatttcacacaaatgtgattacataaaacagtaggattggccaaagacttttaactgtgtaactgatcttggacacttttacgcatcagtacgtttggatccaatcccatttttaagcaaccagcagtgtgatgtcatgaaaagctccctggattaggggtctgggtgtctgaagcatactctgggctccacaaccgactggctgtgtgtgcttggctaggtgccctgccctctctgagcctcgctggtacctgaagggattaaagatggacacagtcctgccagc

SEQ ID NO: 4705 - DNA, 6000 bp, Homo sapiens
ccttcatccaaaatatgtatggaaattactggtcaagtacttcattgatggttccatctaataatgatatggttccgtaaacatttagaaggtttttagatatctagaataggcaaatagacagaaaggagatcactggttgcctggagtcaggggcaaggagaacaggcagtggctgctaatgagtgcagggtttcctctcaggtgatgaaaatattctaaaattgactgtaggaattagctgggcgcagtggctcacgtctgtaatcccagcactttgggaggccaaggcgggcggatcacccgaggccaggagttcaagaccagcctgaccaacatggagaagcctcgtctctactaaaaatacaaaattagccgggtgtggtggcagacgcctgtaatcccagctacttgggaggctgaggcaggagaatcacttgaacccgggaggcagaggttgcagtgagctgagatcacaacattgcactcttgcctgggcaacaagagcgaaactccgtctcaaaaaaaaaaaaaaattgactgtaggaatggttgtacaactctgtgaatatactaatttttaaaaccccattgaattgtacactctacatgggtgaactgaatagtatgccaattatagtgcaataaaactgctaagaagggcatttagaaacaaccgcaacgctagaacaccagaatcccttttttttttgtcagggtctcgctctgtcacccaggctggagtgcagtggcgtgatcacagctctctgcaacctccgtctcctgggctcaagcaattcacctgcttcgatctcctgagtaggggggaccacaggttagccaccacacctcgttaattttttcgtatttgttgttgagatggagtctcgccatgttgcccaggctggtatgaagtcctgggctcaagtgatccacctgcctcagcctcctaaagtgtgggggtaacaggtgtgggccactgcacccggccccctgctaattttgaacaaatttttttgtaggaacaaagtctcactttattgcccaggatggtcttgaactcctggctttaagcgatcctcctgccttggcctcccaaagtgctgagcatataggcgtgagccactgtgccacgcttcttttttttttaaataaattagttgagtttggccctttgtaaatatgtaccaatggaatatatgagctattattaaaaccagatactgttacttctcctttgctatgactaactttttatttctgcagtatatgttgctctttggtttaggggactaacaactttttaaaaaaataaaatgttatctgtgtcttgcagggctgttacagggggttacgagcaaaatggcacctggccgggagggaggtgggggctgaaccagccccaattcaaccaggaaggggcatcttagtgttcacaccaaaaccaccttcaactggttgtgagctaggggtgctgctatggccagtgggggaggcctttaattctaagtcttacgttctgagtgtgcctctttctaattcaaaggtacaatataaatagactgtgtgacctgcatgaaaacattcctgtttgcaatggcacatctcacagaaagttaccatttttcaaaccacctataatgagaatggatgtcaaaatgggattctaacattttgtaagaccctaaatttatcaaataaagagtcaaatatgtgcaatgaactcttcctgagacaggaagaaggggcactttttagaaagatattcaacagaagggttttctagttgactgactatcaaggtagagaaaaccctataactccattcattaaaatatgactattaataccttactaaatatccttctacatccttacccacgtttttatacacatgcttttaacacgtgttttaaataacaaaaatgagattccactaaatcaactattttaacctgtcccactcactcccctctttattatactttttgtgtcaagttgatttatttattgaataaataaaatccagacttttctgtttaagtgcctgaatttgttcttacacaaagcaagtgctctcaagaagctcattcttgaagatggttgagaaatatcaatgaccaatatcaaaagaacattaacccatgaaatgtacatgaatatggccacgcgtggtggctcacgcttgtaatcccagtactttgggaggctgaggtgggtggatcacctgaggtcaggagttcaagaccagcctgaccaacatggtgaaaccccatctctactaaaaatacaaaacttagccaggcatggtggtgtatgcatgtagtcccagctacttgggaggctgaggtaggagaacagcttgaactcagaggcgggggtggaggtcgcagtgatccaagaccgtaccactgcattccagcctgggcgacagagtgagactctgtctcaaacaatgacaagaacaacaaaaatttacatgaatatgcatatcagctgaaggcaagcacattacaaatgtaagtacaatttagtagaaggggtgagggagcctgggtgtcaatggggaagccttggtgagctcctagaagtaggatgaaggctgtgagacagtctcagtcctggtgatacagtcaggatgatgtaacagggttcagtgagggagtgcaaggtgacagaacaatatggagtatcttatactaattcctgcaaacttctcaactatgtacaagaaaacaaatacttacgaaacagaagaaaatggccaggtatagtggctcatacctgtaatcccagcactctgggagaccgaagcagtatcacctgaggtcaggagttcgagaccagcctggccaacatggtgaaaccctatctctactaaaaatacaaaaattagccgggcatggtggtgggcgcctgtaatcccatctactcgggaggctggggcagaagaaccgcttgaacctagggtggggtggaggttgcagtgagctgagatcgagccattgcactccaacctgggcactaagagtgagactccatctcaaatttaaaaaaaagaaaaaaaaagaaatagaacaaaacacagcagtggatacagtgctttttggttcattcaaagcagtcccatcagagtagcatattaaactatacaaacggctccaaatggcaaaatctagacagtagaaaatcccaggtcctaattatgttgtcaaataacttacaaaaaaaaaaaaaagatgaaggaagaagctacagattaaaagagatttaacagatttatcaaacaaataaaaaaggacttttggaacctaattcaaataaagttaaaatacatatgacatttacaagaaaactggaaaatctggacagtagatatttgatatcaagaaattcctaattttttagatgtggtaatagtattgggttatgctttttaaaagtccttatccattagagatgcatatagaattatgggtgaaataatatgatgtacagaatttctttcaaaataacatgggaagggcggccaggtatggtagatcatgactgtaatcccagaactttgggaggctgacatgggaggatcgctggtgtcaaggagttcgagaacagcctgggcaacatagggagactgtctttactttaaaacacacacacacacacacacacacacacacacacacacacacaaacacacacacacatacaataaaaaataataatatgagaaaggagaagtggataacgaaagcacagacaaaagaagactgggcttgagctaaatcactgtggaagctgtgtgatgaggacaaggggtttcaacagattattctgtttttgcatatagttgaaatccttcataataaaagttaaacaaaaaagtgctacaaatcctaacgctgacactaaattctacagcatgaagaatttatggaagagtgagactctgtcaaaaaaaagaaaaggttgtggaaaattacctaatgatacaaaaagtataataaagggggtgagtgggacaggttaaaatagatgatttagtggaatctcatttttgttacttaaaaaaagcatgtatcatgtatataaaagcatgggtaaggatgtagaaagatacttagtaaggtgttaacagtcatcttttaatgaatggagttataggcttttctctaccttctttattacgtttaagaatttaatgataaaaagtcacgcatgttgtttcaccccagcagtgttggctttactaaaaacacatactctaagaatcccatacatgaaaggtggaacttaatcaagaacatgtcagagagaagctgcttgagcaagaaaatatctgaaaagcaagctctcctagaagagaagcaaggcctccttaacagtttataagcacacacctgttaggggcacatactgcctgccagtgcctttcactctaagtctctctgtaagctgtaaaagcaaacagtttaatggcaaatacatactctatccaggttaaggtgccacagatttataaacgtgtaaaaacaccagaccttgttttggggttaaggtgagaaaagggcttgctaaacagtctctttcctagaaggaagttctcttacccactcactccctgggacagaaggtcaaagagcatctctggttggaatcataatgcttcggcctgaagtgaccaggccactcactactttagttgcccaagcagtatcaaaggagctcacctcatagtctttccttggaagaatctcatcctcctcctcctgtgtttctccaaggatggtctagaaaaacagatccgcagagggagccttttttagtggttaggagtggaaggaggcagaagtatttactgaaatcagtggctagcttctaaatcatctggagccattatcaaataggaaccagccctcaaaaaaaacctttcaggggtgagggaccatgtgggtgaggatctacagccatcagctgagctcttcatttccactgatagtctccaaataaccaccctcctcttcaggacacctcaaagatgtccaacgccagctgaaaaggggggtaaaaatgcaggttccatttgacagtgtgacgtatctgaaatcagaaaggacttgtcaactctgggaacacaactcaagttttcccaggatgctttgcagggggaagctggactgtcagtgacccagaaagggtgagggatagagtgagaaaggactggagaagctaaaacagcagcatgataagcacaaagtcctgtgaggaagctcattctgaaaacgcttgtttcattccaaactcttttcagatggaaataaaaggaaacatgggtgggatttactggagctggcctggattctccctcagattccaggaggggttatgagaaaagaccccagacttaggcacgtgaagcagggtagacgcttcgagagccctggctgcggtccccaggccccacccgctgccacctgcgggcccagattggcccggccccacccccggcaacgcctctctcagtcccttagcaaccgccccctccccaggccgactccgccggcttcttaccagctcctcgggggtgcgggtctcacgctcaccgcagcagcagcaccacctgcagcagcagcacagagaccccctgcaccccgccatcttcctcctttactgccactctggacccctctaccaaccccctcccagccaggatctgcgcctcacgtgactggccccgggacggtcacgtggccctctcgagctctgggactgagaccaggagtggctgcagacgggtggggcgaggactcgcgtcacatgacgataaaggcacggcctccaacgagacctgtgggcacggccatgttgggggcggggcttccggtcacccgcgccggtggtttccgccctgtaggcccgcctctccagcaacctgacacctgcgccgcgccccttcactgcgttccccgcccctgcagcggccacagtggtgcggccggc

SEQ ID NO: 4706 - DNA, 6000 bp, Homo sapiens
acgtagacagagaggggaacaagacataccagggtctgtggtcggggaaggggtgtggcgaggggagggtgagcatcaggacaaacagttaatgtatgcggggcttaaaacctaggtgatgggttgataggtggagcaaaccaccagggcacacgtatacctatgcaacaaacctgcatgtccagcacctgtatcccagagcttaaagttaaaaaaaaaaaaaaagaaagaaagaaagaaagagttgaacaatgagaacacatggacacagggagggaaacatcacataccggggcctgttgtggaggtgggaggctgggggagagatagcgttaggagaaatgcctaatgtaaatgacgagctgataggtgcagcaaactaacatggcccatgtatacctatgtaacaaacctgcacgttatgcacatgtaccctagaacttaaagtataataattaataataataataataaagaaaaatgtaagaaagagagagagacaccactgtagacagccacacagaataaggtgttgggagatggcaagaaaaggcagaaccatacacaggctggtgcctagtctgggccccagggcctgaagtggggtcagagatgagagaagccaagttaaggatgaaattgtaacctcaggtgagacaaaatgctagaaagcagacaaacagaaagctggaaaatgttgagatgccactggaggccggctccagaaggaagcagctgagtctgcagttagatgaattaagggaacattgagattcctcacaaggcttgggtggtggtgggtgcagccagaagaaggtgagcccaatggctgagcccctctcaaatacagctggtgtctcccttgaaaataagctgttccaggtaaaggggatagggccactgaaagcatcttggcccgtgttcaacaggacagtggtgaagggcatgaaactgctgggcatcagctccctctcagcccagggtccatacacaaatgttccaccttttattccccacacttccatttcctgagcactatgtgctagcattccccatgcaaagtgctttccagggttcatctaatcctcacggcaacttcacgaggaaggaattatcatcttcagcttacagatgaggagcattgccctgccacccaccaccacctctgtcccctagtcccttgacagcttcacttcttgctgagcctagagctgcacaggctcagccaggttcagagccagcttgattggatgcaaatccctgcttctcccttaattgctttgtggccctgggcacattccttggcccttctgagaccagtatcctcatctaaagacaaaatggggaacacattacagtaatatccacctcctgggcgtttgtgagaatcttctgggagaaggcagtggttctcagcgctggcactgtaacaaatggcatttctcagagttgtgaggcgtgtggccaataatttatagctataaatagttaaaccagggaaggtggcaaacggcttgttgttttagtatacatagcgaattcaatgttttctctgcaatgacatcactctccctgactagcattccacaaagccttcctgaatgagagataaaggatctaatcccctgggaatttgcccataggctgcagcctatcttatctgtgccacagcctgtgggagtgcagcaagcaagcaaatacagtctctcccgaggtgtggtgtggcaaggctaagcgtggtgtggggatgaggctgacagccatggctatgaagaattggcattgggcctcgcccctagtgggtgctttttggaagagggagcctcagagaagcaggggaacaaaaggggagagaacaaaagctctggatacaaacctgtttccctcaggcacagtgttgtggctttctcctcctaggagacagagataccctcaggtagaaaaggggaaaggggcaaggaaggccaggcctctgggtgaggctgatggggctggaacttaatgtcagactggcccagcgtccctcaaattccccctggggagacacagagtctgactgggaagccttggggtaaaggtaacacctagtggttagaaactatgggtggggctcccagcactttgggaggctgaggctggggagttgggagatggcaagaaaaggcagagccatgaggtcaggcagatcgcttgagctcaggggttcgagaccaggctggccaacatggtgaaaccccatctctataaaaaatacaaaaaatagccaggcacggtggctcacatctgtaatcccagcactttgggaggccgaggctggcagatcacctgaggtcgggagttcaagaccagcctgaccaacgtggaaaaaccccgtctctactaaaaatacaaaaaaattagccaggcgtggtggcacatgcctgtaatcccagctactcaggaggctgaggcaggagaatcgcttgaacctgggaggcggaggtcgcagtgagccgagatcatgccactgcactccagcctggagaacaagagcgatcatgctactgcactacagcctgggtgacaaagcaagactctgtctcaaaaaaaaaaagaaaagaaaaaaaaagaaactgtgggtggaacactcatgcctcggtcaaggataggtgctagagacaacctgacccaaaattgatgatcatggcccaaggccacaccctagaaaggaagttttagtctctcccaggcacttagttcacaggtgcttaggatcaatcaacacggcttcttccctccagcgaccaccaccaactcactcctgctcattccccagctctccacgtttcctcaccactgcaacccccaccctcaccactccaacacagaccacctcaccccaagcccgcctgagggacctctcacctggagacagcttcacttgccaggactgatggctgtgccagcagccagccccaccctctcagtgactgagaagctgttccaactgtagaggcagacccagccaaaggcagcaggcaggattagccaattccattgactagaaagggccttacttccctgtggacactgcctacatagtctgcattcagctgtgaggtcctgtcccctctcaattccaacctacaccaccccccaaagcaagtgagaatgaggatggggaggaaactcaagacaggggttagcactgcaacctctcatctctgccctccttcctgtatcactcactgcactttgcccagtattcctcccttccccacagtggcacagtggccccagacacagccagagtccattcaaaaatgacaaattctttatttaaatcaacaaactcatcttcctcaagccccagaccatggtaggcagccctccctctccatcccctcaccccaccccttagccacagtgaagggaatggaaaatgagaagccacgagggcccctgccagggaaggctgccccagatgtgtggtgagcacagtcagtgcagctgtggctggggcagcagctgccacaggctcctccctataaattaagttcctgcagccacagctgtgggagaagcatacttgtagaagcaaggccagtccagcatcagaaggcagaggcagcatcagtgactcccagccatggaatgaacggaggacacagagctcagagacagaacaggccagggggaagaaggagagacagaataggccagggcatggcggtgagggactgaggcccctaaattttggtcccaggggaaaggaagaggccagttggtccagttttgatggctatggggaagggaatgtattagtaagcatgggggagaggatgccagcaggcacctcagaggtgacaggacaggctgaaccccccaccctgacagaaaggagcttgagagctctggggctctctgggaatgtcactgctaaaatatatatctacatatatattaaccattcgtgggagggcaggggcaaggcctggggtgggatcagaggatctggcgtggcatcccgtagccagtcatgcctgcctgagacgccccgcggttggtgcccatctgtaacccgatcacgttcttgccctcttgcagctggttatccgagaagttccgaggattctccttggatttcctgggtgacaagggagtggtggttagaggagatcacaggctgccctagtaaatcccttccttggacagagcacaggctttgctgttggctcaagggctggtgccagctctgccctcgagagccataagctctctgaagccacctcctcatctgtccaaagggacagtcatttgccatcccagagggtgttgtgaggattaagtgagatgaggaattttctgaaagtgctttgtaaagggccagctgctactgagataagttatttcctagggacaggattgggcagaaacaatgcacctgctggaccctgcggctgtcccagcaatacttacttagggaaccagttgggatccccagagaagagcccatcatctcgggctactgccagcccacccagattcatcagcgtccgctgcacacaggccatgttctttcctgggaaggagaatgggaatgtgtcagcctccgcagtgtcctagataccagggttccgcctctatcgctaagtcagcaggcctggcttcctaattatttctactgttcatttccatacccttctccattccagcctccaatatgaccaagtgctccatggaacacaaacacacccctctttctctgcagggagccagaaaacagccccttctgcctggtcaagagggcccagcccaatctctggcctcctggatgacaggacccagcccctcgccctgtcccaccttcccagaggtccacagtttggaagatgtcagtggtgttaatgccatagcgctcagctgcttgcaggaactgagagatctgctccatctgcttgaaggccatggtggaggcctggatcttctttactggggcctgcccctcggggtacagtgcattaatgagctcacatagcacctggatgaggacagcaggggtggaaaggtgagaatatgcctacctatcgcagctcagcgtgcaccaccctcagaaccagagacaatgaaccagagaggctcctgtcttgcctgaagacagcttggactctttcactagagtaagcctcacagtccttcttgccagcctccttcctccgagcccagagtgaaaagccagtgtttagtctttccttgctaatataccctcccacagttctttccttagagacattcttcctcagtgtcacctcagtcttccactgcctgggaggcacattcacccttaccctccactccacgggaagggaggaaagcatgggccctctcacatccttgacaaaggccttcaagctgaggaagaggctgggacatgtgtgccttcagtcttctcctcttcaggttaaacaatccccagtccactggacccagtcctgctctccctgcacttccaagccagtggggcccggctctcaccgtgccatccttgagccagttctggaagttctcgcgtccaggctggggccggcccacatcctttcggcactgggtggtgatccactggatcaggatctgctccagatctgcatcatattgtttctcaatcttctgctgcacctcccggctcaggccatatgcaggtcccctgttggccattccaatgggtggcggtggctgcggggagctagggagaggacacacccgggcttttggtcaacaccttgcagcctggggagtggggaattcaggaattctgcctgcagggatatacaccatttcccccacggtgagccccaaggatgaggaccagaactgttaccaaatgcaaccctgctctttatagccctgggaaagagaatgatttggggagaggaggaggaatgtggaacagcttaggaaactggttggatctaccctccctcaacctctgggttttctttgctttttttttaaccatctagg

SEQ ID NO: 4707 - DNA, 6000 bp, Homo sapiens
aaaatttaagggtagccaggcgcggtggctcatgcctgtaatcccagcactttgggaggccgaggcgggcggatcatgaggtcaggagatcgagaccatggtgaaaccccatctctactaaaaatacaaaaaattagctgtgtgcagtggcgggtgcctgtagtcccagctactcgggaggctgaggcaggagaatggcgtgaacccgggaggcggagcttgcagtgagctgagatcgcgccactgcactccagcctgggcgacagagcgagactccgtctaaaaaaataaaataaaataaaataaaataaaataaaatttaagggttgatcccttccagctataatattctttctattcaaagtgacacaactgcatccttaattctaagactccaacttcgacacagcctttgacaatataaaaggacagcaacacttttcccctcaagaaatttcaaatattcaaaaggcatcccttcttttcattggaatatccttcatctccagaggatataaagaggttgcccacgtggactggtaaagaagggaaaccaagtagactgcaccatctggacagccaacacactaacaaaggattggggcacaatggacactcatcacaaagaggtgacacacatttggccatgagatttgaaattttcctctagctctccttcaacactgtgagacagctaccacccaaatcaagtaatttattaaatctagttcactggatagatctagagtatttggagaacttggcactaaggtacctgggatttcttacctgccagcttcagaagacatctgggaatggtaatttcctaatgtctttgtagtgaagactgtaaaattcaagttaagtatgaacttacatcaacggcaagttaaagccaagctctgagaaaaaggtttgcttctaaacctcaatcctctctccttctctaaatataaggctgtcactaaatatttgaggcatattagcaaaaaagaaaacaaagcttagcctgagtgggaaacaagtccatagttgatttttgccagttatcctatcttctcacaaatttcaaaagcaactctaaccctgcaagcttcagatttgcacaaaacattagaaactctcttccagatacataaacagaactacaaagacccagaggaaggaattcagatttcagaagcttgcaacagacttgaacaatttcaaaatggtaccccaggtgcaaacatttcaagagctaaatgccatgtggcctggcatttaaatttctcagaagcccccaaaataagggctaattagccctagaactcacctccatcactcagtgatctcagctctcatataggaccaatagagcccccaaactactgagttttacatagtactgactacagttttcaacaaagtcatcctccattcctctctgatataattagaagacataaattcaaaaatgtcaaaggctagaagactggatcaaaataaataggataacattgagaaggaacaacaacaacaaaaaaaacttctccaaaaaaatctgcccaagaaatacaggatgcagcagctcacagagcaaatatctgggggttttgactatccaaaacatgattatctaataaagaagtttgtgctcggcactgcctaagaaaatcataggcagttgtaagcttaaggtgcagtaagtagacatttatgcttaggtctcagcaaacagctgtcttactgtactctctgttggccagatcacatctcaattacatattcaattccagattctccatgtgagatgccgataaactgagaagacatcgagaaaccacatcccaataaaagactgtgaaaagaattgggactagtttgcattagcaaagtcaactgggggtaaggggacatcatattgtcttggtgcattcaaagagagtaggcagctccaaaagaagaaaatcattggaaaaaaaaattcaaggagacagtcttcagctcaagtaaaaatacaacaaacagtccaaaggtgtaataacctgtcttcaggagaagttcacggttcctggggttaaacaaaagttacctagaaagggtaagaatttactaaaataaataaattggatagggcccctctaaaatgccaattctgatttcaatgattcccaacttactccactatcatactgtgctcatctgctatgatctccctccaaactgcccctttctttcaataaggatttgcccagaccctaatcacatcagacctgagcacaagtctcctacatcagcttcctaagctcaatgttattactcctcccatgtcaagaaccacctcccttcaagacctattctgagatctaagggcaggcactatcgccattttggacaggatcattctttgtttaggaggaagggggttgatgtcctgtgcacagtaggatgcttatgtatcatccctgtcctctagccactagatgacagcagcacctgccacctcgctatgataaccataaatgtctccgacattcctcaatgtctgctgagaagcaaaattgcctacttctgagagccactggtcttgaggcaaatgattaacaccactgacttgtggttaagtttttcacgaactaggttccctctaccctcctttattagtcgtatattctgttccacatccctgaccactgtcaaaagtcaattcagatttccactcctccctcagcatacttcataaacttttatctggttccacacaccctggattcttagacaactgtaactgtctgcttctgctggcatcctcatgtgtgcctgtcttatctgctctctgtgattactacgagaatcctctcctgccttgttaagatcccacagcacccactccagttctctgcttcctgctggcactcaacaaatattaactggtgtttcttagaatgtcaaacaccagctccaattaaaaataactgaaatctcttacaagctaccacttcaacaacataataatcatgattacaaagttttgacaaacttttgactttaatagctattttgtctacagtactgagaacagaatcgagtctaatttccaaactatagctaccaaaacaatttaactatttggacatgacaaacacatcagaattttctaaaattaatttttaaaaatgctgcataatataaaaattaagggaaaaggggcctagtttttttcttttttctttccattaaactttagcgattttgagaaaaaaagggccaagttttgaccatgttttttaaatgctggaaaacacagcagggagaaaatgatatgaatatggctcaatactttaagtgttgcatcatatgctactccacatggtaatggaaggctgggtcatctaaggacagtttcctctccaaccttctaatctgttaggttttaatcaacacgcacacatacactctcaataaaaacgagacaaatctaacatagtgttcaaatatataaataaactgtgccaattcaagattttggaatttttccctggctccatagattacctaatcattttatggggggctccataagtaacctacagagaccaaacaccccaaatcaacttttcgtgacccctgttttaaccacctaattttcatctcagattcctccccatcttgcacttggattttaacagggatttagttagttggtgtcaagacagatgaagcaagaaccccaactctcgcctagctgacagtaggtgtttggtcactatttttggactgcaaaaataaatgctgcctgaggaccccatttacaggatatggtgcagggttcttcccacaggtctgtaagaagcagaggtcccagatgctatggcgaggaaggtctgatcactctcattcttggcactgggaggggccccttatttgtttataaggtagacagccctcatcattactgcaaacggggattccctgcctgtccagactcttccaaagtccggtacaaaccacgtaataggtgctcaataaacgctgcctgtacggaattttactatcaaagctgccaaggaaagtttccagaaatcagctcttccaaaatatgtcctcagagttttctttgtccaacaaaaaaatatttttgaagatccaagagcaggaaatctgcgaggcaacgaggagccaaatataagccaagcggctccagctgggccccacattccgctaggactccccagtacctattccccatctctccgcctacatcctgagtgcgccctccctctcatctcggctgtttccttcccacaaccctacctccatactttcggccacacacaccccaagtgcgtgctcctggaacctcacagcccacctctccctctccagcaaggacctacctctcttcccctcgacctgcagcagttcttcttcactgcagctggctttttaagaaatcaaaaaatctcatttatctgcaagggataccccctagtaaagggtgacggaaaggagaaggcccctatcaaccctccagtaactggaggtgctggtcctcccggcaaccacccccaattctcctccttttcaagcccctggacaggatttgagcagaagtcccgctcccaagagcccacgcctccaaacaagctagaagcggattataccggtacccaacccggagacggcccgcggacggctgggtgcacctgcgggcccccagctccctcccacaggcgcggggggcggggcgcgggccttcacctccccgcccccgcccgccgggctcccagcgcagcccaccctgcacaggaaggaagcggaggggaggcgattctggagaagttaaagggctcacctttggacgccgggccagcaaggccagacaccaaacacccacctccgggaggaaccagcagagccgaaaccggctctccccgcctttccgatagggcggagggaggtgagagaagggagcgcgcgcgaggggttcaggagccaggaagccgcactcccctcccgcagggccggccgcccggggccgaagcggccgacgctcagactgcagaaagcggaacaatctcccaggccctggcggcagcaaacgggagcccactccgctcgccgccacctcctcccgacccccggacgtccccgaatgagttcccggccgcaaccgcagctcgggccgcggcgcctgcgccagggttgcgcgctccggctcggcgcggctccacctgcgcgtcgccttccctcgcagcccccggcccctgccgggagaggtgcgcaccaaccttggggtgcagctcggccgccaagccacggcttatgctgaggccggaggtggcggcatcacccgcggcgggcggcggctgcaccgggacgcgccggggcggcgaaggcgcgctgcaccctggaccctgctcccgcggccccgcccgcggctgccacctcgaagcgcggcggaggagccggggcaccacgggcggcggcagcggcagcggcagcagcggcgacgggagcagcagcacatgactctgtaacgaggggaattagacaaagcgtaacatggactccgggcccgtgcaggcgctgcagctctgggaccaaccgcagccggcgagtgccgcgactggcccggccgcagccaatggggcgggcccgggcctccatgtgattgcgagcgctttctccggtggccctgcagcgcctgaccggacggggtctgtgtggcgagggaggggacccggggttggagactggcggcgagcgactgctagatgcggagcaggtgcttgggaggggaagaacggcagcctacataaccatcgccgtaatgctctcgcaagcgtccacctgggcagggctcggtgccgggcaggcgcagctgccagttagctgcgaggcatggtcaggagccttcacccgtcctgggcgaaggaggctgtcccgtcgactaaaactctgatattaagacttggcgctgggggtggggagttgaattacgttaaaaagtcactt

SEQ ID NO: 4708 - DNA, 6000 bp, Homo sapiens
catatcccaggtttaccactgcctagctgagtgaccttgggcaagccactcagcctctctgagcctcagtttccccatctgccaagtgggctagtgattggctcttcctcacaggctcattgaagactaaagacattaaagactaaagggccactgagaactacatgacacaggtgtgaagcaccaaacaccgtaacaccatagtaggtgctgcttctggcagctgagggtctccagagaaagtgtcttagacccttcctgcccacaccccctcttccagggaggcctcagggtggaggcaggctgctgagggagcagggggaagactccaagtttggtgatctaggcaagtgtccccactcctgccccaaggcacggaggagggaaggagaaggaacggggtggctggaagaggagccagagagctcagaggaggaagggctcttgggaatattcaggtctctcttccttgtgcggctgaggagactgaggcccagagaggggcaggagcctgcccaggatcacagagcaaatcaggagtagagccagagccctccccgcacccaggtccgtccctgcaccgctgcacttggtggcccatctggtatccccagagcgtgcctagaatcccttggcccagagcagcacctgccagggaagagttacctcggaccacacacccgatggcaaagttcatggcatagctgaccagggccatgagcaccccgagggtcatcaggaagtaccagtcttctcccaggcggaacaccttctgctttagccactccaggccacctggggcagggtatcggagtcccagcttatgttggggcaaggggcacagacagccccttccctggaggtctgcttggctccaggcagggaggaccctggtagttgagtctggggtagtcctgagggggccccgcctgagtcagagaggaatgcaagttgtccacgttcctcgcactgggactggcagatggctgtgtcaggatggaggagccctgaacagaacctcaggccaccactgagtgagcctggagctaccctctgctggcttgcctcacactgggggctgggcaggatttgtggcaggtgacagtggtggcacagtggatgccaggactgctgcccctgccagaaggcctttgacctgtccactctccccacccgtgcctgtactgggaggttcctgggggacagggagtgtgaagggggctggcagctatagctttcacctgtatccctgcaggatccatagcttagagagcaccagggtctagcagacttctgcgtgtcccagggcctgtggcgccaggtatcctctgggtccccagcaatgcccctggcccgctggctgcagcccagcctgggagctggccctcactggctgtgggcaccagccactggcactgcacttagtctccttctgtggtccctacttgctctgccccgtagctgaggggacagtcaggtctcaaagtgaacaaggcacatggggctccaaggaagggtgccaagtgcaggctgccccagccccttgctgtgcccccagctgtcccagcagctaacccccacgtcccctcattggcacaggtaggtgagggagaggcctgggtggaagataggcacagtgaccaggccttgggctgtatctcctgaaaggcagagggcagatgcctggcccatctgacccacagacagctggacagacagaccccttccctccctgccacccaggagactttgggcagtcatgtcctggacaaatgacaggagggtggttcctgggcagagaggtggggtgggagccaggcaggaatgatgtcctgagtggtcccccgcgggtagggaagaggacctggctctcaccttggatggctcggcggatgtggggacaggggccccacagctcctgcagagtcacagggtcccctgagaagccctcacgcagccccaccaactcctccatcaggcccctggagaagcagatggagggaaggacccgggtgagctgctgcacgtcctcgcgctgcctctgggcccttccagtgctctccccacccaaatgaagaggaaggattgtgcgtgtgtgtgtgtgttatcacactaggtctgtgtgtgccctcatccctgaggttccgtcactgagggtgtgtgcctgtgtgtgtcattttgtgggatgagggtgggattcctaggtgtccccctgtgtccagcagcagactgtggacaccgctcccaccctcctgggtcgcttggtgcttccactactgggagcagtctctgcccagggctgtgactctctcactgcagagtcccatggatggctccgactctccctgccaatctcggagcaccctcctttctccccgacagctcaggtcacagaggcaggaaaaccccaggaccagaaggcctctgcaaagccaaagtgaggtgctggctactgcccctaccatcccctatgccctgcctgcctggcccttccaggttcatactccagtccacgcccagagacccctcacctgtcagtcctcctgctgcggctgaactggccctcctctcacagagcctcctttgctcccagctccagtgcacctggacaggtatatgctctaccaatcatcactctctccctgccaccccccttccccgccggccggggtttaccatggagattaaaaacgtccttgacaaaccaaccagaactgtggaggccagagctgtgcagggcagaactgccaagagagaaggggagcaggagcctccccacccatcacagctgcacagagggtggtgcccagctgtactcaggctcctgggtgctgctggacgagggctgggaagggggagctcatgcacacagcaggacagagaggggtcatctgccaaggctgagactcagggtccaggggtctcagagctggacatggaaggtttgaaaaagcacagagggagaggggaggaggctgggaagggaaggagaaggcaggggggcaatggtgagtggggccagcatgaccacagcctccctgtgtgtcaggtagagagtcagccttctcccagattaattaccctgagtgcccacggaaatcccacgaggcaggcagcgtgatcccgttgtagagaaatggtgtctcagggagctggggctgcctgtctaagatcacggaggccgaggcagagccaggattcccagcccaggtttgcctggctccaaagcccgcaggctgtgccacacggtcccatcctgatgacccatcttgtccagggctggcgaggaggccgacacctggggcaaggcagtgaattggggtcaggaactcggacttgatcctgtgtccagaccctccaggctcaggaaatgcttctcaaagcacacgtccaagggccagcggctctggtggggacttctgggtaattccacagagtttgtcccaccccaacagaggatggcagcacaggtgtgaggggacatggcgaggaacaagcacctgccgtgtgcctgcgacgtgtcaggagcgtcacatctgcagctcaagtcctccttcccacaccctgtgaatggggagagcctcgccattttgtagatggtcagagaggtgagtcactcatccaaggtcacacagcagaggctgaacccagccccacactgtgcagctcttcccctgcccaaagctcctccagctcctgaggctgaaccagggcaatggtttgggcacagaacagaagagttgtgtctgatgccacttttgggcaagaggttggggacaattgcctccactcccacccagacaaagccaccctctgaagcttatgatagcccttggatgattgttaaaatctgggaccctgggccaccctttgcccctagatgccaggcaagtcaaatcaaaatcaaagatgtgtgttgtgggaggtgggatgggagttgccgctctgtatggactcgagcccaccttcaccttggccaccccgacctgttgactctgcacagcaccagaactggctgccctgtcaacatcccgatttccagtgtctggtctggggcagctgctggctactgtcccacagccagcactgcacgtccacatctaccctcaccccccagccctgtgtgcaccaggaggctgagaagagggcagccagggtggctcagcaggatgaccggtttgaagccagcacagctctgctgaccctaactctttcatcaactagagcctcagtttcctcttctgtatgatgaggtgagcctggaagcaggggcctgtctctgccttattcatctctgagtccttcagagcctagaacagtgcccagcacctatttatagcaaggtttcaatgaatacctactgagtgatgagggcttcatcactggcctatgagctggctgtgtggggagctgatgggaagagatgtgaggtcccttccccagatcccaaatcaaaatcctggggtccaaggaaagggtctgtgtttgtgaaaagctctcctgggtgactgggattcaaaggactgcatcatctttgtagctccttctgtctctgtgatctgaaggtagaggcaggggaatgtccttgatgaccttttgaggtccctctgggtcagtgaagccagaggatccagtatttgtgtgggtgatgcctcgggaagggggaaaaaggggaggaggaatggtgggcgggggtgggtaacgggatctgacatccaggggcagtgactcaggccctcagcaccatgacagtgtgtctgcatttagccaccggctcctgtttccctggcgagcggcaggctctgggccccccaccccgccccaccctctctccatctcacctcagtgctggtggcttcccagctgccctagaaacccctcagccaggctgggtgtcacaggccccgacacgggcaggaaactctgccagaggcaacaggccctgttgctccaggcaacagcctggcccgccgctgtgccctgtgccctgctctgcttccactccacataccaccagcaccgctaatacccctgtagaaggagctctccaggatgaagctccagactgggttgtagggggctcagacaaaagagaaactgcccgtcttcaagaaccttcaatctaatggggagacaggtgaaccctcgcccccgtgggaactgccagttggatagggaagaagggacacagcagagagtcacagcacacaggaagactatgtcacactgccaggtgctgtgggaggacaaagacagtcagtgctgggggcatctggactgggtgtgggcccatgtgagcaggagcagtcagagaggcctccctgggggaggaggcattggagctgatctgggacggaagggacggatttggagaggacagcagaggcccttaactgcaacctgggcagagcagagggcctggccgcctctcagaatggcctccaccctggcccagggcaaggtcagtcccagctttgctgagcaagcaggtgggtagggaggggcttctctggctcttccgggccagcctgtctccataggcacatgttcaaaccacctcggcctctgaagggctttgggtccaacacatctaggttcgaatcccagctctgccacttacgcaactgcgagccccgccctttccaagaggcttcgcttccccgtccgtaacatgggaagagcccctccaccctcccagctgtgtggggatcaaacggggccgtgctggacagcttgcagccaggagcccatgcccagaaggcattctagaactcagggctagaataattgtcttccggaattctcttttacctctgactgaaatcccacctaaggcgctcgcaggcatcacctctgacacagagatggagcagacagttgccgggaacacaaccttctagacctttaaggagaaagctgccaactttgtcctcttggggctgctgaatgttctgagagtcagagggagtgcaggcacagaatccaggtccccatgggggc

SEQ ID NO: 4709 - DNA, 6000 bp, Homo sapiens
atcaaggtggagactgattaatttcagcctagagcccacaagtggacctggagcctaatccgtttgcaaggtgctttacagtttacaaagcatttttactttagttatctcattaaacctagtaaagattaataccattttcattcttcatttgagaaaaaatgagttttagtttatataacttgcctaagatcaaacactagaagtgccagaacagaactccaagtccaaattgcaagtgatccccattaaccccacagaagaaatgactctggcatgaaatagaaatagaaacaaaaggattagtaaataaagcttagggacaatctaaggattactggaaaggggtcccgatccagaccctcagaaagggttcttggatcttgcacaagaaagaattcagggcaagtccataaagtgaaagcaagtttattaagaaagtaaaggaataaagaacagcagccgggcgtggtggctcacgcctgtaatcccagcactttgggaggctgagatgggaggatcacgaggtcaagagatcgagaccatcctggccaacatggtgaaaccccgtctctactaaaaatacaaaaattagctgggcgtgttggcatgtgcctgtagtcccagctacttgggaggctgaggtaggaaaattgcttgaacccaggaggtggaggttgcagtgagccgacatcgtgccactgcactccagcctggtgacagagtgagactcagtctcaaaaaaaaaaaaaaaaaaaaagaattgttactccatagacagagcagccccaagggctgctagtagcccattttcatggctatttcttgatgatatgctaaacaaggggtggattattcatgcctcccctttttagaccatatagggtaactttctgacatttccatggcatttgtaaagtgtcatggtgctggtgagagtgtagtagtgaggatgaccagaggtcactctcatcgccgtcttggttttgataggtttggccggcttctttactgcaacctgttttatcaggaaggtcttcatgacctgtatcttgtgctgacctcctatctcatcctttgacttagaatgccttaaccatcagggaatgcagtccagtaggtctcagcctcattttacccagcgcctgttcaagatggaattgctcagttcacatgcctctgacataagggtaatagagatgagtcaatattttcaacttaatccagttaatgtccaagtgactttggatcagttacccctctcttctgcagaaaatttctacctgagattactttccaacatttaaaaatggttggggcttttccgatggtagtgggttatctgaacttattagcattagtatcactaaagttgatatacaaaccccccaggctaaattagactgggcaaaaaaaaaaaaaatctgttgggttctttaaattttaactacgggtgtgtctatcaaagaagtagcccttgaggatgcaacaccaagggccttggggtgtgagacccccaatctctggggagacacatgtttctccttaacaacctgaatatagatatcagaagtttacctgtggcaattggagcctagtactgtattacacaaattccttaacttaaacataaaaaattacaggagaagagttcagcatttatctgcctttccagaatgaacagtatatcagtgttacccaaaagtcatggttgatgaggaaaacctctttacagaatatgccagctaataaatgcagaaagaatgacagaaacaagcaaccagcaaaataaaataaaacatcatcctgcaaactttaatttaattactgtttcaggcaaagatcatcgatagatgctaaaaccattaggtgaaagattagtgggcaggaaatagatgataaggccaaaatgagtgtcaccccgtagctcagttgctgctcacctggggaaaaatataacttcacaggcatgatctggctgtaatctccttaacaccaggtattaatcttagcgtggcaagccaagcaataaccagacatcacttgccggctaatgttatccaatgtgaaaaatacagcttcgtttatgaaggattcttctcttttttttgttttttttgagacaaagtctcagtctcactctgtttcccaggctgagtgcaatggcgcgatcttggcttactgcaacctccacctcccaggctcaagagattctcctgcctcagcctcctgagtagctgagattacaggtgcacgccaccacacctggctgtttttcgtatttttagtagagatgaggttccaccatgttggccaggctggtctcatttatgaagtattcttgttgaaagatgaggcccttctcaacaattaaaaaaaaaacacgatttttttttaatgaccaaaggatttgaacaggcatttctccaaagaagaaacacaaacggccaatgagcacatgaaaagattctcaacatcattagccatcagagagatgcaaatcagattcacaacacagcacttcacacccactgggatggccataaatcaaaaagtcagaaataagaaatgttggtgaggacgtcgagaaatcggaaccctcatatattgttggtgggaatgtcagatggtgctgtcgctttggaaaacactttgacagttcctcaaaatattaaacatagagttaccatatgacccaggaattccagtcctaggtatatacccaagagaaatgaaacttatatctacacatttgcatgtatacctcttctcgaaatgcagtttgtctcaaagacacctttttatggccgatttgtcttaatcaggctgaaacaaagtcctcacttgcatttggtcagcaagcctctgaagtctcttttgatccacaccaggtctccctccttctttttccccaccatgccatttatttgttgaagagaatgataatcttttaaagttaaatcgtgtcagccatctacttagaaatctctaatggccgggcatggtggctcatgcctgtaatcccaacactttgggaggccaaggcgggcggatcacctgaggtcaggagttagagaccagcctgaccaacatggagaaaccccgcctctactaaaaatacaaaattagccaggcatggtggtgcgcgcctgtaatcccagctactcgggaggctgaggcaggagaatctcttgaacctgggaggcggaggttgtggtgagctaagattgagccactgtactctagcctgggcaacagagcaagactctgtctcaaaaaaaaaaaaaaaaaaaaaaagaataaccaaaaactgatatttagcatttcctttaattatgaatgcaggcaacaaagcagtcactaatagaagtcacagatattttcatatcacatcatagttgctgcatgtgtctcagaatattgctcatgatcttcaaagttcaatcgttacctgaactgcccttggatccactgctacaccttgttatttaatgttgttaaaagtaagcatataggccaggcgtggtggcccacacctgtaatcccagcactttgggaggcggaggtgggtgaatcacgaggtcaggagttcaagaccagcctggtcaacatggtgaaatcccgtctatactaaaaatgcaaaaattagccaggcatggtggtgcgtgcctatagtcccacctactcaggaggctgaggcaggaaaatcgcttgaacctgggaggtggaggttacagtgagccaagatctcgccactgcactccagcttgtgcaacagagtgagacttcatctcaaaaaaaaaaaaaaaaaaaaaagtaagcatatattgggccaggcatggtggctcatgcctgtaatcccagcactttgggaagctgaggtgggcagatcatctgaggtcaggagttcaagactagcctggccaacatggtgaaaccatgtctctacttaaaatacaaaaattagccaagtgtggtggcagtcatctgtaatcccagctactcaggaggctgaggcaggagaatcatttgaacccaggaggtggaggttgcagtgagctgagattgtgccactaaactccaggctgggggatagagagagactctgtctcaaaaaaaaaaataaataaataaataaataaataaagtaagcatataagcatatatagtacataagagcataagatgtgtgtttttttaatattttgatctgtatttcaacataattgccttccttggtcatcttgtggattttattttatgcatttaaaactttatactgcccagcatggtgacactcgcctgtggtcccagctactcaggaggctgaggccagaggacagcttgagccaaggagttggaggctgcagtgacccaagatcgcaccgctgcacccagcctgggcaacagagcaagacctcgtctctctaaaaactaaaataaaagcgttatactgaaaagggatccacaggcttcaccagtgtgcaaaggggccagggcagtcaaccaacatgggggagggctctttgtggatccagacttgaagggctcattcgttttaggcaaagcctacaagttccacgtgagtgttgtctaaggcgcagtgttcccaggccagaccgggagcacagccatttcacgggcaggacaggctgcagccgctgcgtttgcagttccaacccccttcccccggccaaccccccacacttctggaatgcacacaagccttatatgaaatccacatggtgggcggccgaggaaggcagcggcacgaaaggacttcaacaagttgacagcgaccccaggcccggccagtcacggggaggatccagggagctgtaggtcatctggtcccgctcctcgtttggggcctccgtggtgacaatgcctggccacaggaaatgggatcactgggagccctgtgtttcccgctctggactctggactctgaaacgagcccaactggaaagcagcatcactgccaagacacatccggagtccacacacaaatacaggaggctgccggcgaaactctcccgcagccacaagagtcccggggcccgcgcgcagactgcgatccagctccggctcttgccctgcggaggctccgcgcgagaacctggctccacccgggaccggccaggtcctagccccgaagggactggacagccgagggacgcggactgacctccctgcggcgatgcagcccacagccgccggggaggaagctccgcggggtccatgggtgccggggtcacggcccggggcgcgcggagccacccagaccccgcgacccgctcttcggatagcagggaccgggtcgggaagaccttcgcggaccctgcagaggcgggagaccctgcgccgtgcccggtgccccggcggccagcgggtccgggtccccgcctgctacgcccaagtccgtccggctccacgggcgcccccggcccgccgcgccctgcagcccctcgcccgccctcccggggctcactcacgtagactgcgtcgatgtcggatctgtcgtagaagcggagcgccccactcagctccagggcaggagagacgaagtcatccccgtcctccagctccaggtccccctgtccggggccgaagggaaagagctcctggcggctcaggcagcccacaggccccgccagcagcagcggcagcagcagcgcccgcgtccacgcagcccggatccggctgctcgaggccaacatgttcccgaactgcggtcccgcaaacccggtcccgcggccaggacagaggaaggcggggatgtaaccggacgcccctggcagccccctctcctcccgcctcccggcgttcccaccccgggaaataggggaggggagcggaggggagagcggagggccccgccccgtccagcgggcgcgccgcggggcagcccaatggccgcgagggggagggcgaggggcgaagccgaacctcccgccttgggcgccggtgcctgcgattctcgaaaccagcccgactccc

SEQ ID NO: 4710 - DNA, 6000 bp, Homo sapiens
cctccaagttaaaaacataggtattttaactaataactcagaaattcagctgttttcattaaaccaacaacattcattagtcttacttatcaaaaaatttgcacaaagatcatttggtttgggctgggtttatagttttataaccttctatgccaaactctgacgcctcaaactatgtaacagagacaaatataaaatccagacagaaatgtatgctgacaattctgaagacatttatattttcattttaccaataattttaaaaccagtgtgtttagtaaagatttacttaagtcatgtgaacttgaaaattgcttagacttatttgcttaatttatgagtgctcttataagccaacacaacatataacagtaagtgtacatacaaataaacacatctaggtatgtagacacatacacaagcgaaaattcaatagcttataccttggaactttacccatgccatagcaatacaaactcaccggctttacatggttacactttgtttgccctgataggtaatccaacaaaggctatgagccaaaattttgggtaaagcagttttcatggcagtttgatttttaagggccaaacctccccagactccaaagaacactggggctaaacagcaccaaaggaaaacattacatattaactaggcccgactctgcttaaaacagcagaacaaaagcctggatacatgcaactccatcccacgttcccattcaacagcaaactccagattccaaacaattttggggccaaagagtattgcaaaagattaccaaattaaattctaattcctcatgcctatatcaaatacacacaatcaccagaacactatccaactactgcagcaacagacaagcccttagtgtccaaactgaaaagtcagggtgcttcctctctcttctgtgtttgggcttgatcaaccagcaaatgggaattccttaaggaatttcccaaattgagaggagctgaccccgccatctgctacccaaaaaagacgctcacttgccgggacataacacacaagtacaaacaagtccccaagagtgtccatcctgaaacagtcatggtgcttccctctcggtcagttgggcttgttccgtctacaaatggaaattcctttaaaaatttcccagattgagaggagcagatcctgctgtctggacccacaaaggacactcacctatctaggtgcctagcttgagtcggaggctctgtctaatcaactatagctgcagtggtgggtcagaaaacataatctggtcgttgggattcttccttgcagtgaggatggtcatggtgaatgggaccaatactccaaaagatgtctatctcagggaactgtcactcactgagaagggagtgggtgcctggaggcattggaagcctgtaggtgctatgccttatgcccattgttccctgagactgtcctcaggacggaaagaacagtgcctctccacttaacactatatctccagcacccccacaacacctggtccacaggagggatacgatcagtggatgctgaatggattcattcttttttttttttttttttttaagacgtagtcttgctctgttgcccaggctggagtgcagtggctcgatctcagcttactgcaacctccacctcctgggttcaagcgattatcccgtctcaaccgcctgagtagctgggattacaggcatgtgccaccacacctggcaaattttttatatttttattagagatgaggtttcaccatgttgtccgggctggtcttgaactcctgacctcaagtgatctgcccacctcagcctcccaaagtgctgggattatagctgtgagccaccgtgcccggcctaattatattatttaatccccttacaactatataaactaagttctgtcatccccatcttacaaatgaaagagactgagacacaaggaggttaagcaatttttctccggttacacagctagagctggggcttgaaccttcaagatcaatctagctccaaatccagtgttctttccaccatttattcattcaacaaacatttattgagcacctactctatgccagtcctattccaggaggtagggataggacagtaaacacacacaaatctttccttcataaagcttacaatctaggagacaacatttcagattgataagacagatatatagcatgtcagagtgatagtgctgaggagaaacataaggaaataaaacacaagggcaggggataggaagtactgggaggttgcaatttgagatgaggtggccaacaagtctccctgagaagatgccatttgagaacattcctgaaggagggagggagggagggagccatgtgggtcagaagcattccaggcagatggagctgctggtgcagaggctctgaggcaataggaatgaagccagagagggccttatggcggtgggaggactctgttcctctgaggaaggcgggctgctggagggactctgcacctcctaactgaatcactcgggccactgggttgagaacagcctgtggtgggaacatggcagaagctgggagacagccccacagcctctgtgttctccccacagtactcccattcaccaccttcttgtggatctgcgggtggttcgtccgcaccttccgctttgtgcccacggccacctcctcctcctgaccttcaccgtcaccaatctgaattaccccaacaacctctgctttggggacagagttcaacagccctgtgaagagcctgcctttccacttgactccaagttacttgataagacccagaactagaatagagacttgcccaatcaatgtttaaaccaacgaagcttttaggtgttgtttctcccatccaaaaatttcccttcaaacccctaagggaaggggtaaaggaaggaaaatttcatgggtcccctgctgcagctctgcctgggacagctggcccatgggtctggctgggactggacctggggaccagggtgggtaaataaatgtcagatgtgtgcaagaggaatctgcagccagcaagccctgttgggcccctggctcccctgctcctctgagtcaagcccctttattataaaggggatacctttataatgctttgcaaattggcaggatgaacacctgcaatgccacaccactgtctccccaccccactccgcccaaccatcctcctgatccagactgcactgacctttttctgagggaaaggacatctaaagccatgccatccagtaaggacacagccacatgacagatgtggtgcctgggcatttgcagtgtggctgggataaatgagatgctctgtaagtataaaataatacctaccaaattttcaagacttttggttcacgcctgtaatctcagcactttgggaagccaaggcaggaggatcgcttgaacccaggagtttgagaacagcctggacaacatagcgagacccccatctctatttttaaaaataaaaataaaataccctgtacaaaataaaactgtaaaatagctcatcaataacatatataaaaatgtgttttggaattaaaatgtattaatttaaatgtattaatctcatgggtttctttttcatttttgaatgcagctattagaaaagtttatatatgtagctcacgctatatttcttttttcttccccgtgccccagcccccgcccgcagacggagccttgctctgtcacccaggttggagtgcgatggcacaatctcgcctcactgaacctctgcctcccaagttcaagcaattttcctgcctcagcctcctgagtagctgggattacaggggcctgccaccatgcctggctaatttttgtatttttagtagagacgaggtttcaccacgttggccaggctgctcttgaactcctgacctcgtgatccgcccacctcagcctcccaaagtgctgggattacaggcgtgaggcaccatgcccggcggctcaggctatatttctagcggacagggctgttctagaattatgactggcctccagtcatctccgcagaacaaagcaaagagatgcgaaagcaggtcgagcaccattattttgtgaactgataataacaagataagggtgatcttgtttttcttttctagttcatacacatcaggaggagaaagcaagagacatcacaggggctgatccaggagatgagggacagcctacaacagctccagccagcctgcccttcaccagtccggagggtggtgtgtgtgtggtgccagatttgcctattagaagctcccaccatgtccctattaaactttagaaccctccatgggccccttacacagcccaagtgcctcactatgggccttcaagaccctgaacagcctgagccaaacttgtctttccagcttcctctcacatgcttcctgctcaaaacccccacagctgtcagttcatgctatcatttagtctgctaatcaatcattcaacaaatatgtattgattacgtcctacatactagctactgaggtcatgatgattagcaaaagaggcactgtccgtctgcttgctggggaccacacatctagcagggaatgacaggtaaatacataataggcaattaagcatattgcagtaagagtagttgttggggaagcacaggggccatgggtgcaccaaagaggcacctctaaaccagcctgcaagtcagggaaggcttcctggaggaggtggcatctcagttgaagaatgcaagttgcccagactgaggctggggagtggcaaatatcccaggcaagggagaactcttgagttcaaaaactggaagggcagagaggagggcagggtgccagtggcaaatgactggcctggtgtatatggcaggggctttatgagccttgtgaaggagtgtggcatttcttctgaagtgtttattctgggagttcctgtctcctgcctgaaaggccttcacccctcctccctgttcactcaaatcctgcttccccagtaggatccagtctgtggggctcatttgagggagaatgagcacggggcttttggaggctgcagcctagggccaagggatggaggtactggggctgtgtttgggggtccgctgatgttggaatttggggctaaagctgggtttgaggttggcgttgggtttgggggctggattcaggaacaggagtcgaggttcgggctgagcgtgaggttgggatctaggaccttagtccagaatttgagttggagttaggagttgggggctgaggtttctagccagattaggggttggatttggagttgggactggaattgaatttggaaatggggctgggggttggggctgagatgtgacgcaggagctggggcaggggtggaagctgggagttctagctagggtttgcagctgcagctagagttaggggttggttttgaagctggagctaaagctaaatcggggtcggagctgtggaatgggttggcgcccaggctctggggcagatagacgacattcctcctgctgcccaggtctgcgaattgtgttccgagccctaactgcagcggacagaagcccctcccttcacaggaatgcctcagcccagcagaaggagcagtgccacgtcagccaatcggctcaggccctgccctggaaacgacacctgttcatcctcctcccggcaggctcacctgagtgcaggttaggcaggtgaagtgtctccccggaaaccaagctagagtgccccacctgctcggccctgccttctcggatcggatccagcacatccaggcttctcgtgagttcccccattgtcccccaacgccccaccgcccccatgttctcccactcgcttctcccctgagaacctccaccccgcccccagcctgacacccgttgtctcagcacacctgtgcaagcattttcagaccaacgaagtcacagcccaggggaatgctgggactgactccacggccacgcccacctcccccacttccttgagagcatcggcaccagcccccgcccacct

SEQ ID NO: 4711 - DNA, 6000 bp, Homo sapiens
tttcaccagggagccagcccatattgattctattgaaccccactgccaccacagtgcagacacttgctgacagctggctgtccttctagcactgcagggatgcacatgctcagggtcctcacctcccctcctcagaccagcctcatcccccagaggcaaaaagccctgcatgtccagcctgacacagcaggcagcacccagcagaaggggggccatggccacctcaggggccaatagaagccccaatccacagcccctgcccacctcacggtctgatccgacagccagccagcatcacattgctcatagcccccaaggtaggcggcatagagctgctccggggtggcgatgtgggctccaatgcgggcacaggcctcctgggccccagaaaaggagaaagcatagcgggcagagccctctcggtagagaaagacgacccctgtggggcagagaggacccctgagccaggtgagcacccagcacgctggcctcccctcaccctccttgtcactcctctgtacacaagggtaaataaagttcaattgtgctcactctacagcatgagggacttaagttagattgtgggtagaatgtcctccacctgaagagagaaaggagacaacaaaggcccgtgtctcctcactctttttccaacccaggctgcgccttccagctacctttgcttccctctcacactgtgggatccccgaaggcaagagtcctcccttccctccctccctccctccctctggaacctccctgccctctcacctttgaccttgacctccacagcgtcgctgctgtcatcgatgccgtgctggacctcacagcgatagatacctgagtcgttggggcgcagctcgctcagcgccagggagacgtcggtgagcgacgctgggtacgcaggcagtgccacgcggaaccggtaggcctcgttcaccttgacgcgcactccccgcgccaccagcacctctgcctcccggccccgggacaggaaagtccacttgacccgcggagagcccagcacagcccggcggctcggcggtggccgcaggtagtggacgtggcaagggatggtgagggcgccgccgagcacgccctgcagtggcgcgtcgcccgcgatgcgcacgcgaaaagcgcggtcctctgtgaacgggtggagccggctggaacttaacgctgtcgaccctcagagtcccacccggtggcctccaagccccgctccaggatccctccttccggccccaggattccccggcccccctaggaccaggggccaggggccaggggccagggtcctgcagccctacctctaggtcctccaggaccaccccgacggtctccagacccatcccccaaagtctcccagtcaattcagcccccaggattccttgccctgctctcagagtcttccacttcctctccaaaattcctagaccacaccccagggtcctccaacctcgccccctgagtcctccagcccagtttcccagtctgctccctttagggcctccttcagggtttctcccagttccacccctttcccacctcctagcttcaggatcccctatcctccaccttaggggcccaaagccttgcacccagtgcccttccctagtcctgccccatgatttctccaacccaccagatgctcacagctcagcccttatttccaagtgttccagcctggacgcttccccacagccctccaattctctctcttcctggggcccctaagcctggaagcagttggttagggctgaacaagacagagacggtgaccccaagtggggttgcttacctgagctgtctccttccagaacatctgctaaagctgcaggagcctgggccaggaccagggctgccagcaggggcaggaacagctgggccatgctgcaggctgacagagggacatgagaaggaaagatggggttagacttcaggatggacttcccccctgctccctaccacacccatgtgggttcacacatatcctggctccagaagtcccctaccttcacatcaccatggactctctgtttctgatccccatcttcccagcaagtgatttcttctcagaaccaaaacccgagtcctagtcaactcactgtgtgacctaagccaagctccttaccttctctgagcctttattttcttacttataaaaaagcatcatcattactatctcatgagttgagataggaccatgtgctttgagagtgtttagtatcttaaaactcctgtacaaatgcatagcaccaggcagacagtaggagctcagtttacagcatgaatggtgggtgctcttatactcagaattccatctgctcctcccagtgccagactccttcctcgaacccagagccttctcccatagtatctctttagcctcttctgccttctagactgtccctgcctccagggacaccatactcacctggccttttccaggagggcctcctagaccgaacgcaagtaagcacagcttctcctgagcccaccctctcctctacttcctccccaccattatttgtaaggaaactcctctctttactccccaacattctccatcccccttccttggctgcctcctcccttcttcttcccagcctctcctttctgcctggcacgggctttcccaccggaactcttggctcagaaatcagttgggacaaagcccctgtctctgccagtctggcctctatccagcccctcccttcccccaccctaccttttgtgaaagccttgggctggagggtggactaaggggggggagaataaatgggaggggctaccccttcctacccctggctatcagaagctctagaacccagaatattcctccaaagatctcgaagcacttacactctcataaaaaggatgtgttgtgacattgagaaatggagactgaggctcagagaaggatagggctgaccctggatccctagtaaagccaagtcaggcacgagggcaatgtgctcccaggagagaagactcagagctacatcatctttaagggttgggctaaacttagaagagcatggagatccaggtatgccatggaataggccaatgatgcagcaagagaattgaaggttagactacaggcaggacttcctagagatcaggtttattccactggctgtgcactcccattccaggcccactgtttatcccccatcttccctgccctctcagcatctgccttcatacctgtccctgcactttcctaagcctgagatgatgggaaatttcctacttttcccagatcctcccacctccctgccatcataacccccatctcccccactgtgtctggatatcattccctagggtcagagttgggagaggagtggcacaaccagatgcttagggcctctctctgacctttcagagggaggaggttcttgatggggccagattagaggtgcggagaccagctccaggcattggggtgcttgggaggactgttctggggctggagtggggaccattgggcaggagcagccagtgcccaccgggtgctgggaagactgtttgccatgcatctgagctgtgccagggcctgggcctggcccccttctggtgccctccctcccttctctctgggctggagctggagctgctcacagacctggctcccatctctctgacgggcagcccagagacccatatagttggagtcattttggggccaacaccctggaccaccctttcacctctgtctgacagtgggagagtgagggaagagggcctaaggccaatgaggacctaactgctctggaacatggagggcaacctacccttgaccccaaaaatgggagtcactgaccagtgaggccaagagggtagccccgtgcagttctgagagagctctgtctctccagtctcgggcctcagcctcccaattgcagctaggagccctgaggaaactcagacttccccacatccggtaccagcctcagaacccaggggtccagggttctgtggccttctctatcccacacaccactcatctccacttcctcttctcttcctccagagcaggccacacctctccaactctaaccctgagagctcagcagtcatgcggtccgttcccttgacgccacaacatccccctctctgtttcagctccagcgtctgtatctctgcccttgttttgaatttcttgagctgttcaggaaactttcctcttgtcacatcatttctgtctgacccgggatgtccatctccctcacagtcttcatagacccaacccagagagttaagaccaggtctctctctctctctctctctctctctctctctgtgtgtgtgtgtgtgtgtgtgtgtgtaggcatgcacgtgtgtacacacatctaacaacacccaccacctccatgctgaatgcccatcagccggcagccaaggtctgtcccataggaactgagctccagcactcagcagggtcagcagggaggcacaagaagccagagctttggctatagcaggagggaagctctctgctacccccttaacggcttcatgaggagcaacatgagcctacacaatataagcagggccttagggcctgtagaagtaattgcaatcatcatataaatagtcctttttattggaagcaaaactaataatactattagcaatgacaccagccgagcagttgcagatccctctcgtatagaatctgaaatgtggatgatgctgttataaatagcaaagttagccatagcaacataggcactggtaatactgtgggtgggtctaagggtaacactgttccctgatcttactgtcatcatctgcaatctaagtaatgcagataataatggtgccccttggacttgacgccaatctcttggtcctattagaaccatgtaggcagagctattccaataggtgggggaatacctgacaggatatggaaatacctgggagagggaattcccaggcccctggcagtgctaggaaggaatgcaatagtggtaaccgaattccagctaatagttactgatgtctacctgagccagttctcctaaatgcttcctgtggataacctcaactgtgagaaaaagattgtttatgttttgctcattacaccgatgaggaacccgaggttcagagaagtcaactaactaccccaaggtcacagagcaaggagccgagttgggattccagccgaaatgggcactccgaccaccccctagagcggctctgatcggctgtcctgccggactacagtaaggtgtccccagaagggttgctggccgctgctcctggagctgcctgtgcgtgggggcacggaggcaaggactgatccggaacgctaccgccctgcctgggacaaggtcggaaatctcggcggccgcgctgggacaggagcgcgcagcagggaagatgcgaggacccgaggggttgctgatcagactgcgagcagcaggggggctgccactggcagagctggaagcatgtagatcagagatggcagcagcagctgcaggcgctcggggctgtccagcagcctaccccgctgcggtgtcaggagtcgacgagttgggtgccccagagcctcgaggcaagggctgacaggcggggggcgcagaccaggcaggcactcccttctccctgtccccgaccccacggcgggcggcggggctgcggaggcactcacctacccagggctggggttgggtcgcggcactgcgaagtttgtcgcctcctccgggggtctcctccgggtgcacggctcagtcctgcagctgcagctgagactgcggcggagactgcgcgagcgtgaggagaggctggggccgcaggacattcggaagagggcgccggccctcccggcgcagcacaaaaccccctttcttccccccgcccctgccccgccctccccggggccgcccccgccccctggtcgggagcgcggggctctcgggacggtcacgggacccgctgccttctctgcttcggctccggcagcagcggcgagagcaagga

SEQ ID NO: 4712 - DNA, 6000 bp, Homo sapiens
aaactatacagaaaggatgaactaataactctgaagtgatattattgctggtaagagtattaaatggctatacaatgtacaaaagaaaccactgaacacaaactagtgatatatttcaacctaccacttaatcttattccatgagaaaaatatctgaaagaggagcaggtaaagactagatcttcagaatttggccttctaaactgcctcttttatttataaatagcaaaagcagcagcactaattaccgtgggaatgctgtttttatatggagaaaataaatctaccttccaacttagttttatgaacaccacatacttttcacagttccacacctttgtgtatgctctgcctagaattctagctcttactactttcctatctaggaaacttacctcaacattcaaaattcaacttaaagctttcctttacccttctacggtctgatttaatgctcctatagtaagcaccctgtgcacacttccatcataattcttctcacagtgaattaaaattgtgtgtttacttgtctttgtctcagtagacttgagagccaggaccgtatttttttccttgccttaaaatccccactgcctttcattgtacacgggcaaagtaataacctttcctgctgattctgtgttttagtgaccagacttcaactaaaaagtgttgcattaaagaaaaaattgaagttattgaagaatctcagtgattactcaaacatgctaggaatggttccatcttggaaccatttccctgtttccatatttactgctcttccctcagttacctacttccgatcccctgccatttgtaagtccaatcctacgtcttgacactacctattgcccttccctgctttatagttctccacagcatttaccagttgatgtattaatttttatttttatttttttgagaccgagttttgctctatcacccaggctggagtgcagtggtacaatctctgctcactgcaacctctgcctcccaggttcaagcgattctctgcctcagcctcctgagtagctgggattacaggcgtccgccaccatgcccagctaatttttgtatttttagtagagacagggtttcaccatgttgtccaggctggtctcgaactcctgacctcacgtgatctgcccgccttggcatcccaaagttttgggattacaggagtgagtgaccgtgcctggccttattttttttaatttttactttttgagatgaattattcctctgtcacccaagccagagtgcagtggcacaatctcggctcactgcaacctttgcttcctgggttcaagtgattcttctgcctcagccccccaggtagctgggactacgggcgcctaccaccatgctgagctaatttttgtatttttccgtggagacaagggttttaccatgttggccaggcaggtactgaactcctgacctcaagtgatccacctgcctcaactcccaaagtgctgggatttcagccgtaagccacggcacctagccaattttttttttttttaaacatcgtcttgctgtgtcacccaggctgcagtgcagtggcatgatctcagctcactgcagcctcaacctcctgggctcaagcgatcctcctctctcagcctcccaggtagctggggctataggcgtgtgaccccatgcccagctaattttttgtagagatggggttttgccatgtgcccagactggtcttgaactccttgagctcaagtgatcccacccacctcggcctgccaaattgctgggactacaggcgtgagccactgcacccagcctgatataataaacattttacttacttgtattttacttaactcttccctccatcacctgaatatacaagggtaaggatttttgtctttttcactgctactgacctagcccaagcaatatttggcaaatagtgctcaaatatctgctgaacaaaccaacctttgaagatgcttgagaaaacttctggatgaagcgaagcatactggcccctattgaaagtcttgttcaggaagatgccaggtagttctgattaacatgttacagctaagcagaggcactgaatcaggggcatgtttctgtgtataacacaaggtgtcacttaattttcctcattttatacattaatttttaaatagtagtaattcatgaatataacactttcctttgaaaagaatcattaatgttttcaaactgtcggtaacacagtaacaaaatagatccttttagtatctgaactgttcttttagctttggctgtctagtgtaatagaaagagtaatgcacatagagattttacagatacttccaccatttcctagctgtgtgacactgggcaaattgcttgagtactggttttctcatctttaaaatgaagggtcttctaagtggtgtttttgtgaaattaaaaaaaaaaccaaaacaaaactggaaggtcatagcttctgtttccttttttcctcctattttggggcttaagagttcacaactcaaaataacgatagtaccaaccaatataatttaggtttttttaatttgtttgtttgttttgagacaagagtcttgctgtgtcgcccaggctggagtgcagtggcgcgatcttggctcactgcatcatctgcctaccgggttcaagcaattcttgtgcctcagcctcccaagtagctgggattacaagctcctgccaccatgtctggccaatttttgtattttcaggagagatggggtttcgccatgttggccaggctggtcctgaactcctgacctcaggtgatccaactgcctaggcctcccaaagtgttgggattacaggcatgagccaccgcgcccggtgagcattaactcatttaatgctcaaaataacctcattaacttagtactgagagagaatagcctgttggagtgcagactttggtgtcaaacttggttggaatcctggctccactacttattagctgtgtgtctttgaacaaattatttaatcttgttatggtgcagttcattcacctttgaaatatggatactaattcatagggttgatgtaacatttttttttttggatacagggtctcgctctgtcacccaatctggactgcagtggcgtgctctccgctgtctgcagccttgacctcccgggatcgagggatcttaccacctcagccctctaaggagctgggactacaggccacgccaccatgcccagccaatttttttttgagacggagtcttgctctgtcgcccagggtggagtgcagtggtgccatctcagctcactgcaagcttcgcctcccaggttcatgccattctcctgcctcagcctcctgagtagctgggactacaggcatatgccaccacgcccagctcattttttgtatttttagtagagacggagtttcaccatgttaggatggtctcgatctcctgacctcgtgatccgcctgctttggcctcccaaagtgctgggattacaggcattaggcaccgtgcctggccccaatttttgtattttttgtatagaaggggttttgccatattgctcaggctggtcttgaactcctgagctcaagcaatccacctgcctcggcctcccaaagtgctgggattgcaggtgtgtgccacttagcctgatataacacttaataagttactacatgtaaatagctgagaaccgtccctgacacaaagcactttacacaggagggactgattaaaaactctaatgtaagcagccagtaaaaacaggtgaatgataatatggatctagatctgacaatttcattcttaaccaagagaatgggatgtctaaaaaaacctacagttgctgcttaattttaaaaaatcgattgggcagggcgcagtgactcgctcctgtaagcccagcagtttgggaggccgaggtgggtggatcacgaggtcaggagttcgagaccagcctggccaacgtagtgaacctcccccccgtctctactaaaaatacaaaaaattagctgggcgtggtggcaggcgcctgtaatcccagctactcgggaggctgaggcaggagaattgcttgaacctgggaggcggaggttgcagtgagccgagatcgcgccattgcactccagcccacgagacagtgcgaagctccgtctcaaaaaaaaaaaaaaaaaatcgattgaactaatttattgatcacagatcttagggctgggtcaagaaatcctgtataccagttaatgtcttcatactatacttaaggaagcaagtagggaggtaagtaatcctgggcctccgagtagaatttagatcacacccacacccacccacctgagccccagaccaaaatgcccgcagagcgtacccatcacttttgttcaaaatcactttcttcttaaggactttccagaccactccatttaaaatctcaaccatccccccatctttggaaactccctttcctctgtggcacgtgctttccaactagtgggtattaaaaagtgataacctaaaaagtccagggacggcaggtgatgcgggattaaggactgagactcaaagcttaatcctcctaatataaatgaaaaagctcaatattcccattgccctggtgggaagactgcaaactgccagcttcaaactgacctctgagaaaggaaggcggggtttagacgccagtgtcttcgggaaaccctgcccgagagtgcccgcgtctccaatttactaccaacccttggtgccctcccatcccaacgtcgcaaatttactaccaacccttggtgcctcccatcccaacctgcacctgtggcgactttgagacttgccagcgttgcacggagagaaggaaaacaaccgcaacaacagcccaggtccactggaaaggcacttccggcaagtggattcagagaggcccctacttcctgagggctgaaaaaaaatgagtccgggtagggacttgacctgcgctaattggttcctaggcccggctttctgtttgggggccattcttaatttctagttgaatccagatgttgaacggtccttgaagttctattccagggctcccaggcagcagaatctgcccacagagttcgggtaagtagagtgcaagtactgaaacaatctcagaatgatggtggtgaaggaaggtaagagacgggattttaggcccagtgtgacctgaattgcttgccatctgtgggacttatgttttactttgcaaaacagggtttataaggcctatggggacacatctcactgcattagggccctttactatcatttagagggggaaaaaagcccagttcttacatccattttctttgctgggacctataaacttcattaagggttaaagagcacaagagcaggattttcacttccatgaaaggtgtggtgataagggccctaggcttgggggtggttcggaaagtcagatcatttctcctactgccctcggctttatttctcggctatgtgaccttgggcaagtcccttctcttatctagacttgtttcacaggaaatggcaccaggcaattttagtgcccttccgtgtctatggataaaactgaagacatgtagtaggagatctcaggggcccacgccggccagtccctccaatcctccggattctaggtagtctagcttcctggttgccagccattacacggtttagctttccgtgccggatggagccacagcgaagtcttccttaatagtaagcgcttttagtcgagctaggccttcagttttattgccttctctgtcatggcagcgccgccccttccagtagtgcgatacccaatgagacttcaggtaggagaaacggcactgtcgcaagcgcaggctctcgccggaatcccgcccttcgcttgggcgggggagtgacgcctgcgctccaggggaactactactcccagcgggtagcgcggccgacgcagccgcgcagcctccggggccaggccgtgtggcccgctggggactggagtctcaacgacgcgcacacgaga

SEQ ID NO: 4713 - DNA, 6000 bp, Homo sapiens
caggcattgtgctaggtgatttacaggtattatctcatttagatctcatttaatctgtaaaaggaggtattcattttacagattaagaaacagaggttctgagatattaagtgtatggcttgtcttgcataacttgtcagagctcagacatgaaccaagacttatctcagtcaaaacccacagtctttgcagtaaagcctgtgtttaagcatgtctatggactgatcacaccagtaatctcaacactttcagaggccatggtgggaggatcgcttgaggccaggagttcaagaccagccaagccaacataataagacttcatctctacaaaaaattatttaaaaaacaaaaaagcacatccaagtatcagagggtcagtcaccatagtatataaaagtatgcctttggtctcagactgagttcacattctgtctctacaacttagtacagcaaattatttaatctctctgtccctcctttcccttatctataaaatggtgataagtaatagtatgtattttgtagggtggttatgattaaggaatataaatcaaataaagtgattattatactacaatgccttattcattgaatacctttataaaacctactcatgatagaaaatactattagaaatgctgtttgaaattggttttatagcatatatgaatttagaaaaaaaacttacataacttttacagaaaaaactcagctctaggtagatataaagtcctatgtagatactttgtggaatgagcttgtttcttagcattttatctgacatgacttcaaagtttcagcttcatttttttttttttttttttgagatggagtctcactctgtcgcccaggctggagtgcaatggagcgattttggctcactgcaacctccgcctcccgcgttcaagcaattctcctgcttcagcctcccgagtagctgggactacaggtgtccaccaccacgccaggataatttttgtatttttagtagagacagggtttcaccatgctggtcaggctggtcttaaactcctgacctcgtgatccgcctgcctgggcctcccaaaatgctgggattacaggcatgagccaccacacccggcccagtttcagcttcatcgtaattctaatttccactatgcttcctgacctagcataccttttcaatcaaacttcttatctctaagtacagcaacttattttaaactggctctttggtttcattttagatggtgtctccaatatggatgataaactagaaagagttctggtcaggcaatctggatagagaagccaagcaacattgtagcttctaaagtcattttcacacttatatataaaacactcgaatttatataaaagatacattaaagaaacaatgattaaaaatatataaccactacactccttcattaatagagataattaagttgaacatacttaagaatacattgcttttgtgaggattaaaatctaatgttaagctaccaattcatattcacctgaatcttatttaataataaattaatactcatgaatgacattattaactgtcagtgtgatgatgttcaagctatttcagttacccagacaggtctataacttactctaaatttctggcacttacatgcacacacacagacaaatccacagttgattaacattaaacagaaacttcactctctatacttctcaggaaaggaaaagctcaaaagttatatttcatggctactgaacaagtttaggctttcaaacgagattctttccattgattctgtaacttatccaatcactcgagcaaaatgttgaatttctactaagtaaaaggcacatgtttcaggacacaaattatatcaatttcaaatataattgaggcagcctaaggcgtatatgtaggtcccagggcaaattatttggactgtctgaactttaatattcttatctataaaatagcggtgataataactatcctacaccaacgatttattactaggatcaaatgaggtactaaaacatggaacagaaaagcattttcaaatattaaatccacagtaagtttctataacaactcaagagctcatcttgtctccagaagcacaataacagtctgtttcattacatgattaatgtaacaaatatttaagagtctaatacatcatgatgtgttcaagtactaaagtgctttaaaaatgtagtaagtacaggctgggcgcggtggctcatgcctgtaattccagcactttaggaggtgaggtgggtggatcacttgaggccaggagttcaaaaccagcctggccaacatggtgaaacccccgtctctactaaaaatacaaaaattagctaggtgtggtgatgcacgcctgtagtcccagctactcgagaggctgaggcagaagaatctcttgaacctggaaggcagaggtggcagtgaggcgagagggtcacgccactgcactccagcctgcgtgacagagcaagactccatctcaaaaaaaaaaaaaaaaaaagtagtaagtacaaatgctttccttaggaagcttacattacagtagggataatagaactctcaaattacaatgcaaatttaacaagtgttgtaagatttataaagcccagcacacatgaagaaaaaaaaatgggctgggcgtagtggctcatgcctgtaatcccaacactttgggatgtcgaggcaggtggatcacctgaggtcaggagttcaagaccagcctggccaacatggtgaaaccccgtctcaactaaaactacaaaaaaattggctgggtgtggtggcgggcacctgtaatcccagctacttcaggaggctgaggcaggagaatcgcttgaacccgggagacggaggttgcagtgagccgagatcgcaacattgaactccagcctgggcaacaagagcaaaactctctcaaaaaaagagaaaaagaaaaagaaaaaaagaatgaactggatttatggcagatttcagaaagctgcataagaaagagatggcatttaaggaattgaagaataagtagaatttctacaaagacagcaaggaaggccttccttgtttcttctttgtaggaagaaatgataaaagcaaacaccaaggctgacaggcatatagcatgttcagaaactggacgtctaattaacgactagtttggctaaaaaataggatatgtggaaaaaagtaatacttgtttaataaaaggaaaaaagaaagaatcatattgggggccgggtgcggtggctcacgcctgtaatcccagcactttgagaggccgaggtgggtggatcacgaggtcaggagatcgagaccatcctggctaacatggtgaaaccccgtctctattaaaaatacaaaaaaattagccgggcgtggcggcgggcgcctgtagtcccagctactcaggaggctgaggcaggagaacggcatgaacccgggaggcggagcttgcagtgagctgagattgcgccactgcactccagcctgggcgacagagcgagactccgtctaaaaaaaaaaaaaaagaatcatattgattttactggagccaccgtcagactcaaattctgaaggaaaaatctgaagcctccctaaataatataaaatttattaaatgcctccctaaataatttacattttattctgaagccgatcgagagtcactgcgtatttctgaggaaggaataaccaaaaaaagaaagtcataagatctttggctttaaaagtaatatggaggcaagtgactggaagggtgccaggctgaggacaagtccagtttggaagttattgctatagtgcaagtaagaagaggaaagacgagcatatttagcagacaggtagtgggaatgaaaaaggggagaactaaatttgagatgctgaagagatagaatcaacagttgggaggaaagttagcctcagaaatataagtttacaagtcattcccttgaaacaccctgagtttaccagtgaaagtgaataagaacaccaagtaagaaactgcaccaaatttcatctttaactactaaagtcgaatgttgatttcaaaaacgaaaagacttaattttcaaatactgcatttaagagaacataataaaagatcgtcttttactataaagcaatgcacccacacacctgttctgatgagaatctcaccccacttcaaacagtccttgtgttcttactagccttaccaagggcagcctttccatttctttaagttcctgcggcttcttgagctccaggtgctggtcgggtgcatctgtgcctaccacagggctcaacaccgagcgagagctcatgggatgttcactgaaggaatgacgggccccagccgggcccacccgtcactagctccgcacgcaccaggcgctgaggcacacactgccgtcttcattcgcttgacacacccctctcctcgggccttttttcctcctccacccagtacattccgcacgtcgtccgtcggagttacaacgtgtcacctcatctgctcccacccctacttagctagcactgtatttcaggtcttcgataccgtccccttcacccctacagacttcacatcagccccctcgcatgcctcctcttcctcctcctccaggagcttcccgggccgccccgcagccgctagcctcctggttcccgcccctccccaggtgcgctgaggactcacctcccgcgcagctcgaccggctgagcccaccaccgggggccgcggttcagctccgccgggcgccccaggctgccgagtccgctgggtcctacgcgaccgctgacccgcagcgccgccggctcccgtcgccgtagccaccgccagctcggtgcagcccaggcgtttccgggttcccgcggtcccgtcccccaaatgctccggcttccgcctcggctctggcaaatgccgttcccggctcggctctggcagccccagctcggcacttggcagctctgtccctaaggcgacgcacctgggctgctctgctggcagcccctggttcctgcttcaccgtcgcgtggaggcctggggcactgctttctgctacacctctcctaggagcgcgaaacagatggagtgacactcgtcgagggcctctgcgggactgtctgtttgcagagggtgccaaggtgtccactgcgtaaggaagggcaaagtcctttggggcaaagaaccctgagaggaacggggagatggattttgaaagcaaacgaaccctctcctaaaagtgactgtcactgacctgaaaacaaccagattagctatggcaaaggctgccaaccaaccagtggtctgcaagaaggcttgttcttccacttcacccaccctgactgagatcttgagactgaaggaaacccaaagccgtaccaccaatgggcctagtgtcatcaaccgggagaggaaaaagaaaactgggcccagaggattgcagagttatgagggaccaaccccttcctggctgcatggatcacagcattaccttttaaaagtgttccagtagctgtgttggaaaccctctaaccacggcagcccattcaggtgatgaacaggctgaaatcagtacttcaggttcagctggattatcaaataagcgaataggattatctctttttgttaactcagggctgctataaattaagcctatgtctctttatattgcaaatgattaaaaccatgtccaagagagacatacttagaaaaaaagtgatattgaagaaaaataagtaactgtattagagtagaataactggttttaaaattttctgcaatacagtcttgagaaaattcctggatggtaaaatacatattagatcttaatacatgcccagttttttttgaaaccaaaatgtgcctgttagatgatgataacagcatgcctcgttttattgtgatttgctttattgctcttcacagacattgcttttgtttttttgttttttttttttacaaattgaaggtttgtggcaaccttgcctcaagcacatctattggtgccatttttcca

SEQ ID NO: 4714 - DNA, 6000 bp, Homo sapiens
ggtctccctgtgagtcttctccctacagaaaattggatatgttattcatcaattattttagaccagtagttctcagccctggctgtatatcagcatcactttaaatgcccactcagcctcccaaagtgctagggttacaggagtgagccaccatgcccggcccttgccacagcatttaaaacatgggaaaaggaacagatagtgtggcaactaaaacatatataacttcggccgggcacagtggctcatgcctgtaatcccagtactttgggaggccgaagtgggtgggtggatcacttgaggtcaggagtttgagaccagcctggccaacatggcgaaaccccatctctactaaaaatacaaaaattagccaagtgtgatggtgcacacctgtaatgctagctactcagaaggctgaggcaggagaattgcttgaacctgggaggcggaggctgcagtgagctgagattgtgccacagcactccagcctgggtgacatagtgagactctgacacacacacacacacaccccaaaacttcaactccagcgaggacaggaagacaaactatgatactggactgaaaaaaacctggattctaatctgggttccaactagtaatggtgtagtcttaagtaacttgcttattttctctgcgccttcaatgaggttttctacctctattcatctcatactgtggggacagacgaaagaaggaagaaaggatagaaggagggagggagggaaaagaaacctatttaaagccccctttgagaactttaaagcgtctaagagaagcagagtattataatcagaaatcaaatctgggtatcacttttttctccttagttttatcatgttagctacactaattaaaaagggcggagcctgctcagaaaagacagatatgacgaagtaagatttggaaataagtaggttgaaaaggaaccaagatcttaatgaggaagtggccacagtcccgcttaccccctcttgtttctctgtactggcacgtggctttacctctagaggctttgcttcctacagagctgttttaagaacatagagtagaatgacttattcccaaaggagttttcttagagcctagttacaagaggttggggtcctggccttctgtactttatagtgaggttccagcaagaccagcagtctgatctcagcccaccctggacctagctctcttctacctacaaaccagttcagaaactaagtccagagggctgggcatggtggctcatgcctgtaatcccagcactttgggaggccaaggcgggcagatcacgaggtcaggggttcgagaccagcctggccaacatggtgaagccccgcctctactaaagatacaaaaaattagctgggcacggtggcacgcgcctgtaatcccagctattcaagaagctgagacaggagaattgctttaacctgggaggaggaagttgcagtgagctgagattgtgccattgcactccagcctgggcgagagggcgagactgcatctcaaaaaaaaaaaaaagaaactaagtacaacaaaaactttatttggggctgtttggaaccagtcaacctactcccagtgctttgtatagcagggacatgggacaattaacagatactatagctcagggaaagatggctaaaaaagtagtaactgcttccacgaacaagtccttcacttctcagtgtcccagttttctcttatcaaatgggaagaaggcttcaggaaattatacagcacttttgagaccaccctatttacctagcgtcatcaataaacaactattaagaggtatttgactttcagctttatgcaagtactccaaccattattccaggggtaaactgaaattcagaggtgatcaatttgatgatgaagaagccagtatcagaccccaagtttcctgcttatctgcaaaactacattctgacagagctattgtccatgggaaacaaaatctgaagacagcaggttagcctttagattactacttttcctgccctatgattttgatagtttttaaagccacagtgtcatggaaccttcttttggaacacacaaagtgtgaaaataaacggcctgtcagttgaatttaaggaaaaaaagttttaaaaaaggataaatagaatgcttcactaattcctcttgcaattattcagcattttctttttttttttttttttttttttcagacagtgtctcactctgtcacctatactggagtatggtggcacaatctcagctcactgcaacctccgcctcctgggctcaagggattcttctgcttccgcctcccgagaagctaggactacaggcatgccatagcagccagccggctaatttttgtatttttagtagagatgggggggtttcaccatgctggcagattggtctcaaactcctgacctcaagtgatccacccgccttgacctcctgaagtgctgggattacaggcatgtgccactgcgcccagcctatttggcattttcagtgccttctcttcagatagttcattgcctttagcccattttggttccaaaaagttcagagtgcaagtgataactggacaccatagaatatgagacttttttctccttaaaaaacagtataatagggtggttaagagtgctggctcggctgggtgcggtggctcacgcctgtaatcccagcattttgggaggccaaggtgggtggatcacttgaggtcaagagttcgagaccagcctggccaacatggtgaaacaccatctctactaaaaatacaaaaattagctgggcatggtggcaggtgcatgtaatcccagctactcaagaggctgaggcaggagaatcacttgaacctagaaggcagaggtcaccgtgagccgagatcgtgccattgcactccagcctgggggacaagagtgaaactccgtgtcaaaaaaaaaaggtctctcagcttagtgctcgggccaccagatcctggcatcatcacttattaccagtatgatcttgggaaagttactcaacttctttaagttttagtttcatcatttataaagtgacaataacagtaagacctattttgtggggttgtggttggggttgtatgagatgcacatgtaaaaagcttggtatgcagcatttactaaatgttagttcttattaattatcttgcctagcttgacagacggttatctgtaactgcctacatacagtccaatataagtgtcaaatctcctaagcaggacatggatgttacttagtatctagggcacagacaaatatcaatgtccacaaacatgaatccatctcaactcacactggcagccaatctgatgagtggcgttgagcaggcgaacacagggagctgttttatttaaggggatatatatcttcctctccactgagtttcccctgcacaaacctgatcggaagataaaaagtgttagaaaaatttgagagacacaggtactagcttctatcgtgtcattaacctgaagtatggcttgggtaaatcatttaatatcatactttctaaaatgagattaaagtccattcttctgatttcttgggcacacacttatcgtaacagatacatgttctacatggcacccagctatgtgcctcaaagggttattacaaagtccatgtagcgccattgacagtgacactaaaagagagaaaacttggtcaaaggaaaggtgtttgaccttagatttgccagattctggttgcacaggtgatcacacttctgcttgtatatcctgtatgtatattactaattggttaatacacaggtgctgggctaagaaaactttctgaggcatttttccaagagtgtgaacagaattgagagaaaccttatgacatacacgggtcagttaatttaacatcagcaggtcatttgtgtgcccacagtgtggggcagctgtagtttctcctttgaggatccttaaaaacaatgtgaattgggggaaggcacagtcatagttatatacaggcatttgcattttagggcttgaccaactaaaaagccatgtatcagtaaatgaacgcgtatcagcaaacacttaagtacattataaatgccaaaagttccttgaattgttacttcagggtcttcacagttaagagtacccatatcctaccttattcttgctttactgattaaaaaaaaaaaaaaaaaaaaaacctgaggcaaggcagggggacacagacttaggatgtaatcaacagaggaagaaataagaaatccaccttttaagcgccgcacagcacccacagaacaagattgctttcgtctcaaaaagtctaaacgcgaggaagaaagctaactttcacacctgttcctttcgactgtggggtgggtggctggggttgtgggaaaaacgagacatctggacaaagtgggagagggtcaggctcgaagtccaggaagaggcctagagaagggagtgaagcgacacgacgtgctgcgggggagaagggaccttcaggtccaggcaaagggggaacttctgtcgtgggaacgaaaaagaaagaggatttacagggtggggggacagaggggcagcaggaaccagaagggagacagtggcggtcgcggcggggccgatccgagagttccccttagagaacggagctcacgggcggggaggcctcacctgctagtaggacgcagaaagacagaaggcgaaggagaccccgacttcccgggtcagccccagagccaccccctgccgtagccatcttgcctctctgctgagcggaagcccccgttcggctcctgtctgttagcggcctctctaggctaccactgacaccgtctctgtggcccggagcctaagagaccggaagttcgtgtttccaggcgcttccggaaaccgcgggagagggtcgctgacgtggaggcgtccgaagggcagcagggtgtgtcggggctcggattaagacatcggagtcggagacctgagagatgttaaccaaattcgagaccaagagcgcgcgggtcaaaggtagtggagaataaaagggggaacatggaggttggatgtcaggagcggcgctgacaccggggaagagaaaatgggtagaggtgttggtcgaaatgggcccaccagacggacccggaggaagacggagggtgggagagaggttgggcctggctagcggttctccagtcccctcttctttggtgtgtccttgggcttcgatttacctataaagtggctcccacactgcaggggattccttagaccccctccctattctttcttccccctttctctcttggctgtgctcccgatttgtgttgttctgctccaaaggccctgtgatctgttggctttttgatgactgtgttatatggagtggccctgggaactgagtctcgatctctgttactcgcacccgagtcagtagcctttttggagacgagtagtggcaacctcacttaaggaggccttggctgcagcatctcaacatcagtgcctccattcggctttatttactacccggaaatagtacttgaggcttataaccccaataaagtctcaacttgatagagttgccagataaaatgcaggatacccagttaaatttgaatttcaggtaaacaatgaatagttttttagtctgtcgttgcttaccagaagttcaaatttatctggaaatctcgtatttttatttgctaagtacggcagctctagagctcgagtgtgggtcgttgggggtggagggcaaatactgagatcgcagtattagcctcagaacgttagaatgtgaaagtcagagaagtaaggtctccgaagacctggaaaaaatagtatctagaatatttagtgagatgcagcgtaacaaagtggttaggaacttggtctttgaagtcagatgggcttgccttggaatcctgagacatccactaacaagctgtgacttggatgacttacttaatgtctctaagtctgtatttcctcatctgtaaaatcgtcttttatagagagt

SEQ ID NO: 4715 - DNA, 6000 bp, Homo sapiens
ggtgagccttgagcaaaaggtaatttcactgcccaactctgcaaagagcaccagggagtcgaggttgccagccacactcaccgctggtagggatgcatggaagccgacttgatgttggtttttattccacttggcattttccctgaaaggaacattaaaaaagtcatcttaagcaaggtaagactttcatgacaaatcagaaatgtggtacctcaggttccctctgtcacttcctttatcatctcagaacctctgcggcatctgaccctgtttgacagaggtcagaagtatgattcttcacccagctgtctccctgaaggtgtccaggaggaaagaagtgacatgggagaatagtctgttcatccactcctagaacagatagctaaacctgtgtgactcccatttaacgtcacaggtaaaagagtactatgttctctcattgtttttctttttttatatcataataagtgcagaatctctctttaattgtcccttttcctagacagcttggaggaaataactcttctagctgcctgcatctagactgttctaaaaatgagtaggagagaaggcaggaagccaagagcaagagaggcaggatacagagaaaagaatacatgtaggactggaaaactggcctgcgtgtcaattcctgatgcacctaccaaatggtcttaagatctgactgctgatttctctacctaacaagagacactgacaacatatctaataccagaataaatgggatagaaggatagttgacacagagatgtgagatgcggatgagaaattggagcagtttctgttactcaaagttcttcctcactctctggtgcctgttgcagagtctcagatgagatttttttacttctgaaaattatttcctgggtcacagtgaaaaggagaaatagagaaaacctctaggtctagagatgctggaggcccagataatctagcttattccctcccactcctgctcaaagtcagcttcatttcaacccctgccaccttacctggttgacctgcctgagccatttgtaccccactgagcattggctgctgctggcttggagctcctgccatctgcacctgctgtaatcctgaggttcctgcaaggatcgtcccagctcctggctggcctgcctggccaggaccactgctgcctgaaggtctccaattagatagtcctttcccaaaggcaacagctgccaccaaggcattagtgtctgtagggttaaaggtctgcttgttcggccggagacctgaagaaaaagtaatggggatcctgaagtatgcttctgatgcaggactgaacgtggcagctggaagaccagtatgagtgccagggtttggagttctgaattcagcaacatctagactccctcacagcccagaaaaagagccagaggacccccaagcctatctcagaattctctcttcttactttgcccatttcctccactgcttcagtgctggccttaaatacaaaaggctaacagaatggatacaaaccccaaagcagttcacccttgtgtcctaacttcactacttccaaaacaaccattcccattccagtgatcttatatacctctccttctctgtttagccaccagtcccatcatacctccactctctgattctcgctcctctttgctgattttctccagaaggtttgaacacattttattcaagctctggatctgcttctgtaacacacaaatttgtgcagagattagggtaactaggaaacgatatggagaaatttattccttgggttctgccagaagcaacttaggcgcaaccaactatgtatccctactagacaggaatggtaatgcctagcttctcatgatgggatggggatggggcagcaaggcagtgactcagtccaacctgggctgcatctgcaccaatgcgggcagcatctgtcgtcagttgcttctcctgttcttccacttcagggtcaggcttggttctcagatggtcagggactacctcatggctgaaaacaggcacccgtccttcagtctgccgctgtaacacacagattttattgatcctactctgtactccaagaagattctatctggcctgacataaagtcccatccacaggcaaacagtgcattttcaaggaaaatacaacctgagacataatatctagtttgctaggacacactctcctttactccatccttcattttttgtgtcttctcacatccctatctctaccagacctaggggcaaattaaactatcactgtctgccacgcttcaaagactggaatagacaaagtcacaaaagggcaaactttgtggcttgagacagatgttggagaagaaaggtatcagccttggtgacatacccctcaggttattacagcactatttgggagtggctctcccgccttcagaagaacaaaaagcaaggcctccaaaattatttctaggctctcagctaataacttaatttccctaaatactaaagaagcctaaaaaaccccttaatttcccaagttgtattctttttctcctcttaccatgagatcttcatctcggtctggagacaacaccagaggaatgatgacctggttacggaacagcggtgttttttcatgcttcaagaccttgttcagagtgttcagctgtccagaaagcaaggcaaagctgtccaggacagatggcctggtggtggtaacaaggtgtaagaatgttgtaccccttccctgggtggttcttagtaaaatagtcctagttccttcaggctaggaacacttggattcacctccaaaagtctcatagccctatgactagcctaagtgggaacagactaacagggatgacagggctatgaaagagggacatagtttcagtttatgaaacagacgtagaaaaaacccagttcattgtttgaatggggtgaggaacagtggcaaaataggaaccagggctacactgttataactaaaacttcagaaaccgggtaaaagcctcctttccagcctggaaataagatccacacttcagagtaggttggctctaaaagactcagccacatctgtggcaagagatccagcacgaatagagctgtagtgggaggacctcctcaccagagaagtcaaagggtaagaattgaaagctagaaagaacttgggttaggaaactgagcatttctctacttccttgccatggaatccacttgctaaatgttaggaaacccagctctttccaaatcaaaagatgtttgcaaactgataaatggttacatcattagaaatgtcctattcatcaggaggctaggcccccccacccataagcccttcctagcttgccctggtaactcttaccaggtcagccggccatactcgttctccaacttgcaaatgaaactccccagagagttcttcagatcagccacttgactcagcagtgcatctaatgatgcctcaagctgcttctcctctctctgcaccaataggaacaggttggtcacccagataaacgagtatgacacatagaaaggagggctggaaagccaaggagatggtgtgcaacaccagtcaggtaacacaggatctcattggcataggatagccaggttgttttctatctttggtatttgggttatagacagcatcaaccctgagaccttccaacctgtttgcctgaccccaagtccttccaccaactgattccttttccccatcacctcctaatctatgcctggtttttctctgtgttaggtacaccctacactccctcactgagacattttcgacagacctaatgccaggagatcattctctcatgtgcacctctgtagcacatgcactccagcttcctccatcctagcatctgtgagcctggctgtcttgtcagtctctgggaaatctgcctactcatgaagacttctctgaacaccagtcctgctctcccctttccctcccccaaccaacgactccagctttccatctgctctcatcattttgtttcaaccttctccttgctgaattaatatgcaatcatctatctctgtgtcaatattcccgtgcctctttcacaagctcagtcaacccattaacatttattgagactaccagctgcaagaaactaagtgacaaatgaaaaacaaaaaccacacatgcttctaagcactggacaaacaaattaaaatgctgggggtctgcaaagcatttccttcccatcggtggtctcctgttttactccatttcttcacccttaacaactatagggcacaggctgggaagagggatgcaaaactgtcttgcaaacctgcctgacagaaacttgatcccgggttccaccatggcctctgattataagctgcttagctttcagccatcgcggcccacaattccctcactgcttgggcttctttccaattagatcccctgctatatcggcaaccaacagcctccatccagcagcttaggacagggcctgagccaacccaccaccttcttgagccgtcttccttggactgcatctcagcctccccgtattacaacctaatcctttcccacgccaagcaaacaggtgctgcctcctccctccggatttagcccgactgtctcctgtcaggcaagctccacccccacctctaatcgccgccgctcccgctccaattagcctcgccccccagcccacattcccttatcagccgtgggttctgccctctcttctcagtcccaactcttcattctccttagccagcccactctcggtccctgtacccgaagcttgccagccgctagtacgcccaacgcaactctcacctgcattgcggcggccgaggcggctgccacgatttcacttccggttttccagtcagcaaacgcctacgagaaggcttcgtccaccaatcagaaaactggaactcggccctcccaccaacttccggttcctgctgggtgccgaggtagcgaggtcaggggtcaagagtggaacaccctcactggcccgggccggcgcgggagggctgtgtgatggcctcggagcgcccggagccggaggtgaggggcgggcgggcgcagcactgggccccgagatccgagggggagggtccggcgggcaggcgtggcgttggcctcctctaggtctgggggtggccgggctgcgtagcctcggcagggaccagcccagcccggaaggcccgactatggtacccctgcggactgtgtatgggacgcggtccgcagtttcctcggggagctaaaggagtaactgttcgctttgttttgtttactgacatgtcacccgcgtcgtcgtctctaagacttatagcggtgttaacaaaacttgtattttgactttctgttgcagtttcaatgggcaacacggcagtagatttactttgctggtttttgcatttctttaggcattggaataccataaacagcatgaatttatttagttctagggctcatgcttttagaaaagcagctttaatttcatgaaaaaaacatttgagtcggactgagacctcgttccaatattggcgctgtcatgtagctaatctgtgcaacctcaggcgagtcttcccggatcctgtttccttctttataaaatatctgtcttatagtgtgttgtgagaatcacatgtaataaaccagaaaggtgatatgatatattcgttaaatgctaaggaacatgcaaggaaccttatatatgttgtgtcattcagacttgtgcaaggaaggtggcattctcacagaggagaaaactgaaaaatgagaaagatttagtaccttactcaaatgccactcatccaggaactagcagtttggagttagaagatctgagcttaaaatctcagattcggataaaacaccaccaccaggaaaggtgccaacatatcagtaggtgggaagggtgagagatgtgtataatgatagaaatagtattcattactgcatacatactgcatgctcagtaccattctaagctctttaccaatatcagttaatcctcagccctatgaa

SEQ ID NO: 4716 - DNA, 6000 bp, Homo sapiens
ataccagtgaagctcaaaatctataaggcaaatccatattatataaatatttaaggtataagaatattcaaaccaatttgaagctaaatttgttttgtatttcataaaactactcaatgatataaatgacatgaagaaatgtatacagggatgccattgcatgctgccaactagcataggatcatagcagaacaatttttcacaaagaatatatgtgatgttatgctacacagataatttattaaatacacatttatcaagtatctaatatgtgccaggcactgcattaggtactgtggatacaatggcctttgtcctcatagcaattacagttttgttgaggagagagacattaccctgatgaccataatcatatataggtaaaactgcagttgtgacaaccactctaaggagaggtatgtggataaatcataaactatgataggaagatttggccctgtctgggagactggataaggctttgagatctgaagaatgagtaggagtttactaaacaaaatgagaagggaaacttatcgcaggtaggaggaacaacagatacaaagtgcctgtagtaggaaaccataagactagcccagaggacagaaaaaaggcatgaatgaatagagaatagggagcaagagagaatatgatacaagatgtagccaggagaagggagggtggtactgtgctgtgctggaccttacaggccacatgtttatcctaaagcaatgtgaagaaattgaaaggttttaagaaagacaagtaacataatcagatttgtgttttaaaaaattaccctagatgcattatagggggcaaatttgagtggctgcagatggaccagagaggaggttactgcagcagattaaatgaaatataatagaagtttagactaggtggtgatgggagaaatgaagagatgtgaaatgatctgaaaactattcaggaaaacaacaatagggcttggtaatggactgcatatatggggcaaaagaagaaagcattcaagtcaacaaatgtttgttaaacatttactatgtgccagtcagtgttctaggtaaacaggatacataggtaaacaacaacaaagaaccgtgccctagtggagttttcattctagcaggtagaaatacacaataagcaataacatgataaataagtaaatcatacagtatattagaaagtaataaaagcaacagaaaaaatagaacagggtaaggaatattaggagtaggggagatgggcaggttgcagttttattttatttttattttttttgagacaagagtcttgcactgttggccaagctggagtgcagtgatgcaatctcggctcactgcaacttccgcctcccaggttgaagcaattctcctgcctcagcctcccaggtagctgggattacaggcatgtgccaccacgcccagctaatttttgtatttttagtggagacggggtttcactatgttggtcaggctggtctcgaaggcctgacctcgtgatccacccacctcagcctcccaaagtgctgggattacaggcctgagccaccgcgccctgccttgcagttttaaatagagtggtcaacttaagagtcagaggtgatgttggaacaaagatttgaagaaggtaataggattagcccagcacatattgtagggaagaacatttctaagcagaaggaatcaccactagaaaggtcccagcacaagagtatggctagtatgtgtaaagaacagcaagctggacagtgtgggtgaagcagggtaagtgagaagaaagaatatcagaatggtaaaaaggaagcatctgtaggatgctggcttttctgctgagtgaaagggacatgatcaaataggcttttaaaaagattattctggctgtcatcttgagaacagacttcagggagacaggaacacttgttggaaactactgcaataatccatgcaaaagatcatggtgcttagaccacagtggttaacactggagctaatgaaaagtggtcagattctggatatcggaagctttctgaacctttactggtttggggtgtttcttcaaaaaggaaacccaacagtatctgcagacagactagatgtgggttgtaagaagagtaaaagataactacacaagaattatggcctgagcaagtggaaggacagaaatgccattgaccaagataaagaaggctacaaatgacacaggcttagacatgaggaacaagtattcaatttgggacgtgttgggactgagctgtccaccaaacattctagctgacataacaaattgatgcgtggatatatgaatcttgtattaagaagagagggccacagacataaatttgggagtcactggccaatacagccaaaagataagttcaccaaggaagtgaatgtagagaaaaaaactaaattttgtgtcactcccaacaacgggaggtcaagaaatgaaaccatcaagtaaattgcagaagaatgatcagtaagggctgggcactgtggttcatgcctgtaatcccagcactttgggaggcctagccgggaggatcgcttgagcccaggagtttgagatcagccctggcaacagaacaagacctcatctctccaaaatatcagccagtcatggtggtgtgcatctgtagtcccagctactcagaagtctgaggcaggaggatcgcttaagcctgggaggtccaggctgcaatgagctctgaggggtgacagagtgagaccctgtctcaaaaaataaataaataaataaaaaataaaaaaaggatgactagtaagatggagagcagcaaaaccgaaagtatggtgtcctggagccaaattaataaagcatatcaaggtttctggcttacactactggaagcatggaggtacccatcaccaagatagggaaatcctggaagaatatcacgtttgtgaaggtaaagataacgagtttggcccagatatgctgaggtacataatcaacactgagtaaattaaggaacagtaagctgtaattttaaaagcctgagtctggtctctaattctttgtttgctctgtgacgtaagttgtcattatcatcctgaggctcaattttctttcctatgacatggaggtaatatttatacgagtaaccacaaatggttgctgtgtagatcaaatatggtaatttaagaaaaaaaacttcaaacccctatgaagatataagaaaaagtcacagaatacagaaagttgtaggaattctaagaaacaaaagttatatttaatccttataaggaaaaaaagaagagagaaaactaaatcaggcctataaggaaccattcaccctgtacctttagctgagtcctgtggaattcctgctttatttcaaaggtaacaaacccttcttgtttttaatcttttccttaaacacctcttcaactttctaacccaactgaaactcggcttatctctgaagacaccacttaccttgacaccagtcataatgacatatcatcctccaaacatgccttaaatgttaagatttccatatttttgctcatatgttatttctttacctggaatttcctttccccatttcattctctatccaaattctaactatccacaaggaactgcaaggccatcagcatcatgaaggctaccatggttcctcacaactgaatgaagcctcttcttcttttttttttaaagacaagtctcactattgcccaggaggcagtgtagtgacaccatcgtggcccactgtagcctcaatctcctgggctcaagggatcctcatgcctcagtctcccaaatagctgggactataggtgtgtaccaccatacccagctaattttttctgtagggacgaggtctccctatgttgcccaggctggtgtcaaacccctaagttcagtcctgcctcagccttccaaagtgctgggattaacaggagtaagccactgcgccagattgaacctcttctttagaaccaccacagcacataacatgtatctgctacgcccctcacttccctctagttggtattacacattttgcataaaagtcttctatttctaaataggcttcaagtcaggttcatctttgtatcagctggtgctcttaaaatatttattgtgaacatggacttaatgagcttgacgtgttgaaattatttctaatgtgttgccatactcacattttttactctgtttttccacttctgccttcagtctcttgtacttgtctgtcctgtaaaccaggacccaggttatgcctaaaacattaaaagcaacatgttaatagagaaatgactggaatgatcacaacaaacaaagtggttactgttggagaaggaggaattccaacttttcgctttgtatttacccatagttaacttttttcaaaggctaatacaactgactcttcagccaaaacaacagtaacatgatgtgaaggtgtctccacaaatacccaagtgaaatctacctgagaccaaagaaaactcggcaatcgactccatactcccctcctgctcctgttcacgagttgcccagagattccctgaagtggagtagatgagcctctcaagcaagtaaggctcgcgatctttcccctggtggcacaggggaccccggggcccttcctcccggggactgatcaaacgtctgagaaatacccgctctcaccctctgcgagcagagccgtgcacacagagataaaaacgatgaggagagtgtccgcgaacatagtgctcatctcgcaccttcgtctctgcactctcacccgccagggggaaagcgctctacagccaggaaaagtgaagcgaaaacggcttccgtagactccgccaccaccgagtaacagaccaactctgacagcccgaagatcgcacttccgcttccggggcatagcaccggaaaggctcgtatcggagaacggtgtggccacgagagtctagaggaaaccaacccgcaactcactggagctgaagggctggtagtcaggccgaatctcgcgagaattggaactatttcagagccagaggaggatagtggcggcggcgaactttgcccggtagattttactgactggggtgctggcgcgcgcctttttctcggccagaatccagttattgggatagtcttgacttctacctcagcccaacttctgtggtcgtaatattagtttagcttgggtttgccgtgaagtaagaagactgacttccgcaaaggtactgaacgactgggtgtaggtgccagggcatggacgtgaagctggaaccgcgaaatgagttagttgtgggccgctggcctcaaggagcgaacgtcagcgcgaagaggagaagcttgtgcatacgctctgataagggttttaatagaggtattaccacagtgctgcgtgacacggttgagagagtggtcagaagaagctaatgaaaggaattgaagcagtgccttaggggagtaggagtacttttggagatagcaaaggactttctaggcaaagtggaagtcaaagcacggatgcctgaaaattcatagtgtgatagtgcagtgagtaatgtatctagagaaggggtcttaaacccagatgcctagactggcgagagaaaataaattatcttatgcaagctgagcctaaacaaatggtggaagttactacgatggataagtgagcattaagttcatctgaaaggagaatttgatacccaaatccaacccatttctctaggagaatgagcacccagtttctgagatgtcttcgtttctcaggaaaatccagaaatcctgggttttatgtgaaacttaatttataagtgttgctaactaattaaaattcaaaaatgtctcagcagcgtggtttcagccattgtagacggtttcagctttttcacactggggtgtgtgtgtgtatgggtgaaaacctggaagctggctgagctgtatcctcttgtacttcctcctatcattggtgtttttttgtttgtttgagatggagtttcactcttgttgcccaggtggagt

SEQ ID NO: 4717 - DNA, 6000 bp, Homo sapiens
tttccaattcccaatctttgctatactgctctacagctgggttcagttagagcaataacatcaagagttaatccaaatcagttggtagtactttaagttatccccataaacattgcagattttttaaaaactgtctaaatatttgccaggtacacaaaaacaaaactagtacttggggactccattaggccaatgctctaaaaagtaacacatggcttgttacggcagtgggattttgtagtaactctcctataccctctttatggttattaaatcctctacttaaccttctttatggtaaaatagaaacgattagccttcatggctactaagtcagcaagtttcatgaatcctcactttccttgcaaaacagaaaaatactggaaatggagggccaaaggaaagggcatgggatgatcttttaagtgctgcaaagaaagagaagactagttattcctacagtgtgggtttttgttttaaatttaaggaaacttacctttgaaagattcattttactacaaaaaggaacagactttctggggtctgaagggatttgtacttgaagatactccagtcagcagagggtcatgttgagcattctgcagacagaactgtttcaagtctgcagctgcctgggaaacctatacataacaaagagggggggaagtgccagatggtgagaacattttaatgaaggttttctcaatctttggaaatattgtacttacaataaaacagtacttctcttgcttcaaaagaagatactatataataattgaagacttaagtcaaatagtgagctctttttttttttttttttttttttgagacggagtctcactctgttgccaggctggagtacagtggtgcgatctcggctcactgcaacctccgcctcggttcaagcgattctcctgcctcagcctcctgagtagctgggactacaggcgcacgtcaccacgcccagctagtttttctatttttagtagagacggggtttcaccgtgttggccaggatggtctctctctcttgacctcgtgatccgcccacctcggcctcccaaagtgctgagattacaggtgtgagccaccacgcccagcctagtgagctcttaatacttaaaactagtgcttgcaaataagactgatttaattaagtatgttttcttttgcttggttactagaagcatcagatgactgagtacaaacagtagaattatgttgatttttgcaaagcgtagcacatcttgcttattaataataggctgttcaagtgcaaacctgagggtacttaacatcttattaaaaacattaagggttaaacaaaaagcaataacattctagcaaactattactttgtcttgaaagcagtattactggaaaaatgctactgtgaatgaacataatgtgggataactagcacataatttagaaaagccaacactaagaatgcattcagtatactgatcctcaaatttatcagacccttatactgtcttgcatttaaactaaaacaaattaaaagaggcatgcattcattcacttagacatctactatttctatatattctgctaaggtgatgtaggatataaacaaaataaccataaagccattgaagttccttaagtcctgtttgggtggctctgtatatgtatattaacacttaaatcatatttaaggcaatagtttcttaaaggcaggctgctcagaaaaactgttaaattgaagtttgctagcagcctttcagtcacgtgacactgggcagaaatctgtcactgtctagtttaataacattaacggacccgttcagacgtggaacatgaatgactaaaacatgccccaaatgcatctaatatctgaagtcttgaactgagatttaaaaagtgggagaaatactcatttattttattctcagtctttatccgcaaggaggctgggagcaggtgtccagtccatccagctggatatgtggcctcagggaattaatagcatcacaaatgctctctataccaagaacccctgcagattacagctgtacctccaacctaataattcttcatcctaagatgaatctaaacgcttatcgaatctatttgtgtgttttgcttatacagcagtccagagtaatgagttccataggtttattagctcctatgtaaaagaagtatttttacaaatgactacaccccctcatcccccgccttccaaaagaagtgtagctaaagtaggggaacaatggtgtcatttttcaccaaatattgtaatagtgtttagtgttttcattcatattaaccagcaggaagcataaagagtacctgttaattttctgtttaaagtgtaggtggggtccaatgtaactcgctttcacaattttcaagcaccactatgtgccgcatatacttacaggcactaagaatacataagaacagccagagccctgttgttatggagctaacagttcagagaaaatgacagacaaggtgctctgtagtaaaatgaataatcttttagatggtgactgggtgcccacctaagggaaggtgtctgaggtgacattgaagctgagatctcaatgacaagagatccagccaaataaccatcagtgagaaacagcattccaaacagtgaggaaagctgagacaaagactctaaaactggaacaagctgctagcccctaaggcactgtaacaatcaccatccaggaggttgaaaccctgtaatcctggcctattagtgccccttctcactctcaaaaatgtcctgacctacctatgacagtttgtcaagcacttatggtaagttctatcaattgtactcacacataaaggttaaaagtaagattgtgctagtttaaaaatctcacaaaaaaatcacctagcccagtcattgataaaacagatacacaacgttaaaccacatttagcaacatgtctaaagaaaagctcattaaaaagtacaaaaggggatgctccccttcttgctacagccttaacatcaggcaataactccaaaaccaaatcatgtctggtgcctttaatgatcccgaccagaaccagaagtctactgaagatttaggtaggatcagttttggggaattaggggagcagcagctagggttttcaaagtaaagctcttggagtattttagcctgagaacctcatgtcattttctttggagactaaagatgtacaatttattgctttcactatcccacccccatttttttttcttggtccatcctatctatgataaaggcacacctgaatgacatttaatggttacgaaataaatgatttcgagtttcagagccaaatccagccaagactgactagaaaccactgtgatgaggtaagaattgggagagtagagaaatggattccaaactgcagtgaggtctacagcatttcaaggactggacgtgagggggatcccacaccaagacgaatgagaattcccttcccttctgagttgaccacaactgagtaagctaggtccctgacatttctagttaacaaaactaaatgggagactctctctcaggaggatcctgcaccaagacgaatgagaatttcccttcccttctgaggtgaccacaactgagtaagctaggtctctgacacttctagttaagaaagcttagagaccctctcagttcacaaaacatttcggcaagtaataaagactagcctgatgagtataaaatcaaatcatcttaggaactggctgcttttaacagggcacatgatttacattcttgtttctttttttaactgcagaagtgtttcacatgtagcctgacctattgtaccagaaagaagccaatccatttaggactgtaaaaatcaggaaatacttagaacagcacttgaatgtcaagttattctatcaacacagacaaaaggctttttctcccaaagtaccccaagacaaggccaatactaaccagacgccaaaataagaccaataattacccacaataatcattttctccggcatgcggaccagtcgatatccccaaggtcaaatatgagcaaactgtgccataggtatgaaatgcacgctttgttcgaggttgtacggggcactgaccggaactttacactccaggatcgtttcgaaaaatgcttattcaatccacagtttaagttatgcaataattcgcttaaaagtatgtgttcaacggacaagagaagttgaaggtaagaatttaatactaaaggaagtaggtttgggaaagatcaaatgggagaaaagtctgctctgaatcaaaagtcggaaaataccctgtccgatgagaaacaggaggctggcaaagtgggaaaggaagggtgcggacagcgcgcggaggcgcagctgttggtgagaccagccgagaaggctgccaagggaggtagagacggaggaggaccggaatgtcggccacggttcaacccaggggccagcccgcctcggaaagtcctggggcggaagggcgaactaatcgtccccctaaaacacagcgtagacccacgcggcgcctgctctaaagctggccgctccccgatcgccgccgctgagcgcgcgtcctctccaggggaagcgagggccggcgcgtgtcccgcccgcccccgccagctgggccgccggatcccacccgccgccgccgccttcctcccgcctcggccgcccgcccccgctcacttttacgcggttgagtccggcctccagccggagctgttgaaccactttcttcatagcggcgacgctggaggagccagacatggtgcacgcgacggccgggccgattcgtgggtcggtgggtcgtgggccgtgggtcggcggggccagacaactcagcggcgcgcggcgggggcggggctccgaactttgtctctaagtttccggttctgtgctcagcggctccaccctcggtgcgcatgcgcgccttgccagccctctgttccagctccacacccggccccgagcgcgagcctggaggagggggaggagaaggggcggagcagtcggtgggcgcggcggctgctggaggctagcgcgacccgactcttaagttttcttttcctctccagaggggccgattagggagaggtaaggagagagcttaccgttagccgcgaagaactaagagggggtctgaagaggaccagggagggaaggcagagcttgtgggagtttctaaaaggcccggcggcgggtgaccaggaggtctcagttttcctcccagtttgtgggaagggttgagggaagtgaggggagatactgggtgaggcgtaggagctactgtgcacccggcgtgagtcacccgcacacccccgccccgtacaggcgtgtctctctgtgacccgagtttggccaacaggcattttcagttccacccccaacccccagccccgctgacccgaggcggagagcaggcgcggaggtcgctgtcgcgtacccagcggagccgggcgggcggggagcaggggcgctgattcgctggagaagggatcttctcgaggtttgactttactggcttcttagctcttgaatcggtttttctgaaggagattgtgaagaagccaaggtgctggctgaagattacacctgtctgctcggttacccatttactctggagaattaatgcttattgtactttttaaaataaaacttatttttgtgtttccggaaagtttgctctttagtatttccgttgtaatttattacctcctgcttgaaattgagtaccaaaggagtttttaggagagagggtagggtctaaccaaacaaaataggctcagccagtaggtctttctttcatccacggaaatatgtgtgttatgtcacagcactaagggcagatgtttcctatttcttttcgggtagtcaatctccgaatgcgctgatgttttccattaatgttaataattttatcattaatggatttcaaattttttattagggaagcatgtgtaattgcactggtcaacaaaatctaatttatttactcaacagtttat

SEQ ID NO: 4718 - DNA, 6000 bp, Homo sapiens
cacctctccttggttttcttattcagatttagaaacgccaacttctgctggcttacacgtgaggccacacctccagctccctcctctggatgcaccccgtcccttgtccatagcctggaaacagctcttgccctccaaagctgagggatccaaatactggggaaagtggcccacaaagcccagagtgcctctcccctgaccacacccacagctggctgagctggagcctccagggttcctgggtcttgagccacacagctcccacatgccaccctcagcccttggggaagtggcctatttgtttatcctcctgtggggccctggatggtgcatgagcactcagagcctggtctcctgggggtctccagggctcagctgcaggactcagaacccagggatccttgagtgtccccaagctttatactaagaccccatagctcacccaaggtgatgtggccaccgcccctgctgcttgggaatcatggggctgccttcaaccctgacacctggcaaaacatgagtcccttcagcagcaccaccccaccctggggagaaatgttatctccaataagcacaagttatgaggataaaaatggaagggagggaagggcaaagcccagtccccaggaggggactcagtgggtacagctgttgaaaccccagtaataaattaaaaaactgagggctcaaaacagtgttaggcacttcttgaacatggtgaataactaaaggaataaggggggaagtgagcacactaacgtggaagtgcttactctaacaccagtcactgttctaatacccctggcattcatctttacaacagccactgggtgcggtggctcatgcttgtaatcccagcactttgggaggccaaggcggccggatcacttgagggcaggagttcgagatcaggccggccaacatggtgaaaccccatctgtactaaaaatagaaaaaaaatagctgggtccgtggtggcgggcgcctgtaatcccagctactcaggagactgaggcatgagaatcacttagaacccaagaggtggaggttgcagtgagccaagatcatgccactgcactccagcctgagtgacagagtgagactctgtccatctcgtatataaagaaactgaggctcaaaagagttaacaaccttcccacgatcgcacagctaataaaaacaagaaaccaagatttaaacctaggtcagcctctcaaaagcacctacgcttaaccatcataccaagtgccagaaaaggtatggccagggagggctggccctaacccagagggagctcaacagctgaaccttcaagggagggaacagaggcccaagagggcatctgaaggtgtggtattccctaccccaggacaggctggggcccagggcaaagcctgggagcctgggagggcagaggtttggggaaaccccgtggcccatgcaacattgaccttcaagccccagagccaggcccagggtgaaacctacaggcccgaacagctgcggaggctcagctgctcctactagctgaggccacagccccaggcagctgcctaccactccttccctctagacaaccctttcccccacctcctggccttcatctggggacacatgtccctctcggtgtctccatgtaatgctgctatcctcctccccactccagacttcaactccatcctttggggatggggatcctctttttctcttaaataattctaaaggacattctgccgttactcactagagagcttgttttgacctctaccctgggaactttcttcctgaagtctaacttccatctattctgcagcaactgatggcagggatttaagtgaagtggttgttaaaagtcatatttagcagtacaagccattttcccaaattgaatcatagacagaagcccattatacaacagattaaggctcagctgccctgcttaaagctgggagagggtgagaaggctgccccagatgcattttgtggaaccctggggctcaaggagcataatttgcaaatcttggggactggggttagggaagggaggacagaggagggttgggggatcatgcccatgaccttggccagtctcctgcacctgagcagggcaggccttaagttccccttctgcatggtcactgtggggggtaactcaggtctcttccagccccaaaggtctagggagaggtgtctggagaacccagggcagcgattggaagtaggagggcggctcaaggcccaggcagggaaatgattaaccactggctgttcagtcccaggcactctcagatccacccctcaccccctgcagacaggcctggcccagcctcactggtcaccaggccagtccggggagaaaaggacaaggcctctgaccagggcacccagccagccagctcaccactgcccccccaatcccagggttggaagacttgaatctctgctccatgccaaggatgggctgcaggctggcccccagctacccacccacctctccatccacctccccacctgggaccgtgctgtcacaccctagcacggtcctccccagcccaggaggctctgttgacagtgactcacagccctttcctgcctgcccgctgaggcttgttcacccagggagcggagcgggagcggtcctctgttccaggtgcctcatcagggtgactgttggcagcagctgcgtctgcccacagggctctatgagggctgggacccggcagggagggcaggccaggggcccctgtggcaggactgttccccagagcttcctggcacttaccctggacatcttgtgggaacttggctgtagccacatgagtccatgtccatctgagcagtggacaagcttaggccagaccttgctcccattttcaaagttccagtgccccagctgcctccccacacacacacacccccccatgcatatccaggcatgctttcagacacaaaatcacatatatcccaccagactatgaacttctgaagaaggagtgtctggtttgtatttttaacccaatgcacagtactgaggtcttcaataaacagttcaactgaacatatgcagactgacaaactcaagactcagcaacataagaaccagctccccacacagatgtgtcatctcttcataggccataaacacacttgtccacaagtatgccacacacacacacacacataagcatacattcataggcacaggtaggcccacatctagaagcaaagacactcccacatcaacccccaggcacactgacccacatgcaaagtccaagaccttgactcctcagccgcaccctcagcatagaccttcctctatagcagcctgggtttcttttccagagcactgagttccctccattcgtggggcttaccttttcccctctctagagcccatgggctgcccacagtgcttcagagcactgtgaggtcttgagggtctggggaggtggccccccagtcccaggcgatgagctgctatggagaggctaagcctgagacaatgaggtagttctggagcccttattaagggagggcaggagcggggtagaggacatactagagcactggaaaaacctgtgaaagatgccttgctggggaaagcctacaggacccaaatggctggagggtctgcacctggcagagatagccctggctcaggaaaggccaagacccaaatgcccacctgggaggagctaagaggctaatatctacctggctagaaagggatcaaaagagcaggctccagctctgggctaccgcaggagcctcagtttccttagggacaagatgggggacgggggcgcccagtggaggaatgaggtgaaaatgctcacagggggccttcttggcagaggtgcagggtcgctccaagagaagtcgctagaggtcaccaatctccatgaggggtgctgccttctgaacacccgccttccccaggcctctcggaccctgatgggatgtccagcaggcaggggtaggatgcctcatccccgaccctttaggagaccagtgtacaagtaaagattgcagcagcacagatggggatggcaactatcttaaggttcccagcccagatgccaccccaaaatgccatgctgagattctgagcgtccttagtgggagacgggtctgcttccctccagtcctcttcactgacccctccaagacggctctccctgctccccctcccaagaggggctgtgggacacctcccaggggtcctctccgccagagacacacgggggcagtgagagaggcttctctcaggaatgaggcttggaggttactcctgaacacctccacaatcccccaaaacgttccttcctgcttccaccttccacagggggggccatatcccagcgggcgtccagactgaggaccagccttcccctaagcaccctgtgtggggcctcaggccccgaggggagaagacccaccctgtaacctcaggggtcccgagtttggccccaatcctgtctcccgcgagtcgcagcaagaccaggatccagcctcagtgtcagggtcccaggcggggaggaggccggtgccccgaggagaggagacccaaaggctccccgccgaccccccgcccctcccggctccctccggcgctcacctggacagcgcggaccagtccttcctgctgacagccatgctgcaggagccccgcgtggccgcccgcgccccgccggccgccgcctcacctggcgcccctccccttccagcccaggtgggatcacatggccgcttatctcacccccgcgcgccccggccgcgctccgatttgccgacccgggaatggcctctgggatgtgggcgtcccagacaaagccgcattgattgcagcccaggccggcccggccgcgaggccgcaagcactgggtggaccgtcggacggatcgcgggaccgaacgacggacgcccggggccggcgtggggctggtcggctgcccggggcgagggcgggagacttcctgctcagaaccagtccgaccagcttggcgctgggacgcctccccgcgctgtgccgcggcccggggtgccgaggagctgggctgggggcggggacccctgccgggaacccgacttagcccggagacgctcaagagcaagaagccgagcggaaaagttagcgcaggtactgtgatctcgggtctagagcgcccgcgccttcggggccccttcgcagggagcgccctccccactccctggcttcggaacccacccgggcccaccgtcccagtaggcctcgctgagatgaatgaggcattgctttctgagctgcacacaaaacatgcccctggtagacccagccccacccaaagggagaatcttagactcaattcagcaaacatttgtgaaagcacaaatatgtcaaaggcactgtccttgctccctgatactggactttgggctagagtggcagggtgtataataagggcagaggaagctcagtttttcttccccaaggaaagattaaacacagatatctaggactcgaattttggagcaccgtgagacagctcaggcacccctgacaccacctggctccctttaggtgcccatctgggctggtgcggggccaggtgctttctatccaggaaccagcctcaggtgggcttgggctaagagagggtcaggcgttgagcatggggaatcttatcttccctgatggatctgaactgcagggtcagcgcacagttgctgttcctgccctgagaggaaggaggcacagccccagcgccaggatgagaatatcaaaagggagcctgagccagagccagaactgccctcatgctcctgggcctcgctgcccagcctcagcctctctttggtgctcatgtcaggccttccagctctgagatctcacggcaaagggcaagctagctgccgggcagaagcctggaaacacagacacagccagcctgttgagattccccctcccgaagtaccccctcctccagggagccttccttcttggcaagggtgggacga

SEQ ID NO: 4719 - DNA, 6000 bp, Homo sapiens
gctttgttgcccaggctggagtgcaatggcgcaatctcggctcactgcaatctccgcctctccggttcaagcgattctcctgcctcagcctcccaagtagctgggattacaggcatgtgccaccatgcccagctaatcttgtatttttagtagagatggggtttcaccatgttggtcaggctggtctcaaactcctcagatgatccgcccgccttggcctcccaaagtgctgggattacaggtgtgagccaccgcgcccggcaggtcaaaagatttttaatactttggaaggacattaaataaactagacttttatagtgacagattcaatgaagttattgatgatatgaagggctcaatgaaacacactaactgggatgttgttacatgtttgaaaaagtgaactaacatacttacaaatgaaatatatagtgtatttgggtcttcggagctcctgaataatataatccacattctcctagaaaatgaagaacaagcaaacaaaatatgaggagagttgcttaaggaaaaaagtaataagcattcacccattgatttgtttatttactgcgtctactgcatattgaagtctaggttaagtgtgcttatgttggtgggtaagggctggagacaaaagagataaattaaatacaatgatcgggaatcatatattatttaataatatgtgtataatattaaatattaaccagctgcattttggccaattaagataaagaatataaaggacacagatgttgaaacacaacataaaattgattataattctgcaaactcacatcaagctgcttgtctataaattgtattcatttgctcaaaattctttttttttttttttttgagattaagtctcactctgttgcccaggctggagtgcaatggcacaatcttggctcactgtaacctccgtctcctgggttcaagcaattctcctgtctcagcctcccaagtagctgagattacaggtttgtgccaccatacccagctaattttttgtaattgtagcagagacggggtttcaccatgttggccaggctggtctcgaactcctgacctcaactgatccacctggcttggcctcccaaagtgttaggattacaggcatgagccactgcgcctggcctgatcaaaattcctatatagagcattaaatgtgtctattcctttaaaaattaacatgcaagagaaaataaagttaattatattcactttggcttttaacttattgggatgtaagactctgcacaactacaatgtttgtgaagtatttgcaagtagcaggctaagatcttttctacaattacattgttttaaaataaagtatgaaagtttaaaacaaaaaagttgatttttatatggtcaaaatataagattccaattacataagattataatgcaggttttattggtttttgatactataacacctggttaaatttcaatataaattgttccctaaacatattaatttgttttaaaaatcacatttctttacagaattaaaaaaaagtaagcaatatatactgcttattaatggggaaagggttttaaaaattgtaatttagatttaaaaatgcaatttagatttcaaattaactttataatataatcttaaggcaaaaaatttaaataataaatcttttaaacctcaattacttcctcgtaatatgctaggcaaaaataacaaagtgaattaaaagattcttaaaagttcagacaatgtggaaaaagacaaaagagaatatataaaagaggaaaaagaaaaaggaaagattcttttttaaaaattatttttaatttttattttattattattttttgagacggagtcttgctctgtcgccaggctggactacagtggcgtgatctcagcttactgcaacctctgactccctggttcaagcgattctcctgcctcagcctccctagtagctgggactacaggcgcctgccaccatgcctggctaatttttttgttgttttttttttttttgtatttttagtagagacggggtttcaccatgttggccaggatggtctcgatctcctgacctcgtgatccgcctgccttggcctcccaaagtgctaggattacaggcgtgagccaccgcgcccggccaaaaggaaagattcttaaaagagttcgagagacagtacataacagtgaaagagtttctctaataaaaaacattaggaaataatgaactagatgatctctaacatatctcttgaaccaaaatttcatgactaagagctacaaacatgaaacaattggaaactattataacacagcatgtgttcattaattcagcaactgtttattgagtgtccactgtgtgacaggaattgggaatatagggtgagaaaaaacagatatcatatctgttttcatggagcttactgctggtaatcacataaaccatataaaagttcaaaccattacacacaatagggagataaagatggtgttgtaaatgcatataaggggcaggtttgacctggtcagcaaaaacagtgaagggttacttgaagaagttaagttccaggcagaggaagaagactatgcaaacgtcccgtggcatgacgggacaaggggaatatagcggattgatatacacagggtgattaagatgcagagtgcaaaagggggatggttcgaaatgaggctggagaaatggtagaaaccagaccatgctgcaccttgaaggctacaattaaggagttttgcccttatcagaaaagcaatgagaagtcattcaaggatttcaagcaggagtgtcatgatcaaatttgcattttggaaagttcatatgcacaagccggataaaatgcattagagttgaagaacatgaatatgaatcaagaaagtataacagccgggcacggtggctcccgcctgtaatcccagcactttgggaggccaaggcgggcggatcatgaggtcaggagatcaagaccatcctggctaacacagtgaaaccctgtctctactaaaaatacaaaaaaattagccgggcgtggtggcgggcacctgtagtcccagctactcgggaggctgaggcaggagaatggcgtgaacccgggaggcggagcttgcagtgagccgagattgcgccactgcactccagcctgggcgacagagcgagactccatctcaaaaaaaaaaaaaaaaaaaagtgtaacaaataagattaaaatagcaaaggctttttaaaggagagactcaagctagatttagaagatgatggataaaaagtgacaaatggccaaagaacttttaatcagtggaagaaaaaaaaaacaaggaacaggaatgagcatgtagaattgctcattccaacagtagcctagctggctatagaggagaagcagacctaggacataggaaggctggatacacatgggcagatcaaaccaacaaagtagggctttaatggctgggctaaatatagatttaatcatggaagtaacatcaagccaccacaggttcctgagcataaatgtgaataaagtggcaaagattcaagacactcatagctgtatataaaattaagtgttgatggtgttcaatgtgacagatacggaggttaatccaggaataaagtaatgtgggtctccgttaagagtagttcattagtggcaatgggaatggctgtgaacctaaaaaacatcttgaaggaagaactggctgtaaggggtcaactgaaatatggaaacaaaacaagaaaaatgaaggttataacactgatgaaccaggataattatgatgccacaaattatgataatacaaatttattttgccttcttaatgctttcagatcagagtgttctgcatctgcctgggcagatggaagctcagtttatgcagtacctttgtaggtcgaagaaaacaaattgccttcaggtgtttcatgatctctcgattttgagaatcaatgcgttcaaagaggtacacttccttctgtagaatctccgattgtgtgtataccatactcactatgccagtctgtaaaaacaaaagattaactaaaagtatgctagtctagaataataaaaacaagtagcacatctaaccctcttttttcattaatacttagctggataacttaaatagtaatatacggaaaacatttactgaacatccaaacaggtaggtaacatacgagaatgaaaaatacgctctatcctttcagctgaagcttcaagattaaaaacaaaaaacatggtctctttgaacaggaacaatccataagtttccaaaaatatttttttctatcaccttaaagagttttgttttctggtctgtggccaacaaataatctgtcatttcagcttgagctccaacagctttactttaaaaacacaatgttgagtggaaacagtaggcccatcccaaagccttccaagtgctctgacatattaatgatttcttggcggggacatttagaaaaggatttctgattccaataaattgttccgggtagaagtagtctctaggcagtggctggagccatgtagactgaaaacccaccgggcaagctttatataaacaacttttcaattccacacaaaccgaccctcattttcgtatgtttaattaaatgctaagtcctacagtggaatgggacgagcaattgtaaggttgagagggttccttcacaaatgctgagcaaaagcaaactcaccgtctctttatccatgagaagtactttcataccaggcccgctgtcctctatcattttggaaatgtactgcttcacagcaaaaaccacgttcatggcggcgaattgacaagtaccctacagcccttcccgcccccttttctggctaaattaacccccagtctgttggccgggtctcagctgcttcctcccagccgggattcggcttccgggagtccgggcagccacggtgctgggagttgtagttccgctggagtgtacaggggaccaagcctaccccggggatggaaaaatccggctgagacggcctgggccgctgccacgcgcgggcgctattctccacccacctgcggcctgaagatgcctgaggcccggactctcagacccctattgccctttggtgctggaggcccagcggcagcctgaagcccaagagagtggagcctcgcgaaatgaggaacctggcacaaggtttgcttggaagcaggaacgacggagtgtggctacgtgccctatttgccattaacgctttcttgcatggcagtgagagatgagggcaagggaggtggcataatgctcccggccgcttgggactcggagagacggcatttaataaatcacacgcggtatttgcgaaacagtggtcgagattcgtcttcccgggttcattgcgtcattaataggcgggaacagtgcccctgtgttgaggctgcagaggccctaattggttttcccaagacagaagggcatatgagattgaacaaatatttgttgaatgaatgaacaaagggaacgccttttagggatgtttctgggggaaaggcctgaggttctccaggagggtctgcagctagggtcggccgtgggggctcgcagcccgcgggaccaccggacctgcaagcgtccccctgccccgcccccgcctcggcgctctgagcaattggactctgccagctctaactccggcgggactctgaaactcaggcaagagccgaggtgactgggtcctttgaaatgggtaggggacacgtatccggtagaactaaaactagcgtggggatttgaagccaaaactctcaagtttttactgaatcttaaaaccatcaacttccaaatgtctgcatttgtctttacaccacacaggtctcccctctatcatggcatttgtcgaaaaggagggtagatgtttgtttttcgcacctttactttggggaattgtaaaatcaggaagataataagaaacaattgttagaaatcagtaactaaaaatgcttatgaatatttccaccaaaataatgac

SEQ ID NO: 4720 - DNA, 6000 bp, Homo sapiens
ccatccaagaagtataaaggtcataataaaatgaacccactggattcctgtgggtccttaacccatggagataagaaaacctagcttaacattgttaaaatagaactgggcaactctggccgggcgtggtagctcatgcctgtaatcccagcactttgagaggccaaggcgggtgaatcgcttgagctcaggagctaaagaccagctgggcaacaaagcaagacctctgtctctacaaaaaatacaaaaattagccgggcatggtggctcgtgcctgtggtcccagtcacacaggaggatgaggtgggaggatggcttgagcctgggaggcatagggggcagtgagccaagatcgcactactgccctctagcctgcataacaaaaccagactgtctaaaaaaaaaaaaagaattgagcaactttgctcctccctttaaaaacctccagtggttcctcatcttctaatttactgacaaaaaggccgaactattaatacttacatggccaggcgcggtggttcacgcctgtaatcccagcgctttggaaggccgaggcggggagatcatttggggtcagtccaagaccagactggccaacatggtgaaaccccatctctattaataatacaaaaattagctgggtgtggtggcacaagcctgtaagctcagctactcacgaggctgaggcaggagaatcacatgaacccaggaggcagaggttgcagggagtggagatcatgccactgcattccagcctgggtgacatagcaagactccgtctcagaaaaaaaaaatgacaatggcatgcaagtccttccaagaattgaactcagttaccttcccagctctctccatcaaactgctttctattttccattttgcaaacagacatgctttgacttctcatggctttcatggctcttggccttcccccctctggaatggcatctgctccctcagtcctccacactgtactgcagttgtcactgggtccttaactcctcttttggactctaagcaaaagataacgtactattcatttatagttgtaacctaatataaaactatccatactgaaaagtcaataatgtctgaaatttagatggtaaaatgctaacttacatttacccacatcttcatctattttacttttactgtcataaaaaattaagaatagttgacgtaattgattcagtcactggcctattaccaccctgacaaggatggaataagaaatagggcttgtcatttccaacccaagctatttgcaatggaaaaatatatccatgctttcaagattcgtatttattccacagtggaagagaaaatgtaatgttctttcctttatttatttatttttttgagatggagtcttgctctgttgcccaggctggagggcagggacgaaatcttggctcactgcaagctccgccttgagggttcaagtgattctcctgcctcagcctcccaagtagctgggactataggcgcctgccaccacgcccagctaatttttttatttttttatttttagtacagatgaggtttcaccgtgttagccagggtggtctcgatctcctgaccttgtgatccacccgcctcggcctcccaaagtgctgggattacaggcaaaagctaccacacccggccgaaaatgtaatgttatttctaattctcgtgagatactggtataaaaccatagaatagcgattaaaagtcccagcaagactgacaaaacaccatgtgttccaccagaaaaatccacacattaaaacaaaggtgccgggcacggtggctcacgcctataatcccaacactttgggaggccaaggtgggcagatcacctgaggtcggcagttcgagaccagcatggagaaaccccgtctctactagaaatacaaaagtacctgggcgtggtggcacatgcctgtaatctcagctactcgggaggcagaggcaggagaatcacttgaaccctcgaggcagaggttgcagtgagctgagatcgcgccattgcactctagcctgagcaacaagaatcaaactctgcctaaaaaaaaaaaaaaaaaaaaaaaccaggctgggcacagtggctcacacctgtaatcccagcactttgggaggctgacgcaggaggatcacgaggtcaggaaatcgagaccatcctggctaacacggtgaaacctcgtctctacgaaaaatacaaaaaattagccgggcgtggtggtgggcacctgtagtcccagctactcgggaggctgaggcaggagaatggagtgaatccgggaggtggagcttgcagtgagccccgagatggcaccactgcactccagcctgggcgacagagtgagactctatctcaaaaacaaaaaacaaaacaaaggcagcattacttggctcactccacattccataattcttctgactgcttttacatccttcccttttgtcagttagtgtctcatatactaacagtctccaatgacacatgcagaaaggtagcttttaattgctacacagctatttctcctttttagtacctggatattgctttgagaacttcatttaggaagtgagtgaaccacacctatcagtgtagctttattctctaaggtgactaacacctaggccccaagttataagtttccccaggattcctaccactcaagacacatgttaaaataatctgttaggttaagaccactgaatcttaaatctgagacatcatattttatagaatccagctccctttatacatatgaaactgattctggaaaagttaattgtctagtttacaaggtaactagaatccagagcttcctgactctccaaacaatgttaagtatactacacgttacagtgttttaatctttttctttgttttgagacagaatttcactttgtcgcccaggatggagtgcagtggcatgatctcggctcactgcaacctctgcctcccatattgaagcgattctttttttttttttagacggagttttgctcgtcgcccaggctggagtacaatggtgccatcttggctcactgcaacctccgcctcccgggttcaagtgattctcctgcctcagcctccctcagtcctgcaacagagcaggactccagctcaaaaaaaaaaaaaaaaaggaattagttcatttctactcttactctctgctacaatatactttactgaaaaataagttccaagaataaaaatttaagatggaatgtagctatatgaattgtacagaaaccacctgatttttatcaagtggtaatatatcatcactacagcaaactctaaattcaagccggtgatctaaaagtcaaatgatccaaaacccattagccattaccaattccccaagctagttagtacacagagggctcaactcattgtgcaatgaccacgaatatgtcattgaatgtgaaatgatcaaatgttctggaaaatttataaaactttcactagtttgcacaattaaagttattttgagagaaaacaacttccgtgtgtatcattacattgaactactcaactttggctagtaaaatatgtactccaaaaggtactccctctggggaaagtgtcataaatatgctgctctggaatgtacgtggaacctagcaaccacttttaaagttgcatttgctgatgtccctccctgtccattcgccctacaagactaagtatctttaagaatcaaactaacgggctttcatcagtttttcccactgacaaaaatcatgtgattggtctctccaccattcgactaagtgaatcacccaattaaaaaaaaaaaaaaccgcacactacaatcttgctctaagacaagagacatttaacaattaattatgcgaaaagcacagaaggtactgttaggccttactctgagaattcactcttgcacattgcttacaatgtaaaattttaaccacctagaagttactagaacatagtggacatctctcctcaagagtttgacaagccggagaggatgatgagcttaacactttacttcctcctctctgccacatcaatctgccgggggatcaagtcctgttccagtttatggttcccaagaatggctggaaaagctatgtatggaacctcttgacagatttcttccactaagggtaaaaatcggcgggttctgatgtgacaagccatgggaaataggaaaagaaaagcgtcagttaaaaaaataataataataaaaggcaatcccagaatgggatcctttggaagaaagtgggctcattcttccaccagggctcctggaaatcccagaagctaaatcaggtaaaatgtcccggtaacctctgggaggcgggacatgactgctaaaccaaggttgcaggcccgtcaggggtgtgacctagtggccaagcgggtagtgacaaacttcgggtacccccaaggagggaaccccgcttgagtcaccacagcccagtatgagtgggtgagggcaagtctggtccagtcaccctggggaccacagcccacgccgggctcccggggccgggcagaagcggcgggggtggggctggcccggctcacctttgaagaagcgcagtgccaggccgtacaactcctccaggccgaaaccccagcgctgctccagccgccgcgcctcctccgccgcgcccccagccgccgcctccccgggctcgggctgctcccctgaggcgcccgggccgcgaccggatccaggtggcgagggcggtggcagcggtggcggcagcagcggggcgccctccgccccaggccgctcctccgggtccgggctgagcgtgaggccgtcgacggacacctcgagtcgctctgcgttcagcaccgccgccatctccggctgctgcacctcctcagcggggacagacggcagccacgtatcgacttcctgctgacctctgacctccgcttaccgacaccggaacttccgctgctgaggaggctggagggctccgggagaggggctgaggcctggcgccccaccccctccggaatcgtcagttgccctggctcagcgaccacccttcaggctccccaactcccgttggtcccgaactcccctcccccgcaccccatcctttcggatcccagttgctccaggtgggcgggtgctaccacccccaccgctcggttcggtgctgcggctgtcagtgcccagcaggggcggggtcagtggagccccgcgcgggggtcggagtagggaggattgacgaggtcggccagcacccaaccctccaggtcagaggcccttcacatttgcaggggcctgcgtggttggcagagctcttttgcccaccaccatctcgtttggccttcacagcaactctaaggaaatgcagggcaaattcccaatttttttaaaaggggaaactgagactgcagagaaattcagtgactttgaggttgcagacggggctgatcctggttttgcaggaagcgcagctcatacaatttgtggggaccctcattaggaaagagtacaaaaagttacgcgcagaagggtaggaaagtgaatgtatatttagaaagagaaagaaaaaacaaatgatattttaaaagttaataaaacccacaaacatcacacacataaccgtaatattttcattgactgcctgatattcttctacagggcgtctgagagcccagaaacctatttttttctaaaagattgaagtcgcccccgacattatgtatattcacctgtgtttccagactttgggagcaccatttatgatcatttttcccacctttgttttggctgcgtacttctgattgccttttcctataacaattattttgtaactttttttttttttttttttttttgttttttgcagacagtcctgctgtgccacccaggctggagtgtagtggtgcaattcggttcactgcaacctctgcctcccgggttcaagcaactctcctgcctcagcctcccaagtagttgggattacaggtgctcaccaccacgcccggctaatttttgtaaa

SEQ ID NO: 4721 - DNA, 6000 bp, Homo sapiens
gccagttacgtaacccgtctgtgcctcgatgagataggactatttcaggtacttcatagtgttgccccattttatagaatagaggaacgaggggcgatgtgtggacaatctcagcacgatgcccggtccacagcaagtgcccagacagcgttcatcggcgctatggttactgttgtgactctgggagtaaaggccaggccagagaccggaatctctgcctctgcccccagacactagggagcaacaggaaactgaggcccaggggccagctggcctacgtgacccaggcccacagccaggaatcccacccgacttcccctggctgggcttccttgggcctggctctctagcttccagctccttcctccactttgaaggttctttgagctgagaactaaagccccaggagcttttccctcttccatcccgcaagctccatctgtgtctccaaagagccaagtcccagccactgtggatgaggctcgggacttagaaggcctcagtttgagttccagctccaaccctgaggagctctgtgactttgggggagtcacttcacctctccaagcctatgtcctctataatataggaacaataccacctgtttttaaatggtaaactctgggggaatgctattagttaccatctttcaggcctagttcagcagtctcctcctccaggaagcctttcttggcttccttaaaagttccctccttccagcctcttggtattcaggggctgcattctggcccctttgggaacttggactcattttgcctcacgcagactctatctacaaattccaacccccattttgcaggcccagagatgtacaaaggtggggcagctcaagccctcttgcagggtggtgtgccaaagagggtggtcaggggtaaggcacggagactgctcagggaggagcagattttgttatcccagcacctatcacccctccatcccaggtttaataaagagctcctcagggacgagccaacagctctctctcctgcagggagaacagttcaaagaaattcagtctgggcaggtggcctagaatgcgggaagggctgaggaaagaacattttccagcacctggccccaacacagccacgtaagccccactccgtttcttcagtttccctttatggctaccaggagtccgtttctaaaggccgtggaggtgggaacactcatccatccgttcccttcttgccagccctgtgtgtctatgtgcacagccagcgttggagggacagctgcccctgtttggcagatgaggaaacaagctcagaaaagccaagccatgtgtgattactacttggtactatcagcagcgccgccaccctttccactccaagcttgacgtcattcacttttgtttaataactccctgcctatgactctaccccatgcatctcagagccatgcaggagcccagcttggccattggagctctcttggcccacctgagcgtcactcagcacccagctactttactcctccatctcgtccaaagcctcacatggagctgaaacgcaccaggcctaacatttaaagcccgtctttccagctcctagatcacactcctggtgctttccgcaccacactccccacctcagcagacagtgccctgaactcgaggcaggcagagatcctgaccaagttctgtcatcctgagctgtgtgaccttgcataagtcactcaacttctctgaggaggcatccttatctagaaagtagaatgacaagaaaatttctgcttttcacagccatcctcacaaggacagttgttataaagagccagggagataaggcataaccagcccagacacgcagtttctattccttgcctcgtcctcagtactcccactctaaggagaccacagaacaactcccagtgaggaaactcactgcaatattttaccaaggcacagccattttcataacctcaacagcactgggaaatggtccagggtcatgattagactaagaactctagagttagatgcttaagttcaggctcctacttaacaactcagtagctgctaagcaggtaacttcacagttcagtgcctcagtttttgttggtttgtttgttttgttttttaatctctaaaataggactgttatgaagattaaaggagtttatacaagataagtacttactgcagtgcttggcacagttaatggtcagcacacattagtctcattacttccaatttcgcttctagaactggtcctcaaaacagtccaatgatgttgctggggcaggaattatgtgaacccaagtggtcaggtgaggaaactgaggcaggagggaaagatgtgctagagacatagactcagtcagtctagttctgccacgcacaagacacaaagccaactttgggttaggtctgaaagtgaacgggagggtgactggcaaacagtcaaaaaccaaaacgattcaacagagagggtgcctgtccaagtgtcccgtgacccttcctgtgcagtgtggggctgtgggcctgtccacctgtcgccctcctccctcagaccccgtcagtgctccctggctggcagggctggcctgtcttggagggcgccccagcgcctggcacgcagcagatgctcccgaatgatgaatgaatgactgcccgggtctatgtctctaggagagccctgtttttctgttcccggagctacatttcttccaccgtgacaactgcctgctaactagctcccggtcccgcagacactctgaaaccctgtgcactctgagaagaaacttctaaatcagtcgcgcacgcccagcaaaggcggccggcagccgtttcacgcgtggcctcgggcttctcgggccccttccaggaaacaaactctccctcctggtaccctccttcctggtgtgccacatgactcagagccgggcagggctagcaggaaagcgcggtctgctaaccagggtggctcaaaaaggtcttcactgtgactcggcagaaaagcggcgcccgagccccgcctgcacctaccaccctaaggatatgcgcgggggtgtggccggggcggggccggggcagggcagggcggtgcccccgcgcccagggaacccgaatactacacatccgtctgctccgcgattggccgctccggccacgggggcctatggggtggtcctcgcccagccaatcaggggccctggggagcccattcattcacaaaaactgagcaggaaaaggagcgcagtgcggcccggagctgcgtggaactttgaaacacgcgcgcgtcccgcggggccgaggcaagagtccgagagggccgtgtttcgggaagctagacctttgcagggactgccgcgtccccgcccacagctccggttcagtctccccagcatggtgcgccttcctcctccggcacactgcccggggctccgccccggccccaccaggacacgccagctttcctgcccgctccgggtcgctaagagccacccggccccgagggaggcggtgcccaggcggtttcccggtcgcaggctccggcggcaagtcccgcgcaggtggcagcgcggcggctgcagccacgtgcgcgccaagcatggtgccccccaccgttccttttctctccccgggtctgagctccctggcccgccactcacggcagtcgtcctcgtcgctgtggtctaagcagtcatcgtcctcgtcgcatctccacacagaggggatgcagcgctcgttccggcactggaattggtccttttcgcaatccttggccggccctgcgagggggagggagcgtgagctggatcagcggactcggccccactccccaccatgcagtccgggccacccggaaggacccgctggggaggaggaaagggggcgattatggagaccccgggggcttcaggcacactccatccaaagggagggcacgatggcaggggttccgtggatgtcgggccgctcggtggcacggcgagaccaggcacctacttaaagtgtcacacgacctgggtataccctccattcagacgcactcacccgcacacgcgacccatagtcagagatctgctcagatacagcccatagggagtccccgcgcccgcgcgccaggcgcagtgggagccgcaggcacatcaccctggcaggcagccccctctctctccgccgcgcgcaggggtctgcggaaacgcattgtcaagcggagaagccgcccggctctgctcattaccgccgcggagcgcgcgtgtcaaataaaccccaacggcgagaatcacacagctcatccggaaccatgaatggccgcccctccggcaaagttccccgctggccaagcccccctgcacccctcccccaagatccgctgcccagagggcagagccctcaacaccgaggcccgcgggggcggggggccgagggcaaattcaggaatagccgcttcgcgtggagcctgtccgcccgggagcccccgatagccccgggttctggacccctccccgctccggcctcccggccgcgctttgttggtggctagggcggagcagagccgagtcagagaccggctgcacgcaccttggccgccgagcagcggatcagccgctgccgccgcaagatgctggagctgcagcagcagcagcagcagcagcagcagcagcagcgccagaagccggagagggcccggctcggggaggcccatggcgggcccggggctccggccgccgcgccccgcgctccccgcgccgccgccgccgcgtctcagccctccgagtccttgccgcggcgccggggttgccgctgcccccgccgccgccgccgccgccgctgccgcccgccccggctcctcggctgcatttcaagcaggttcggtgacgctcggcggcggggcgggctcaggctgggcgcgcggccccggccctgggcggccgccgccagcgcgcgcgctccctcccgctgccgcctccgccccacgctccccctgccgccgcctcctcgccctcctccctcctgtctttcgtccactcttctctcagcgggcgctccacggccctgctctgggctcgcctgagtgctgggctctgcagacgcagggatgggccaggcgagcccctcaccacggaggtagcaggtccagaggaagcagcagaggcttcctggaggaggtgacaggcggatcagaggctgagggatgtctaggagtgagcctgggcgggaggggaaatgatgttacaggacgaacaggcctgtgcagtgtgcgcgtggggcgggggagggagggataggggtgagatcccaagatgtggatgagcagggagaagctgggggcgcagggctggacccctgcacctgtcatgggctccggctgggatattataaatccctgtggctggtttggtttccgtgccatgtgcatctgtgcatgttgcacgctcatgtgatcatggggacgtgaggcaggtggattgggcctggtgcacagactattcatcgtcgttaagtacgctccaggcccctagtcagaggggcaaccagggggggcccgcagggaagacaaggaatcctcgctgtgatggagaaagacgaggtctgtggggcgggccgggcgggggggaaggggagggcacggaagggatgccatccctgccgctaggggccgcgcacctaggcccgcgctgtccgcccctgctgtcttctgcaggaaggagaaggcacctcttcctctggagggctgcagcccgcctcacccacactggggagaatgggtgcggagagcgagctgggattcgatttcagcctcagacttgtgagccgggtccaacccacacaaccttctttagagaatgagattccagggcattggccactcaaaacaaccggcctgcaggtgccaagagccagtgttaggtccaccctccctcccctcttgccccttcacctccctcgcggatgggcaggtgctgttagcccttggcctggaaaccaccctgtctcctcagcagcctcctgagccgtagtccccc

SEQ ID NO: 4722 - DNA, 6000 bp, Homo sapiens
taaaaggtctattggtaactaagctaacggtatatttatattgtttgttaaacgtgttcaaaattgaaaataaggaatcatcataattcagaaatcccttaccaggtactttccatgatgtggaaagtcagggaaaaacactgtcaatttattatcaggaaattagaaaattcttagaatcctgacattagcaaagtcaataaactaaatgagttacagtgaaataacccagaactccactacattccattatatagtcccttactttaaaaaaaattctaagcaaaatggaatatttatctatgtttttaaggtgggaaataaaattataggaaagcaaaagccatcaccataagctggtaagtaatgctgccttttgagaaggaaaaagttgattttaaaagactaagatatatgaaaattttaatagaaaaacatgtgattgatagaagtatttttcttcactaaggaattactttacaaacatctgctgtgaaatatcacactgaagtagaaccaaataaatgtctggtattgtcttaaacatttcttcaacaaatatttactttgttaacacaaagacattaacctttagagttacctgagtgtcttctatgtctaagggaaaaatggttgcaacagctttggtaagaaatactactgaaattaaatctgttaaaaatgaagtaaaaatgtaagaacataaaaacacagaaactatattgagatactagaaaaaaccagtgtgatgttttttggacatcaaacttggacaataggtgctgtaggctctgctgctcacttgggaagtaaaaaactctaggcctcaattttccaactatagaagatgacaggttagtttgtctctctctctctctctctcaagtcccacttccaaaacctacactatccacatattctctttcttccttagtaaaaaatccttgactttccgcagaatacatggctgagtggaataaagactacatttgcaactaggcatgaccatgtgataaaattttagtgaaagcattgtgtgttagcatccaggtaaatcttaaaaaaaaaaaaaatgtgcacaccttttacctctttttatctgcattccagacattatgctgccagggatgactgaaacactagcacccatcttggaaatgaagttttatcttgtgtaagcaaccattattttaggtttttgttttgttttgaaacagagtattactctgttgcccaggctgtggggcggtggctcaatctcggctcactgcaacctctgcctcccaggttcaagggatgctggtgtctcagcctccatgtagctgagattacaggtgtgcagagtttttctgtaacttgaaaacaaacttaaccgtagatgatacaaaaccacattgttacactatgttaccttgagattagtcagttactcaacaataaattagtaaatgaaaaataaaatactagaaggaagggaaaaatcacatagaatttctaccattttcctcccaatttctaagagtgagagaatggaatttaatgttttgtcattgctgtttttccttaacggggtagttaccatttttagtataggtagtgtaattccatacattaattattccctcattctttcatttagcaaatatgtattaagcatccactatgtgctatgtactgaagtgcctgcataagatagaaaagatccctacattaatacagtttacgttctagtgggaaggtgaaaggtagcagatatttattgaggggaaaaacacacaacaactacctattgttccactgaagagacctactcatcatctaaaatataaatcaactataattaagttcttcctttaaaatgaaggctctgaaaaagaaccagaacaatttaacatttgttaaaattagatcaactgcttctatgaacctttatttgtgaagtgagtgttttattcacgtttcagtcctctataggaaaaaaattcttggttatttcatgttctcaacaagttgaaatttatttttacagaatgaaattcaacaaggaattgactaatacacaaaatgagttttggaagaaatttaatcaaggaactgaaaagctaatataacctacaggaacacagataatcttctggtcatataaagaaattattgatcagtcaacaaaaggaactaaaaattttggtgtctaaataaaacacagaaagccagattattaaaaggccagagaaatgcctaaatctgcccaaatatcaatgacaagagatctgtattaaaaattaatatttaagaataattggttgtagatctggagattaacataaataggcatgagatgacggatacgtgctaaatgaactaagtacaacatgcactggagctagatttcaaatctagctagaagacataacacaatgaaaaacagtatataagctgcactagtaaagaaaagcaagtcccctaagggtaaaagaacaagtcgactacaactaatgtttttgttatgcactgatgcatactgacttaaaaaataatggttctggtaatctccccaacagatctctacagatcaaaagagttactatatacttaactttccatgaaaggtggtttaggaacttcaagtgtgaatctcttgaatgagatatttcacagagtgacttatgtaatggaaagccatagtgaaacactgcaatagaaactatctgtagcaaaatatgcatatataagctatgatacactcttgatacaaaatatgcatatacaagctatgatacactcttgatacaaaatatgcatatataagctatgatacactcctgatacaatcagcacatatcccaaaattaatttggcataatttaggaagagaaaaatgtaaaatatactgtaaatattatatatttatgataaagtatgattattcaagtacaagtgctttcaacatctacagtatattaaagtgtgttaatactatgggattaaaaaattaatctatgatggggtatccttcaaattaacacatctgattcccaaaggattcaaaatggttattacatatattaagatttcattgtgccaatatgcctttatacccaactgttgactaaaccaataaccttcataatctgctggttattgagtattttttatagaactgaattgacggttgaattgaaagaagcccaagcattatataaaagtatacatgtcacaaaacctggtgatattacctgtcaatgtttgatctcaacagaagatcaaggacagcgattttctctgaaaatgggtcttaaacaacagagactaagtctatttaataaatagaaaacaggttcttaatctagagtccaagatttagtacagggaacccaacaacatcctgaagctttatgtacaattctgagtattggctttcatcagatttttgaaggagtatgggatctaaagacagaattagtacacctaggagtgtgacagtcttgttagcagaacaacttcataagaccttaagttactcaacagcaaatacctgaataatagtaacttcactgccacagagttacacactagattttcctcctcctaaggatgtttcaaaaaaaacaaaaaccctcaaaggtgccaccaaaacccaagaaatgttgtttctagaaactatatgggatttttacatcgcagttaagactacaggaaaatcatgagacagtttcggcattaaagagagaagagaatgacacatattcctcccgatatcactttataaaacctcccattccaagccccaataacaaactaagtagaacatctcagatatactctctcagaatcttaagggtgaaatccaaatgccactcccccccgagagaggcagcaaacaagtttctcccaattccaacaaagtgggtaaacctaaggcctacaattagaaatgaaagattctgcccatctgctaaaataaggaggggcttgtcagtcttgtctgatggaactggaggggagcgtgacaagagaggttgcacaggataggcccagatcttactcaagaactgtagccctaccagattggtgtgggtatgagaaagcaactcagcagcagaggtaggtaacaaaggtaggacctgaacctcctagtgaggagctacgtggcattaagcaaacagtgcttcgtctccctcacacccagcttccgcccaaaccattttcccctttggttaccagttgctccagatgccgtagagtagttccacaaaagcgaaagagaggttcaggcacaggaagaaaaacaggttccgggaagtcttgtcggacagtatagacctgggaatgatacacgtggaaaagagccgggagagttaaggaggtgccgggaccccgaggctgggtaccctcttcaagaccctcccagttcacatgctcctttcttcacagctaggggttgacggggagtttttgactctccctcactggacctcgggccatcctgaggtctgggccttctccctttctgccggacaccccctccccgcaaacacagcaccccgcacctaaaccagcccgagatcttgccgaacaaattgaacttgggtggtttgtattcatcgtctttgatggacaggggcaacatcttctctgcccggcgaagggccgggtctactcccctctagaagtggctccgtggggtgatggcagtgacagtagtgacgcctcaaacgggaatccccagcgcttgtccggggccgcgcgccgctgcgagacacagacagacacagacacacacccgggaattcgcttacttccggcccgggccgcgcaacgcgtcctgggacaggaaaggagggaggccggtcgcgggcggggcctgcgcggcggagggcgtggcttgcggcgggggcgggatgagaaaggtgctggagctgttggagggacgccaggaggtggcaactaccagggggtgtgaggggctgacctgggatggaatcctgccacccggactcaggaagaaaatcctgaggtggcgacctgcagactgggctgggagatggagagcccgctcacgcccacccgaccgcctaccaccagtgttcccggatgcatgggctccagcgcctgccctttcgccatttcctcccaactggcattaaatcctggtgtggtagatatcagtgattaagagtctaggcagccacgtgttctattgccgccagtccgcaggaaacgcaagtgatcgttttgctgcgttaactctatgggcgcccaaatcttaggaatccattccacgccaccccgaaaacagcgcttgacccttctggactgccacgcaggaggcgatcaatgtttttctttctttatttttttaagagacaaggtctcgccctgtcacctaggctggagcacaatgaggctcactacagcctggaactcccggacgcaagtgatcctcctcagcctccggagtagctgagacctcaggcgtgcgccaccatgcctggcatcaatcaatgtctttcaaaataaaggctgttaaacgtagtataggaaagaagctttttaatggtaggttctaccagacgtgtttgtttgatttttaggtttggttaatgcattgtttcccgtacaatctcaacccgcggaaaccccgaaactctagaattcgtgccggtctctttcgcttccaggtcatccccggggcaacggccgccgctctaattcttgtcagaacctccaggccagtttcagcaacgtgcaggcagaagctggcccctcggtgggatgcgagggcgtgtggagcgcggggaggagagccccacaggcctttcctgggcacccgcggtggatgggaaggctccttcgggcgcctttcagggaagttgtttggctgagggaaggtggtccgtcacgtgaatgtttaaaagttgttaccttggagaagaaatggaggaaaggattggctttcggaggtgggctggaaactacaaaaccgagcttcctgggaat

SEQ ID NO: 4723 - DNA, 6000 bp, Homo sapiens
tatcagcatttaagtgttgttaactttatgtaatggcatttaggttaaggattagtatgcttctggttgtataaaggatagctgtattgttaggcataattatgaccgtattattgtttttatgtaagcatgcaatgggttcaccttgcctgctacctagaccgaacgaatttatcaagacaggggaattgcaaaaaagaaagagtaatctatgcagagctggttgtgcgggagaccagagttttagtgttactcaaatcagcctcctggaaaactcagggatcagagtttttaaggataatctgttgggtaaggggccagtgagttgggagtgctgattggttggcttgtggatgaaatcttagggagtcaaaactgtccttttatgctgactcagctccagggtgggggccacagaactggttggcaggtccaggtggggccatccagttatcagaaatgcaaaaacctgaaaagacatctcaaaaggccaatcttagtttcacaatagtgatgttatcttcaagagtaactggaaaagttgcaaatcttatgacctctggaataatggctggtaatatttagaattccagcccctctcatcctaacttggtgcctggtggcctttcaatcattttacaacaacagtttagcttttgggaagggctattatttaaactataaactaaattccttcccaaggctagtttggcttacattcaggaatggacgtttagaggttagaagcaagacggagttggttaggtctgatatctttcactgtcataatttcctcagttataatttttgcaaaggcagtttcatttatttggagattaggtatgatttcaagaaatgtgtatgggttcaagttgacaagggatggacttgtgaaggttaatattgtcaacttgattgaattaaaagatgcaaagtattgtttctaggtgtatttgggtgtttctgggtgttgccagcagagattaacatttgagtcagtggactaggacaggaagacccactctcaggaagacccactcacaatgtgggtgggcaccatccaattggctgccagcctggctacgaaaagcaggcagaaggtgggagaagctgacttgctgagtatttgggcttcatctttctcctgtactggatgcttcttgccctcgaacatcaggctccaagttctttgactgttagactcttagacttacaccagtggtttgtcaggggctctcaggtctttggccacagactgaaggcggcagtgtcggcttccctacctttgaggttttgggactctgattgagccactactggctttgttgctcctcaacttgcagatggcctattgtaggacttcacattgtgattgtttgagtcagttctttttaataaactcattttcatatacgcatctatcctaccagaactatcctagttctgtccctccagagaaccctaatataaggatccagaagcaaaataaatgcacacgatcccaactatctaatgttacacatttgaaaccagaggatgtatgccatggagcaaaacatttgaacatgtcagcaatttgcacttgtatccagtttctagatttatatgaatttgtattcttatgtacctttacaactccttttttaaccagcagttcccagggcgctcaatttgaagcatctaaaagggtcaaacagggttgcagataaatgccagggttgattactgaggaatgacagatagcatctttcctattccttgctgaccattgcccaaaaggagctgaaaccatgactgaaatgagcttctgccccttaattctctctgctttcatttctcagaatcctcagtcacacgtctgagcagctggggtttttccacccatagagtctgcatagctaacctaatgcaattagttggtaggagagatataaaaacatatttaaaagttcagggtagaaatccattttttagtttaaaaatgttcaatagtatatgtattttatgatcttataaaccgatttaatcttgtaacatacaaaggaattaagaattctgattggtgacttgcaagataccatttgaacagagttgaagaatcatttttgattttccaatacgacatattgaaagggcaaaaggaatggcttagtatttatggaaagacttactgagtgacagctgtcccttcacactgctccaagggcatcccttgtgtaaattttaaacatcacagagttctaaaagacgagactgatttgcctgtcacaacccccccctttcttcataactactcttttccataaaattcctccagggaaggaactttttatttatctggctttgtatccccagcacccagcacagagcctggcacatagaagacattcattaaatgactgttgaatgaatgaaagaaacaaatttgatatgacaacaaagataggttaacatatatgggacaaacattatttgacaatgacaaaagaagtgaggcacagcctgacgtttttcactcatagaacttttcctgatttaaatagtgtccacctacacttttatattgcaaataaaatgcctttagttttaaatttggtcattatgctctttaagactgaaagatgtgaagacatcaccatcactttttgaaaggagaaggtcctcatgggaatacctatcatatatcttgggggatggggagtgggggaatttgggagtctctggaaactgatgtaactgaaattaaacttcaatttctcgtacccatttcaaaactatttgaaaagaggtaatgtaggtttctccataaaccacttaagcgatttctgatttgtagcaatacagtataaaatataggacttattttcaaaggcagaatacaaaaaagttcaaaatgcagctgaccttgatgagttaggattatgctggaaatcagttgctgaaatttaattatttctattacttctcccgccttctcccaagttaaatcatattgaataagggcgttttggagaaaaatccaattaccatagaattatttatctttaaactatctagtttgcacccaattaatttttcctcagcagtgcagtagagtaaaattcaaggtctactgctaatacaaaaacttccttccaaaaaaagagtaaatgctactaattttaaatatttctacacttaaattaaaagaatgaaatatacgctaacaaaggcaaatacaaaatactcttcccagaacttacttctgaaacctagctgtttttacacagcagttttaattaacatttttcaaaattgtagaataagtacatattttcaaaaataaaaccaccgaatactccatacacacacacaaagttctcagaacgagagcaaaacatgcatatatcctcactacaaaaagaaaaatactaatactggagcattttgctgtgtctccttacctcgagtgcagtagattgcagtagggccagccgatttatttccctgcagcttagttatcataaaacggaaggggcgtctcgtttgctcatttttgtttttttttctaaaccaagtagcgtgcatctatccttctccattagctggattaacaacctggaaaaagtgccgcccgcaaagtgagcgcctggagcaagggacagtccccgagtggccgcccctccctttcggtgacgctccacttcctgtcggcctaaaaggcattcccaggaagctcggttttgtagtttccagcccacctccgaaagccaatcctttcctccatttcttctccaaggtaacaacttttaaacattcacgtgacggaccaccttccctcagccaaacaacttccctgaaaggcgcccgaaggagccttcccatccaccgcgggtgcccaggaaaggcctgtggggctctcctccccgcgctccacacgccctcgcatcccaccgaggggccagcttctgcctgcacgttgctgaaactggcctggaggttctgacaagaattagagcggcggccgttgccccggggatgacctggaagcgaaagagaccggcacgaattctagagtttcggggtttccgcgggttgagattgtacgggaaacaatgcattaaccaaacctaaaaatcaaacaaacacgtctggtagaacctaccattaaaaagcttctttcctatactacgtttaacagcctttattttgaaagacattgattgatgccaggcatggtggcgcacgcctgaggtctcagctactccggaggctgaggaggatcacttgcgtccgggagttccaggctgtagtgagcctcattgtgctccagcctaggtgacagggcgagaccttgtctcttaaaaaaataaagaaagaaaaacattgatcgcctcctgcgtggcagtccagaagggtcaagcgctgttttcggggtggcgtggaatggattcctaagatttgggcgcccatagagttaacgcagcaaaacgatcacttgcgtttcctgcggactggcggcaatagaacacgtggctgcctagactcttaatcactgatatctaccacaccaggatttaatgccagttgggaggaaatggcgaaagggcaggcgctggagcccatgcatccgggaacactggtggtaggcggtcgggtgggcgtgagcgggctctccatctcccagcccagtctgcaggtcgccacctcaggattttcttcctgagtccgggtggcaggattccatcccaggtcagcccctcacaccccctggtagttgccacctcctggcgtccctccaacagctccagcacctttctcatcccgcccccgccgcaagccacgccctccgccgcgcaggccccgcccgcgaccggcctccctcctttcctgtcccaggacgcgttgcgcggcccgggccggaagtaagcgaattcccgggtgtgtgtctgtgtctgtctgtgtctcgcagcggcgcgcggccccggacaagcgctggggattcccgtttgaggcgtcactactgtcactgccatcaccccacggagccacttctagaggggagtagacccggcccttcgccgggcagagaagatgttgcccctgtccatcaaagacgatgaatacaaaccacccaagttcaatttgttcggcaagatctcgggctggtttaggtgcggggtgctgtgtttgcggggagggggtgtccggcagaaagggagaaggcccagacctcaggatggcccgaggtccagtgagggagagtcaaaaactccccgtcaacccctagctgtgaagaaaggagcatgtgaactgggagggtcttgaagagggtacccagcctcggggtcccggcacctccttaactctcccggctcttttccacgtgtatcattcccaggtctatactgtccgacaagacttcccggaacctgtttttcttcctgtgcctgaacctctctttcgcttttgtggaactactctacggcatctggagcaactggtaaccaaaggggaaaatggtttgggcggaagctgggtgtgagggagacgaagcactgtttgcttaatgccacgtagctcctcactaggaggttcaggtcctacctttgttacctacctctgctgctgagttgctttctcatacccacaccaatctggtagggctacagttcttgagtaagatctgggcctatcctgtgcaacctctcttgtcacgctcccctccagttccatcagacaagactgacaagcccctccttattttagcagatgggcagaatctttcatttctaattgtaggccttaggtttacccactttgttggaattgggagaaacttgtttgctgcctctctcgggggggagtggcatttggatttcacccttaagattctgagagagtatatctgagatgttctacttagtttgttattggggcttggaatgggaggttttataaagtgatatcgggaggaatatgtgtcattctcttctctctttaatgccgaaactgtctcat

SEQ ID NO: 4724 - DNA, 6000 bp, Homo sapiens
gttagctgggcctggtggtgggcgcctgtaatcccagctacgcgggaggctgaggcaggagaatcgcttgaacccagtaggtggagattgtagtgagctgagatcctgccattgtactctccagcctgggcaacaagagtgaaacactgtctcaaaaaaaaaaaaaaaaaaaaaaaaagtggagagtaagaaggctgcgaggagagctcacacatccttggtttgtatgaagaaaaggacagtaccctctaccagggccatcccctcattgacaaacaggaagagaaggacagtaccctcaaccaggccccccaaccttgagacctcatctctatatttttttaattttaattatttatttatttgtttgagacggagtctcactctgtcacccaggctggagtgcaatggcgcgatcttggctcactgcaacctccgcctcccaggttcaagcgattctcctgcctccgcctcctgaatagctgggattacagatgcccaccaccacacccggctaattttttgtatttttagtagacctggggtttcaccttgttggccaagctggtctcgagctcctgacattgtgatccacccacctcagcctcccaaagtgctgggattacaggcgtgagccactacacccggctatttatttttttgagatgaagtctagctctgtcgtccaggctagagtacagtgacacgatcttgtgtcactgcaatctccacctcctggactcaagcgattctcctgcctcagcctcctcagtagctgggactacaggtgtgcaccaccatgcccagctaatttttgtatttttagtagagacagggtttcaccatattggccaggctggtctcgaactcctgacctcaagtgatctgccacctcggcctctcaaagtgctgagattacaggcatgagccactgcacccagccttgtctctattttgaaaaaatatatctatttttaagttgtacatttggttacagggggtgttcaaccagagaccaaaacagctacctgaccagattgccacaggagtggctgcaatgggtgcattgatctagatgacacctgaaagccttcttgttccatatggttatatatgtctctgaaatcggcttccatctgctgaccagctgaggtaaggtgcaagagagaaggtggacttatctccccagggcacacatttgggccagtgtagaatccggaaagctcctgaccctggctctccagacattcagatgcctaggttctctagcaccatcccctctcccatgccccaccctctgccccaacttaccgggagacggcaaagagaccagtgagcagagggagcagtttgagggtatcctggggcaggtaagtggaaagcacggccaggttgaagaagtagagaataaagagctggaccgactgggccacatatcgccggtggatctccacctcccgccgtggctccccaaagggccgaagggcagaaaagcataacaggctcagcccgtacaccaggatccctgggtggagttgggaaacagggtagggtcagaaaaggcaggggaagggcacaagaggcagtaagctgggggcagattcactgtgggcagtgcatgggctctacacagtggggtggaggtggtcctgggaggagatgggcatgcagactggcagggggtgggagaccctgaggggcccaggtcaagtgaagggaaatcctcctgctccccacaccagccaggccctgccctcctcaagtccacttcccgatgccccctttcttctcacaggctcacccagcacaatggggaaggtggcaaagaccccgcagcgcagtgtgtagatcaggcgggaactcatggtgggcagccgtgggacatcaaacggcaggaaggcatatgccccgtatagtaggcaagggaagagaatgagtgcggctcccacggaggccacagcccttagccactcacggtctccacagctcccgcagcccccacaggaacagccaggcggcctcaccactgcctcagcccacttgcgctcagtggggtcggggtgggtgacccgggggggcatgaaggttcggcactcgccctcgcctgcctcacagcgcacgataaggtcttcttggggctgccgctcaatgcactgtaggtcaataggcacgaaggcacgggccgctttctcaggcagcaggttggcatcgtcttcgggcagctcctctagcttggtaagtggttctgactcagggggctctggttcaatgtcccgccagccagggggatccgggaacggagcactgggctgagggccagtcccccagggcaaggtggcagcctcacttactgtgctgtctagaccatcctcagccccctctatggctgtgggagatccagctgaagaccccactctgagggactcagctcccggggattcggccccaccttccccttctggctgccggccattgggaaccaaggcctggggtgagctcttctctggggaatcagacctcttcacttccagtagggccagggtctcctgttctgtcatcctggggcctcagttctgggatctaccacaaggtcatgtcatcctgcagggaacagaggaaagctctgtcagaaacccctgtcttctagttattaggacaggttgacagaactcatactctccagggcaactggcttcatgggttttggccccttctggagccttagggagaacgtggtacagaggaagacactgaaacagagggaggagggaaggaagtgagcagctgaaatggaggcaccctttcgacatcaaatgccgtccaacaggagagggtgagtcaagggacacaggccctggcagctgtgaactcagtcagcctccacccacgccttctatgcccctccaccaaaacccctggagtcatggccactctaatgcaggaataggaggcagaagaggtgtctagaactttgccaagtttctttcccactgaggatcttgctgtagacagagaagcttcctctccactgtcccatccctacacatccctgcttggaaccctcctgcattccaagtgagaccagtgatttgccaactgatctgacccaaagagctggcagttccaggcaccctcttccttcactggtacttggtcagttcccaaactcctcactagcccacctcatccatctctgcagggcctgggtctgctattctgatatttaggtctgatcatggctgttttctatgccttctctcctgtctttctctcctccctgctgccctccatctcattgcttctggatgggactgattcccttcctttatctcaagggcactccaaaccttgcagtttggacccatgacatcctcttactttccatatggagtggagggtccccagcgtctgtccatccgtccgtccgggaaggagctgcccagctacctgctggctctgcaagtatttctctctgtctccctccctttacctgtgtctcaaaacctgtctgaccagagcaggtggggcccagcttaaaggggcaggccccgccctgctgaatctgccgacaaaaaaaagcatcagaggaggatgtcatcctttctgaaagttgggatgcagctgggcaaaggggtaagttcacattctaggcacctggaatgcgtaagaactcccagctcaggaaagcagagggagaaaagtggatttgtgcaacaaagggtgctcggagtaggctgggatacccagaaatggaatttgtacacttattcattcagtaaatacttactggacaccaattattagctaggcagacacagaagagaacaagatgacagttgaggtctctgcccttgagaagcttatgttctattggggtaacataatgaagaagcctagcaactaaatcaattagacaattttaataggaaagacctctttggtaaggtaatatttgagctgaaacctgatgggaaatcaggagtatgagtgttacagacagaggaacagcaagtgaaagaccaatggatgggaaagacttaggctgtttcaggaacagaaagaaggtgggtggctgcagccaggagcatagtggtagaagggcaatttatgttctcattacaattcatacacaggcaaaaacaacaacaacaaaacaaaccacccttgctttttaacttaggttttaagctaaaacaagacaaagcagtcacgctcctagctgtaagcccacctgccctgatttccaatgtgaggattaggagatagaaacgttagggactagcttctcatttctatgagtccttatccctaaaatcatttgagctttgggagggcagggatagtgtctagcttgctcacctctgtgtgtctagaatcttgcactgtggctggaagatggcagttcaataaatgttactggctcgtaagagatagatatgcaagctggaaatctttgggaggggagctgaagggccgagacgcttgtacaagtcatttcttccggggctttactcctatgtgatgctcggccctttccaaggaaactttcacatgcactttttgtttgtttaaattatgggggaaaagggaaagctggagtcactctaaccagtaatctgaaagaggcttggctcaaacggggaggcgggaaaggggcagaaggatggaccaaatgaccattgtaggacaaagcagtcacgctcctagctgtaagctcacctgccctgatccagttaagctttggccgcctcagtgggtacactgtccgttctctgatagctttgccaataaagtttttcgcaagggtttggagaagccggaaagacgccatgctgcccagagttagttctggcaacttcccgggagggaaaacgagtttcgcgagatttggtagcagcaggccactggtccgcaactgtgcggctgccatcgcgagatttggcaggcggaggaggagctgtcgcgggcagccgcctcacagcgatggcggccgagcagggccggtggcggcggcggctgcggctacggccggagacggcagtgttggcggtagtggtgggtggcaggggcctgtgaccgggagctgcccccggacccgggcaccatgagccaaggcccccccacaggggagagcagcgagcccgaagcaaaagtcctccacactaagcggctttaccggtgagaggggccagggcgtgagagcagccaccgagggaagtggggagacggcgaggggcggggcctcccgggcgggcggggcccgggtgtcggggtgaggtgcgggtgaggaaggagggtgcaattttggaggcggggcggggtcccgtagtaactcgggatggaactgaaaggaggaattgggtaggtgggaggtttggagggaagcacgtggaggaatcccctctgcagtgagctttcttggggcgggcactaagcttggtggagttggggtaatagggtgggaattgaaggctggaagggttgggtaggtgaaggtggggtcacaggtgtagaaaaacccggaagggaacggtgcttggaatcctgggggatttacaaggaagagtcttggactgaagtccgtggagctaggttcaggtccatcctttgccactctctcacggtgtgaccttgggcctcagtttccttatccttaaaaagaacgatttgaattggatgtgctctaaagtcccatacggctctaattttgaggagtccgaatgagaaagtcttggcctggaagggtcacgaacgacttttgtgtccagagcgttcttgggatttgggaggcaattccgggcacctggggactcctgagtcctgccttcctcccagcctcatgactgtagtctcttgccaggcaacttccgttcctggtttctgatttccataatgccacccacgctccacaagtcacatcttcagcccttcagccctctgttggcaacaggcccgaatgagctcttcccatcaaaggtggagaatttgttgggtaggtca

SEQ ID NO: 4725 - DNA, 6000 bp, Homo sapiens
tatcccactgacttaaaaggaagggtattgacaggcactaaatttctccccatttgcaccggaacctaaaataagggctttaaaaaaggcatccaaatctacacaaaaccctaaggaagaaaacatagcaatggtcatgcaaataccaaggtagattggtcccgtttctcaaaaaacttaccaagttggctcaccaaggggagcaaagtcttaagtgaacaaattaaatcccactttggcttccccaacctaatatattcttgttaaactttaacaaagcaagtaaattcagcctgctggctcctcagtgtaaggataattattaaatgctgttaagtaaaaatgcaattgtaagaactagaaaatgctgagtcattgtctcagaatcacaaggttctaaatgtgaattcactatgagaacatatatacagatttttctctttaactttaaaaatgcaatctgaaagaaaatacatcctaatgttattagtggttatctctcaatagtagtctgtgtacttttagtttcttttttgaaaattttctccaatttttctacaatgaatatgttagctttatagttacagaaatattaatgtatggcttaaacttattacggtttcattaaatgcagaatagagcttaattttctattcagcttcaaacacaactatttttctgatgggaaacccattttatgtgaccttgtgatattgcatattggttttcatccatgattcctggtttataactcccataactcttgttacagtcttttattatactgttggggtgctttaagtctcagaagcagtccccagaaatatctctgacactctcctgcccctcctttcattcgctcctttttctccccaaggcaggactctaatcttcccctgcttttccatcttgaaggtggctgtaaagaaattctctgggccagaagggtggctcacgcctgtaagcccaacactttcacaggccaaatcgggaggacggcttggaccaggagttcgagaccagcctgagcaatataacgagacacagtctctactaaaaattttttaaaagaggccaggcgtgatggctcacatccgtaatcctggcactttgggaggccaagtcgggcagatctcttgaggtcaggagtccgagaccagcctggccaacatggcaaaaccctgtctctactaaaaatacaaaatatatatatatatattacccagtggtggtggcgcacacctgaggttgtgacgctgagccaggacaatcgcttgaacccagggaggtgaagtttgcagtgggtggagatcgcggcactgcacttcagcctgggcaacagagtaaggctctgtctcaaaaataaataaataaaataaatgaataaaaatttttaaaaaaaaaaataattgccaggcccggtggttcacgcctgtaatcccagcactttgggagtccaaggcgggtggatcgcctgaggtcaggagttcgagaccagcctggccagcatggtgaaaccccatctctactaaaaatataaaaattagacaggtgtggtggcaggcgcctgtaatcccagctacttgggaagctgaggcaagagaagcgcttgaccctgggaggcagaggttgtagtgagccaagacagcgccattgcactccagcctgggcaacagagcaagactccgtctccaaataaataaattaattaattaaaataaaataaagtaaaataattttggctaggtgcagtgactcacgcctgtaatcccagcactttgggaggccaagacaggtggatcacttgaggtcaggagttcgagaccagcctggccaatatggtaaaaccctgtctctactaaaaatacaaaaattagccaggtatggtggcacatgtctgtaatcccagctactcaggagtctgaggcaggacaatcacttgaacccgggaagtggaggttgcagtgagctgagatcacccactgcactccagcctgggcagcggagcaagactctgtctcaaaataaataaataaataaatatttaaaaaaattatctgatctcccttgtctgattgtaggtcataagacccccataagaaggggtcctgcccataccctggaggaaggaatgctacagagagaggccaagaaaaatctgaacagataggcattgctgggtttccctaccccatgcttcaattatgtctactcaatgaagtctccataaaaagcccaagaagatggggtagggagagcttctcaatatctgaacacatggaggttcctggagggtggcatgccccttctcatacctcaccctgtgcatctcttcctcttgtatcctctgtaatattcttaataataaactagtaataaacctaaataagtgttttcttgagttccgtgagctgctctagcaagttaaccaacccagaggagggagttatgggattcccaatttataggtggttagtcagaagccggggtaaaacaatctaggacttgtgattggcatcagaagtgagggcagtcttatgggatctgacactatccccaggtaaatagtttcagaatcgaactgttagatgctcagctattgcttgatgcagaactgatgggcccacacatttatttggtcacagaagtcctcagtgttgactgtagtggtgtgagagcagaggaaaaagtttgtgttttttctcttactcctaataggatctggactagtaagggcaaatctcttcagaactcattttataagttctatccataagtatttccatatttattaactttgttattatctttgtgaaagttgcagataccaggtcaaaatcactttttgtcaaacccaaacaaactagagagcctgagggagaaagctcatgcttgcaagtctgagataaagatcggtctcaagaaggaactaaaataaccacccaagaaattctttctttaggaatgcagtaattcagataagataagataagataatcttttttccttttttttttttttttttttttgagacagggttcttgctctgtcacccaggctggagtgtagtggtgcaaacaccactcaccacagcctccatctcctgggctcaagcaattcccctgcctcaacctcccgacacacctgactatttaaaaagctttttctgtaaagacagccatgttgctcaggctggtctccaactcttggcctcaagcgatcctcctgcctaagcctcctaagtagctgagataacaggcatgaggcaggttgccaggcctgataagatgctctccataacacctgcccagtaatggcatcttcaacaatggccaactctggctttcagtctgcaaaaccaataaactctgttttcacgcagcttatctgcacttactttgccaataaaagtttccttttaccctcccctcttccatgcatatatggcttgccaggcctgtgcacctcgggctataacgctcatttctcattcccaaataaattcaacacatttggagtgttttgttgttgttgttattgttaacatcttaaaggccattaggggccctaaaaacatcaaagctcactttagctaaaaggctcaatctcacctaacattttctaatgctgcaaacagatttaagtttttaaccgctgcccctgcctccactcctttcaaatagatgtgtgcaaattaatttgcagccaataggaatttagcccagaatgtggtagtatcatcctcagtggaaccgacattgtccttctgggtttccaaaggcttctgccttcctttaagaaacacttgtcgcgcacctaccaatagccagaccctaaatgcagtcgaaaaataaggccctgaaaggggcaccctctaaatggcagaggcaagccagtaaacaaccaactggaattcaaagtgacaagagccacttggaaatatgacaaagtgccaagtgaaggggtgttcacttaattcggcctgcgtgcgggacggctggggcgctttggagagtgggagtgatctgaaaatgctttcctgagcttgatttaaaagcaggagtccaggaatttcccctaaggctggaagcactttccgacagaacctccccatctacgcagcaaggctggcagagcccagggcctgaccgctggcttgggaacctccgctacgggatgaccaggcgccgcgacgcggccgggcccaagtcgccccctcagcccggctctgagcaccccctcctctttgtcccctcaccccgttccctccttccacggccaccgatggagggaaagactccgcccagctctgggagcgaaacaggggcaccgatctgggcgcaaaataggatccgtgccacccccgaataccagtgggccgagattcgaggcccgaaaggcctggggaggcggggcggcgcccctccctgcccgcggcctcggcgagccctgcgcggcggggcggggaccaccgtggggtcacccgggcccgacgcaggaggacggcgcccccgccccgcctcccgggtcagcgcggacgcacgccgcgggcgccccatcctcgccgcggcccctctgagcgcccggcggcgccctccacctccggctcccacccactccaggcgggcgggcggggagagcgcgggggcagggcaggcaggcccgggaagccccgagggagctgcccccggccggcctccaggcgcggggacacccaggggcgagcgcgcactgcacagccgggacctcacgctttacctggtgcgctggaggagcaggtgggagcccgggtcgggcgggctcggtgtcggccctgcctcacctgggcggaagtgagaggcccagggtgaccgcgcctcacctggcaggccctcccctcgccccgactctccccgcccggggcggggcaccggggtggcgcagggggcgggggagggagcccggggccgcgggaggcgggctccaaggagggaggacggttgccctggctgtttacgtgcaggtgaattcctaccgggcgcgggatggccaagggcctgggaaaagtgggctgtgggggcggggtggcggatcagaccgcgcgtggtggggacagccgccactgacggggagggagatccggacagaccggtgtggttggaggcctgcgtgtagagcgagacccaagatcaaggaaattgaggaggatatcgatgaaagcgttgggtcaatccgcttaacactttgtctttttgcccctttcctttcctgttctctcatccctcctttgttttctctattcgctgacgcaaaataaaatattctaaaacgtgtaaatgtgggagtcattattttcttctcatttagtggaagaaagaaatccagcagtatttgcctgctgtatgctaggtgctagcttatgcaatgtctcatttactctctgaagaaactaatgaggaaaccgtgcaccctgtaggttgactggcccaaagtttggaacacaggcaaggcattttgactctaactacagtgatgatttcactatacgttaattttcttttatttgtgatgtcacaccttcgagaaaaatatgtcccgatagccttcttccactccctttaataactttaggcttttgatgataggggttttactttgcctgatacagtccacacattaacgataaagagaatcaatcttcaggtatcttattcatagagtacatacagtaattgttaaacactgtgattgattgtgggaagatgtgtaaaatggtatccctgtccccaggaagatgaggaatagatacaaaacaactacaacataaagactttcaggcggggcgcggtggctcacgcttgtaatcccagtactttggaaggccgaggcgggtggatcacccgaggtcaggagttcgagaccagcctgaccaatatgatgaaaccccgtctctactacaaatacaaaaattagccgggtgtggtggatgcgtagtcccctctacgcaggaggctgaggcag

SEQ ID NO: 4726 - DNA, 6000 bp, Homo sapiens
gcacccattgacattgaagcatgtgcctgggaggttacagggatatgaattctatctctctgctttgggtagagagcagcctgtcacctgtccctgattgtgctctacttctgctatcagccaaatgcccccaaaggaaacacactgctagtatactactctagtttcagcttttttattgttgttgtttaactttttagccctggagatttccctgtctttcgtagaagacctgtcatgaatttaatgagctaatgtaatttattcagcatttaggtgtattggtaaaagagattttcaaatattttgtccacctcattgctagtagcaaaacctcctccccctttgttttacatgtctaaatccttctttttcttcaaaagctcaaatgctatcttccacagataactttacctaagccctttgtatgtagaaataagcacccctttctctgagaacacttgactttcacatcttttagagctcattgtctctacagtatgaaaattgaggacggtgtctttagggaataagatccttccacttctctacctaagcatagcagaggaccttacccatagtaatcactcaattatttgttgaatgaacagccaaagcaaaatccttttatttcccaaaactattcatgatttttctatttcagtaaacaacattaccatttttttcaggttatgaggattctaagacttcagaggaatcttaggttctctcttataaagtcctcacatgctgtcaccaagtgatggcaattctatttctacaagtcatttaaaccattcttcttcccagttcacactgtaaccatgtgattctgactttcaattctcttggcctatctgcttttccttccccttcacccattccacctgcattacctaattaacattcctaaagtattcctctgctcaaaactttttttttaataaaattgtgtgaacttcagcaagcttcataacttctctgaaccagtttctcctttgaaaaatggaataatgtgaggctgggtgcggtggctcaggcctgtaatccagcactttgggaggccgaggcaggcggatcacgaggtcaggagttctgagaccagcctggccagcacggtgaaacccagtctctactaaaaatacaaaaattagccaggcatggtggcgtgcgcctgtaattccagctactcgggaggttgaagtaggagaatggaggctgaggtaggagaatcgcttgacccagggaggcagaggttgcaatgagctgagattgtgccactgcactccagcctgggcaacagagcaagactccatctcaaaaacaaaaaaacaaaaaaaaacaaagaaaaatggaataatgttatcaacacagattgtaccatctgctatagcaaccactgctacatgtaactatttaaattaaaatctcgatagattaaaattaaataaaatttttaattcctcagtcacactacccacatttcaaatgctcaaaagccacgtgtcaccatcctggccaacacggtgaaaccccgtttctactagaaatacaaaaaattagccgggggtgatggcaggcgcctgtagtctcagctacttgggaggctgaggcagaagaatcacttgaatctgggaggcggaggttgcagtgagctgagatcgtgccactgcactccagtaaaaatttagaacatttccatgattggccgggcacggtggctcgcgcctgtaatcctagcactttgggaggtcgaggcaggcggatcacgaggtcaggagatcgagaccatcctggctaacacggtgaaaccccgtctctactaaaaatacaaaaaattagccgggcgaggtggtgggcgcctgtagtcccagctactcgggacgctgaggcaggagaatggtgtgaaccccggggggcggagcctgcagtgagccgagatcgcgccactgcactccaacctgggcgacagcgagattccatctcaaaaaaaaaaaaaaaaaaaaaaatttccatgattgtggaaaagttctattggactgtgctgagtagtctttgtacagcttatactgatagcacaagcaaagaacctaacagattgctggtgcataataaatggtagcttttagtattatctgttaaatagtataaaataatacccatttcatagaggtttattcaaggattaaataagatacttattttcagagatgatcagtatgtacttgttcctcttataatgtgaaaaatgaattacctgttttacaacttcacaaaatgttagtcttcagacctgctcatacctgcaccttttgtaaatcctaaaaccgacacaaagaaaataagaagtttttctctcaatccacacaattttaaacatgtacagttttaagtcaacacgccaatattgttcatgggcagaatactaggctacagcattgttaacaggttatttttctttgatgagttgacacttgagttttttacaatgatgttgtaccatctggaattaaataatgttttaattccaggatataaattttcatatgcattctcacatccaacaccttcactatcttaaagaggaaaaaagaaatatcattgcgtcttctcctatagagagacatgaggaaaaaaataatagattattaagcaaaataaagcaattgcaagtccatgtgatgtaaagaacacagctgtgagatgagatatctctaaacacaagtcctacctttactactacccaactctatgatttcaggcaatttacttagcttctgagttacagtactcaaacagttgttccttggagtggagtagaataagcatacaatataataatgatagctgatttattaattatgtagtcataaggccacaggtatggagtacaactttatgtatgatttttttctatgtacgaattatcttggattcgtatctccttaggctttgagagtcccagttgtttaaactgacagtttatagaagcagggcttgaaatggtttaccagtttgcgaatgacaactgaggaatttaaatgcatggactaggtgaggaagactaattgtcaatgtgtttttgcctttgaaacctgaaagcattgctgagtaattgccaaaccaacaaaattagaatttcaatgattcataattcaaaaagcctttcaaaataattgagagtatgcaggaataaatttcacagggcagtaagaatgtttataaaaatgttcttgcaggccgggggcggtggctctcgcctgtaatcccagcactttgggaggcccaggcgggcggatcacgaggtcaggagattgagactatcctggccaacatggtgacaccctgtctctactaaaaatacaaaaattagctgggcgtggtggcgggcgcctgtaatcccagctactcaggagactgaggcaggagaatcacttgaacgcgggaggcggaggttgcagagagccaaggtcgtgccactgcactccagcctggcaacagagcgatactccattaaaaaaaaagaaaagaaaaagtcttgcatctctaacctaacctatcttctctgctctctttgaagttctatgaatcaaaactgtgattacaattttttaacaaatatttaaatacccgtggtaataaaatgaattcctcatgctgtcttcgccaagtggtgaatgctaagaaataagaaaggaaattctggaagttccaagtgaacggtcagaaagccctaagctgcttttagagatgcacagaaccatcaggctcaaatcaaaatataatttaaaaatacttacttttctaaactctaacttggcctcctgacaaacataatattctcctaatggttaaatcctaaagagtctagaaaattaagtttttttataagctgcatcaaatgttacattaagagaaatgaggacaatccgataatgcaatgcaaaatacagagttgcatttggttactgatttataaattaaaatttgggagaactggaaagattatttctacagtgttttgtgtttttcagatgtatcctacttgaaagcacggttgtgaagatacccaggaccagcaatttcctttctgtgtgggacccacccgctgcgatagaattgagtgcagaagactgagcttcgtgtaaacacaaggtcaccagggatcgtaatttcaaactctcccctccccctcgctccctccagccaccaaagtatctgaacccagaactcacaacaggaacgtgtactcaacaggaacgtgtactcaattagcttttgtgggaaagggttgaagattcttggtaactgcttcaacaaaccagaggaattaattagaccgctgattttctccggaagcgcgaagcactaggccgtttgaggatctccgctccgctttgcctgggaccaggaaaagacgcgagagacggaactcggcatcaggcactgcttggggcaggaggagagtaggggaaaccaaggaagagaacagaaaggtagggcacggggagctgagcccagctgcactcatccccgcccccggaaacccccgcagctcccgccccaaccagcccccctctggcgcctggcataaggtagcccccggaggcaatgagggccagcaggagtctcgcgcgcctgcgacgcgggtaagggggctccaggctgcgcccacttccccgagctgccagatcccaccctctgacgcacccttctagagggagcgggctgcaagcgctggggcctgtcccttctcccctacttcgacttaccttaccagaccgactagcgctggccgctggcgccgaagcccctatgctaaaaggagacagggctgggccacggggcgcgctcccgagcagaccggccggccccggggcgcgctcacggcaccgaggagcgcgcctgcggcgctgctcgttcaaaccttgttcccctttacggcaatcgcgaaagtgtcgtgaacgtgctgccgccgatcagtcacccagtcggctggagtcggaggcgatatttctaggggtgtacttgttggggtcagggtaaggctgcggagcgcggtcaccggacgtgaaggatttgaagggcgttgtaggggccagtggagagaggactggatgctctggggcgggtcattaggatatagctgtgtatggactcgcgcgaggcgaacgccgtccttcttcctggcgcagggtggcctcgcgcgcggggttgtggggaggcgaggggcgactgcccccttgcccctctgtggagactgcccccttgcccctctgtggagacattggggtggcggagcgccggcgcgggagccggggggctgttgtgtgggagcccaaggtaggggtgggaagaaccgtggagggccagcgctgagcgggccgagggctgggagcgctacccgtgccgaacggaccttgcttgtcaggtccacaccctcctgcccgaatgctggcaagtccacacaccgtgtggcatcctctgccgggtttgtctccccttaggaatgcggtgctgatgtttgtggctgggacgcgcttctggtcagcaacttttctggaaatttcagcctatattgataagctgtgagattgctagctggcgtttatttcagcagcattcttgcaaggagaaataaccaaaagagttgctggtgtttgccagtattcccagaaacactgcatgaacgggatctttagccatgtttaacttgttttctccaattcagtgcttggcattttggtgtcatttttgccattttgcatcattagtattgaatatataattttgcttgaagtcttttaatcagtaaatccatagtatgacagtaggcaaattcatagttgtctttcaacaaatgttagtgtctcgtcttgtatgtggacaaagaataaagatttatttcctactcgaactattaggaatatgtccagtccgtagatgttgagttgaacgacttataacacaagttagactttggtaagggcatttagagca

SEQ ID NO: 4727 - DNA, 6000 bp, Homo sapiens
atatttagaattttaaatctatgcaactatatttgaaacatttttattttgtggcaagctatgtaagtaatgccaattacgatgacacttacattaggaaggctatggttgctataacaccacaggcatggtatgagtggttgaaatctttcatggtgggataaataacagctgcatctatgataatccaccagcctgtaaaaaactaaaacaaaggtgataccaatgagaaatcatagcaattctgtatctcactggctaaaagcaaggtatttaagtgaggagatcccttttaatacatttcaaaaatgttctagctttttcccacatgtaatttgcacatggcctaataactgattaggtacccttaaatctgagagcaatttatatttattaacataacttttctctaagcctacttcaatcattatttaatttttatcataataaagccttgtaatctaatttggtgaactagaaaccagttatctcatggagggggaaaggaaaaaagtgactccaattccaactgacagaagtgtcctgttgatatatgataaacttccagagaaatattccccaaaatcaagaaaaaagcattcaaattaatatggagaacaactattgttcacagaattttagctatcttcttggtgtgaaataacagctctgaggttctgcttttgatgaattccagtgcagtctaaatatggtttcaggtgtgattttaaatttaatttaaacaccagattacaatttatctaattgaatttggctctagatattatcaagggcaaaggtataacaaaataacgccaaaacttcaaaaacagtttttatcatctgagcagatatttacaataaaattatattaaccaaattctgacaagtagcctagaagattttaaaagtaaccccctttcctttcctatccccacaccaaaccctgactcagttagctctggcaactgacatcttctggcaattattttaaagtaacaattttaggctagtcaaattacttttatcaggttacagacagatccatactcgattaataacatttttaatggctagcatgagtacatatgcctttctttttaccctcagctcaatgtatttaagatattttcttcatagactaaaaactcaaagctttttggccaggtgcaatagcctgtaatctcaggaccttgggaggccaaggccagtgaatcacttgagcccaggagtaggagaccagcctgggcaacatggagagacctcatctctacaaaaaaaacaaacaaaaaaaaaaacaaaaattagcccggtgtggtggccttcatccgtggtccaggctactccggaggctgaggtgggaggatcacctgagcccgggaggtcgaggttgcaatgagcagtgatttcaccactgtactccagcctgggagacagagtgagaccctgtctcgaaaataaataaatcttaaagcttaagaaaaaatggcttggtgcggtggctcatgcctgtaatcccaacactttgggaggccgaggcagacagatcatctgaggtcgggagttcaagaccagcttgaccaacatggagaaaccccgtctctactaaaacaagagcaaggccaggcgcggtggctcacacctgtaattccagcactttgcaaggccgaggcaggcggatcacgaggtcaggagatcgagaccacggcgaaaccccgtctctactaaaatacaaaaaaattagccgggcgcagtggcgggcgcctgtagtcccagctactcgggaggctgaagcaggagaatggcgtgaaccccgggaagcggagcttgcagtgagctgagattgcgccactgcacgccagcctgggcgacagactgagactccgtctcaaaaaaaaccaaaaaaaacaaaaacaacaacaacaaaaaaacaagagcaaaactctatctcaaaaaataaaaataaaaaattactctttagagcctacgacaccatatgatcataaaaaactaatagcagatcccttgagggatctgaagtgtaaataagaattttattctgtaaattacttccacacaatgtattttaatgagtttcctttttgtttttgctttttaaaaaaaaattttaaggggccatgctaatcttctctgtattattccaatcttagtgtatgtgttgccaaagcgagcacttttttttccctgagactgagaagaaagttaactggattatggagaaatgcaatcacatctattgactggttttgacctgactgcgtcttaaacacttccttgtaccttaatatactcattaaaaggagatataatccatataatgaacaaatgttttattatgccatttttaccatgcagttaaaacaacccaaccacttgttaatcaaattttaaaccataaactcttaaagtggaactaataactctccacaaacaacaaaatatcaacatggtcaaagtggtcaaagataaaataaatagtacatattttaaaacatcctgcagaattcaaaacccataaacacaaacgcaccaaaaaataaggcccaaataatcaatgacacttactagtacaccagcagcaatggaagcaatagtattgcgcttttccccccagtcaatgcattctgagcatctcaagccctctagaaatccagacatttttttcaggtcacttaaaaacaaacaaacaaacaattaaataagtacttccatttacttgcttcaagcccgaaaaataattaatagctcaggaataattagataaaagtgaaattacaaatgctttattttggttccacatacttcttcagaatatttgatttagtttttgatgaatttccacattataactttggaaagtaatatctggattcatttagtatcttttttaatgtaaaaaatggtttgggggccgggcgtggtggttcatgcccgtaatcctaccaatttgggaggctgaggtgggtgggtcacctgaggtcaggagtttgagaccagcctggccaacatggcaaaccccatctctactaaaaatacaaaaattagccgggggtggtggcgcatgtctgtaatcgcagctacttgggaggctgaggcaggagaatcgcttgaacctgggagtcgaaagttgcagtgagccgagatcgtgccactgcactccagcctgggcgacagagcaagactctgtctcaaaaataataataaataaatagaaataaatggtttggatatatttaagcagtattaacaaaggtgggtctccaaatattgaaaaaattttaactactggttgacctcctcctgaaaatctgtcacatcctattatttctaagtaggtattaaattagtttaggtggtacttttaataccaagtatatgattactaatccacaggagctcttttgtatcattttgattccaaacttattaaatgaatttgatatttacagtccaggagcactaacattagtagagagacaagtgataaactttggctctgagtggaattacagattcaaatgaaaaatatttctctaatttacatattttatcacagaacgtgtgtttcttcacacctaaatcaagaaattaaacactgcactgcagttcttacctctacccacatcatttcctttcacttcattcattatttttctttctgcaagcctgccttttggtgtcatttctatataaagaacatccactttaatatccctatctctgatcctaacgggtgtttccagccaaaagcaagcacagaatcgtggttaatagtaattcagattacaaaaatccaactgctatttaaatatagccgacccaagctgtctttacaaattatataaaacattcctgtaagccgagcagtagagacctgagatacagccatgttatctctatttcagagtatgaaaaagcctgaaatacatataacttgcgaataacaacacccaaactcctacagcgaacttgacttccttaagatactttgtagccagcaattatggttgtccaaaaatatgacaccctacaatagagcaacgtctcccatttttaacttctcttttaaaaattaaatattaaaatatatgattacagccaatgctaagatgcctttgggacaagttcaatttaggaaattcactcatttgattcttccccgggaagaactgcaattcaataagtgttattttcggttcatcccaatggccccaccccgaatccatttttctttgcacgacgactggtacgctcaagccagaccccgccctccaaactctgggacttttaggtctcgagggacgccgctggaagatgggggagccacctttagccggggcacccctcgctgagggagctggccgggtcacgctcctttctcggggcttcggcttgtccagctgtgaagtgggggatcgggggattttccagggatcctggggtgtcccgggggagggcgcggtcccctctccgtcttggcggggtctggacgccgtcgccttctcctggcgccgccggacccaggagaggagaggtccgcggcggctcagcccgggtctgcggcttccgggagggtggcggcaacgagcctgtgctgtgggcaccagcccgtcagacggccccggctccgaggcctctccagcctgcggccgctactctcttacccccactccccgcccgacacttacgtccagccccgtcgtgcagtggttccggagcccggtgtcgcgccgcgccggcccgcctcactcccccgattttagccaagaaaacaaaacggccacagcctccagacacccggatgcagcagtaccatccacccggctcagtcgcgcatgcggacacggggcggagggcggggcgccgggtccggagggagccacgcccaccacaacaacgcgtctgcgcatgcccgggcgctgggttcaggggctttccgccgctctgggttcacagctggacgtcgggagtgctagtttggagtacgccatttgagagtaggcgtgagaagttgctctgtgtgctgagcgttctaaaggaaggcgtccgttggccttcgtacccgtcttgagtgaggtgacgagtgttttctagtactggggtcggccgcgcagccctctcaggggtgggtggcaggaagagtgccgggtcccgcgtggtgcaaaaggtgggttcaggtttgcggccacacagcgctactcaggactttttagtcttgtttattttctccgtgcctgttcccgccccccgcagctccacctctgggagaggggcgggttcagctccaggaggcggggacttcccggcttggcgtggctggggtgtcccgtggaccccagtctcggcgcggtgacccacttatgggacttggcctttctttgttgtttgtttaaggcagggtttctcagcctgggcactactgaggttttgggccggctaattctgtctgggttggggagggtgctgtcccgtgcttcgcaggttgtgtagctgcatcccccgcctctacccagtggatgcaagtagcagccccagtgaaccaaaaatgcccccagactttgccaaatatcccctcccggggaagatcgcctcgcttgagaaccactgttggaggagagcctgggttttcgggaggtaaccgtttacaaaggggagaacggtaagaagccggaagcaacgatgacttagctacgtgaaagacttgcggccgggctcgcccctcttctagaagccgtcagtttgggtctcgcgtctggaatcaccgtcaaggagtcagatccagccccggagagggagcagggtcgaggtctccttgcagaaggcgccaccgcaggaagcacaggcgcaacgtgcggtctccctagcggaggcgctcgcgatcctgcagccgccggtccgggaggtgctcggtagccctccttggtgcctgtccggtagctggtcactctcgggggaaggtcgtgtgcagaagggcacatg

SEQ ID NO: 4728 - DNA, 6000 bp, Homo sapiens
tttctgatggctaagatccctctggccccgatattctaagatctgaagctacgcattcaggtttaagggctgctaagtctgataaatccagggcaagagagaatgtggagactttaggttgctccgcccaagtaaacaccacagacagaaggtgaggaccaaccagcagtcttgagacgggagctgaggggaggagtcgagggtcaggggagctcagcagagaccctcagagggctatctctggtcagcatcttggggctgtctgggagggacagggctgtgtggcctggtattgggaaaccaaacaggtggcttgtttcttccaaacaaacggcctgttttctttctcaggagcaagagctcccaggaggggtggccatggcagcgagggctcaatccagaggaagggagaataaaacattggcaggggaggctgcaccacctgtccaggctggggaggagctcaactctatgaagccgcttgaaagactgagaggttgagaaacctggggcccaaaacagtcttggtcccgaatgtggccaggtctcctgggttaaagtaaagggccctagaagggagtcaggagggctgggttccagtcccagttctgctgctgaactgttgtgtgtccttgggtaagtcccatcccctctctgagttttgtttgtcaaatgagaatgatgtctctgatgacctgaaggtcccctccacctgagacattctaggaccttccttttccctccaagcaaagggagacttgaagcatggagaaggatattctcacagctttcgctgcaagaggaggattcctcccagcttcagagcagaaacaaaagtgaaagcaaaagtcagcagcccccataccacatcccaagtcagaagacacctgagcttctgaaactttcccagcaccgagggagacaatgcttctcttttgcatgactcccaccttaatttggggctgggggaagagaatccacactaaagctcctcacactctggcctcttccagcccaagaagcctgaggggtttacagccaggcctgcagagggagggaggaacgttgaccagaaacacaacctattaaaacgggagccccagaagctccagctggcctctgcctccagctttcccatccctcacgcagacagagaaactcccaggcctcgtgacatctggagccagcgagccggagagtcgcagctggaggggcttgggtcctgccaataccccagacactcactcactacttctctctggcaggggaccaggctggcagtttgggcctcatgtagaaccccagaatcttacccttgaccaacagtcatgagtgaaggccacacattactctctgcttcctgtatgggcctctcctccagctcccccattcattcccactgcccccaccaacccacaggccagcctctctctcctaggagtcttctctaggatcctcgccaacttccaggcagccaggattatcttcttaacatatggatgggatcagacgacttccctgcttagagaacttgaatgaaagggacgtctttctccatgttgttcatctttgttgagcacctagaacagcgcctggcccacagaaggtgctcggccaacatatgttgaatgattccaagaaagcccccacctgtccagtccagctcactccggaccttccattccctttacttttccacaccctccactgcctgagcaccttccccagcccagcacaccccaggcactctcctgtcgctgtgcctttgcctgtgctgttcgatctgcccagacacccttcctcccctgttccctggggggactccagttccctgatgaatattctaatactcttttcttagcaggacctcctgagttatttcctttcttctgttctcgtctaagccctgtgacataacttactatagaatacttcatgtgctaggcataaataccccacctcgcccttggagatcatcatcccattttacagatgaagaagctgaggctcagagaggtcaggtcacacagccagcaagtggtgtggcctgactgtatcgccaattctgcaacacttttcatgagtatccctgactccctcactaggctgggggctccctgaggcttctgggctctgggtcactggggcaggccccagacaccccatcagagagctgtcagctccgaagccgtgaggagcaggttcaccactagcctcctctctctttctttggccttttctcccagtctgggggtacctctcaattggtggagtgagatatttggaggggcaggggctctgtcccaataggtcaggatcctcttgtgacaggtttccggggtgtgaaagctgttcacggtcccagggccaacagttccctagacaagctgttctccgggtaacccattcaaaaggaaagccagaagccggccggtcctagaggggaaagccttccacccgctgacttacctcccggttcgggtccctgccccgcccacctcgtccccgcccaccccactccggcagcgcccgggttcccagcagccagacctcccctgctgttgggaaggacccgcagtcccatgcaccgtcacaggcacctcggagcgctgcgcaggacaccccacgggctgctccctggggaaaccgtgggggaggggccaggtctctcgcccccaccgctggttgggaaagagaccattatcctgtaatgcagaccaggcgcgccgggccaagcgcctcccgtttgtgcgctgatttgagatctgatttgtactctgctctcccctaggcccggtaacgtaacttaccgctgagtgcttgctgggtgctgggcatgaatgccccgccgcaccctgggacgttgtcatgtcagtttcacagatgaagaaaccgacgcgctcagggaaggactcgagtttcaatccactttgctcatgcccgattctttacccccgtgtttgcttgtagagcgacacacacacatacacacacacgaatctaaatccctaaaaggccccgacttccatacagtaagggatgcgcgagcaaagcgccaaggtggtttcctgggacctactgggaagttctgctcctaaccacgcgctgaaagcgcttctggcgaagccaagggttcgaagcccgccgggcggatagcacctgttcccgccaacagggggcccccaaggccagctgccttccccagccgaggccagctggccaggcgcggtgcccgggaggcgggagcgtcccgcgccggcggggcgcggccgcagagggtgcggggtgcggagtcctcccggtggtcgaccccaggcgggaagcgctcggcggacagacggacggacaggagacccaaacgggcctcggcccccttacacggccctgtggggaaccgacagcgcgccgcgggaagcagcgggcgcaaggcgcggcggctgagactcacccgggaggcggcgggtccggctccgtctcggctgggcggtccgggactgcgggcttcgcgacccccgcgccccacccgggcggcctcctcggtgggcgccgcgatcgcggggctggggttcgggggattcttagccgagggaacgcagtggtggagagggcgcactgccctctcagggaccgggttggggacgcaggaagcgcggcctgggagcgccggcgtgcgggagggagggaccgcgggaggcggagggcggtgccggccaggagcggcctccagcccggagaagcaccgcccaccggccgaccctccctcccggccctcggcaccacccccgggcccgaggcgagggatcgcagctgagcgaggcgggcacccactccccagcgtatgccgctggagcgcgctgagcgtgtgccgggggctgggcctaagttctccccaacccttgccagccgagttggataagagggggtcgggagaaaatagagccctgatcccccctcctccctagggcccagagaatcggtgtgcatgcgtgtgtgcgcgcacgcgcgtgtgtgtgacgggtggtggtcggggaatgtctcaagctagaagtcccaggttttaggggtttaagtggagctgggagacccgctttcctcccacaccaggcgcagacgccgaggcacagctccgccagccgccccgcctttacctggcgggatactcacctctcctccttcctggggaggccaccgcctccctctcccccttctgccctgggctggttcccagcgaggtgagtgaccggcacaagtagggaaggaggaagcgagtttttaaaaactgagtcagctcacgccctcggccagggtccccacccgatgcgtggtccccagggcgccctcgggatcgcacgcccgagtcccggcccaggtggggcccattccgggttcttgcgcgcgggcaatggatgggggcgcgctgcaccgggagcctgccctgctgagggctcatccccagctttgccgagaactttcccggcgaggcaccggctggcgttttcccagcctgcgagtggcaggcgggcagccagtctctgctcggatccacggaggcccggagccgccacggagttctggctccggggagtgcaaacccgaagtcggcgcggaagcctctcacccgcggctctgcctccgccccttggagatctgccctcggaactgcgttgctctggcgcccgaactagggtgggctggtttcagccagaccgccaaaaaacgtggatgctaaacacagagggaagagccagctcccattccctctctgagccttagatttttttgaattccgagagaggtcaggccggggtccccttcttgggtgagcgtccagccctttgaagttcaaacactgagaagccgataggcagctggctggcgtcacaggatcgagccgaggactgaaggcgcctcctaccgggaatccaccgcctccagacgaaaataggctgcaatcaagttcacttccaaaggcggaattcatgggtacatatggtgtccacgtgtgtacacctgcagagttgtaacatgcgggcatttctcccctcagcccgccattctggcttcttaacttgcaccctaacagctcgacagaaccttggcgtccacaaaaaggcaagtttgggtctgccttatgatttgggggtgggaaggcatttggggaaacagtctccatgtctatgacagcaactgctattcctcacatccttgctatgaaccaggggcggggttaccacccacatcccctgaaccatctcatttaatcctcataacctaggaggcggttatttgttatgcccactttatagaagagaaggctgaggcttaaggaggtgaggtcattttgcccagtgaaaacacagctgggaagtatcaggatctagacccaagatgatccactccagagcttctgctctccctcccatagcataattcctcctgtctgcacatactctccaccctgagagaatgttcaccttgcctggccacctgcaaatgcggaataaacatttgttggatgaatgaaagccctaaataataacccatgattttagtgaatagggaggaccctttgtgtaggcaggtacctataataatatgctcccatttaagagctgtgcgtattcatcccaaagtttagacaatgcatgtggggaccttcccaggctccaaaggagtgacaggaaacagtcacgtagctctcagataagaccaggaatctggttttcatttgactctgcaagatggactttggagaggcctggggtgggggcggggggtgatcatgtcagaacagctgtcccagctcctaatctgaagacaaagagctgctgtacttttccatgccagggtcatcccagacccgccccactctgctgcagactcaactgggcaggtcttgtttatcacaggatatcatcttcagagtgttccatttaagcaggctcaccctggctgatctggggagagactgacgaaattctcaggcaaagctgaggccca

SEQ ID NO: 4729 - DNA, 6000 bp, Homo sapiens
gggtttgggctgatctccaccaggtcacgctgggtccaggcctccaggcccactagtgccactcgtacattcaggggccggaagaactgaaagacagctggggctcagaagaggggttgccatggtcaggggcctggggtgggggttgccctgtccagcactcactgtgtccagcaagagggccacttccagtgtgcggtttagcaggtgctggaagtcccggtatttctgggcctgtaggccaagagaggtgacatgaaaggcggcagggcagtgcagggggaggaggatgtgcaggggccagcaggctcacctccgagtgatcagccacaatcaccaactccacagtcttggtctctgttaccacatcccgcctctactatggacaagaagaattatcaggcaaacctgccgctcgcagccagcagctgtgccgggctgaccaagaggcagccactcctactctgtgggtcaaataggagggtgaagagcccattttacagatgagccactgaaggccagagggcccaggaacttgccaaggaggaccaggaagtagataatgaaggttggagtagacccctgcttttctggctccaaactcagtggtttttttcaaatttttaaaaaacagtaatttagctgggtgcggtggctcacgcctgtaatctcagcactttgggaggacaaggcgggtggatcatgaggtcaggagatcgagaccatcctggataacacggtgaaaccctgtctgtactaaaaaatacaaaacattagccgggtgtagtggcgggcgcctgtagtcccagctactcgggaggctgaggcaagagaatggcgtgaacctgggaggcggagcttgcagtgagccgagatcatgccactgcactccagcctgggagacagagcgagactctgtctcaaataataataataataataataatttttaaaaatcccaataacaactcttgtcacttaccataggtctggcatagttttaagcactttacatctatatggacttatttaatcttcccagcaactctatgcagcaagtagttttattatcttcattttacaaattaggaaattgggtttatattgcttcatcattggtaactatgtattatctataaccaagtgagagctctctgcaaatgggatcataagacagatgaagagccaaatacaactaataaatggataggccatttattagttgtagggcctcgggcaaaccacctaatctgtctcagctagattttattttattttatttttattttattttttgagacgaggtctcactctttcacccaggctggtgtgtagtggctcgatctcggcccactgaaacctctgcctcctgggctcaagcgattcttccacttcggcctcctgagtggctggaactacgggtgcacgccaccatgcccagatactttttgtaaggtttcgtcattttaaaatagagctattgatagcacctacctcctaggtatgggaggagtacacgagctaatgttcacaaagtgcccagcatgtggaaagtgctccattcgcaggagctgttgttactgtgcacacatagctctaagtgtctggggatcagccctcaagacaaccaaagcccacccccctgccattcatcctcacccggcgaatgtggcgctgtcccagggggtgctctggtggcttctgagtgtgtacagattcccgccagctcagggcacaggtgtggcctggcaggtggagatcttggattcgcgaaataatgggaggaccctgaaggtccccaggcccctgctccagggtatagcttctctctggggtcaggaccaccaagcctctaagaaaaaagaaagtcagagaacatttcagctccatgcctgggtctccttactttctctactgtcattaaatccgcccagtatacctgagcccagagcaggtgcagatggacacccaggagcctgcatatccccgcactcttccctggtagcagcagttctcctgcagcatgggaacaacattagtgctgtctcagagagcacaccaggactggaactgaggagcctagcttgacggtaaaaatatgcagtgtcctctcaccttccagccaccccctccctctttcccctaagccaaaaatggcacaagagggcctgactcaccaaagtgtgtccctcactgaccacccgagtgccatcgggctggtaccacaccagggttgggcggcctgggaccaactccctgtggagtgaagaaaaagaaggcagtgctaaagccacttcccaggtcgtgcattgacaagcagaggcttgaaggtggttgtggggctggggaccaggcaacccccgcagccaacttttccactcctgaccccggggcagcaaagtatactggttgggccactgactctgttagtttatttgaattccaatctggttttcaccacatactagctgtgtgacctggggcaagttatttaatctctctgtgccttgacttcctcatgtataaagtgaggacaataatacatgatagtatatcccttatagggctgttatgaggattaaatgagcacaagcacttagtacctggcacataataaatgctatacaagttgttggccatgtggtcactgttattgccaccatcactattacctattctgtagcagctccaggatatgactgtcaccgtccagctccaacttgatcctcaggggctcaggcagactggtctgtgggcaccagagggcaggtcacctccctagacctgtccacaactcccagcctctctaaccagaaaacctcaggcccacagaagagcaccagcaattagatcactggtggggggatcccaggggaggggccaggaaaccctgcctggcctggagcattgttctggggggttgtgtgcggaggtcaaggaaggtatctgagccaccccttctcggcttcctgcccagagaggaagcaccgtgtaggacccagcacaagccccagcccttcctctgactcagctttagaatggggtgggggggggggggtttggtaaggtcctgactctttccaaatccccccactgagaaaaccgacaacatgagatgaagaaagcaagtttggcttcacaatttccccagtggagatggatgggttgggtggggctgaggcagacagatacacgtgtgtgcagagggagagggagataagtgaagccaggtgctggggtgtggtgggagaggcagctgggcctgggatagacccactacagtgagctctacccaccagctcctcagccaagctttggctttgagacacctggctataccggggcgtgtgtggattcgtttatttattagaggggagtgagagctcacctgaagcacctttttgaggctaattgggagatcgtcctgaaggacctggggctccaagggctccctcggggccttctctgactctgcctgctgctcctcagtgccacctgcaggtcccaggacaccccaagacagtactgagggaatcgacagcagggctgggggtgacaggtgccctcagatccaccagctcccagcccatcaagacccttaggtacctgaggggcttccacattgcatgctgagacttaaagaagaatactggaaggagagggtgtctctctaatttatggctttccacccaccaacccattcacaagtccccaagaaagactttcggcttgcgcagcctgtggccctccttgtccccttccggccaatcccaggttctcacaggaccctccccggttcccactccctcccaatcactctccccccacttcaggaacgccccctctcgagactgagctaagccttgtggccgggtgcccgctcaccctccccttcgctcacatcggagatgccaggaacgcccatttctgggtgagcagtgcaaacacccccacctccctaaacaccctcatgcccagtcaggcacacccgctgcctacagcctctgcttcctcctcgagcaccccccacccccccaacacacaatggccctctctcctccggacactccacccgcgcctgccctctcggtcccggcccaagacagcagcgggaagtgaaagttccaaggaggagttggtgtcccagcctctttcctggccaattctcccttctcctggctcatctcgggcccctcccgctcggccaggcactggtggcaacagcaccagggtgaggagtgcctggcggccccaggcctggaatagaggctagagagaatcctcttcactaaaccctacaagccatgcccgctcagcgccctggcaccgggtcgaacggttagctaggccccagagcagcgaagatgccagtcctggggagcagcgaccctctcatcacgatcttgaagtggcgctggacaggcccctcggtacctggtacctgagcctgaaagtgtccgcagggaccgcgcagaggatgaccaggcaggaggcagggggcgccggcatcccccctccttctcttttcaccccatcgccaagtcaccgggccctaggcccaggacagcggaccagggcgggccgcgctctggctgggctctcccagggtctccgtccggccccattaccctaatgccttccgactttcctgcacctccctcccagtccgccccccgacccactccaggcggaggactcacctatatttgggagcggccaggaaggcagagggctgcccgcgcccaggagccccagggcccagagcagcgccagccgcatggcagcggcgctccgggccgggcgagggcagcaagtgcggaacagcgcgcggaggagcggccggcggccaggtcgcctcggagaacccagcagcgccgcgcggccaccaggccccgccccggcccgccccctcccacccggccccaagccaagctccgcccccggcaaagcccgccccgctgcgcgccgggtgcctcgggagcggggacaccgcccactacgcccgcgctgctcagcgctaccgcttccccgcaactgtgcggagtgggagccggtgcccggtccgaccggcttgggcggcgcgccttcacccggcgccaggtccggacccctccctagtagcttcgcggcctccctgcctcctgtgcgcggcctggctcggagaggtcgggcgggcaggctttcccgactgcaggcgaggcagtgcgcggctcaccccagtccccgacccacgtgaagcgtacagggcattttattaaccgggaaggacggtgcggaagagcgagcaggacgcctcttcaccccgcgtaggcagtgtcgtcgttgctgtcactaaaggcggaggaagagagctcttcgcggggcgtgcagaccgggcaccgctgccgcatgtcgtcccagcacgaccagcagtacacggcctcgcagtccagcgtccggcacacgtaggactcgggcgtctcgggtgcctggcacaccacgcagcgccggcacagccagcggcgcaggagcgggcagccgcggtgcaggatatccgccagcgggtggcgctgttgggaggtgggcgttagcgccagcccgggagcgaggcgggaaagaaggggaactggacagcgtttcctgtctgaagtcgccaggcctgacaattcccgcgtgttggaggaggctgggttggacaaaggaaacccctggagggcgagggtgcctccctccccaactctgtgatggagaatgggaggatgcaccctccaggctctctccaagcggatatcagccacaactctcatttgcactttcctgtaaatcatcttatttggttctcacagtgaggctgagaagtgagcaggccagatcgactatcactgttgctatccccactttacagttgagaaaggtgaagtgactctcaaagtcacacagatagtaaacaatccaacttggctggaccccaggggccctgattccaaaccacaaacctagttcactatgctccctgccatc

SEQ ID NO: 4730 - DNA, 6000 bp, Homo sapiens
taacacctcttgactcaaccacttttctccactaatttatctcattctccactatcaccactgcgatctaagccaatatatcctctgtgacccagcccctcttaacttgttatcctcctgcttcttaccatccagtaagtaatcattgcaaccaaagtgattatttaatttttttaatttaaaatgatcatgtcattcccttgcttttattacaatccttcaataacttctcttagtatttatgataaaaaccaaaatatttaactacaaactctctagaatcctgactagaatttgcaaactcaacaacaaccaggttaaatattgattgatttgtatttacttatttcgcactctgagtggcacatgcccgcccccgtccccctcccaagggagcagctgctactgggttgtggcttgaatattaccatctgaaaatacactggatgttgccataacctctaatttttcaagaaagatcagaaatccagactttaacatgaaatctcctgatctgtgaatgctgacaactaattcaaacttttgtaacaacaataaggaggccaaaaaacttgtaagcaggccaaacctgacctctcatctagtctcatcacccagacccacaccctctgcaacagccatacttaacatttctcagattcttagtgatgccaagctttttttccttagggctctcacacatgttgtgtcttctgctttgaccctcaacctcccctcaacctccaattccacttcattaagcaatctcctactcattctacgtttctgaggcacactttctcaatgaagtcttccttattcccactgcccctccacccccaactctatagactaggtcacacattccttgctctgaaagcactgagtacaacttcgtaacattcatcacacctcaaaaacaaaattatttatttaatgcccatcatctctccctagattgaaagtttcatgaaagcggggcctgccacagtaggcatacatttgttgccaaccagtttggttataaaatgttcctttagacaataagatcctagtatacttctaaatattaatcaaactgtaccctacttttcagaaaatatacagtatttaaaggaaagtagattccgaataaaaatattccattacaattataatcactgatgataataatagttaacatttattgatcatttactaaatgccaggaactatgttgagtgctttgcatgtactatctctttcaataaaacaatctgtaaagtagatacatgccactgtgatacaaaggaaacaatatagagttttaaaatttctcagtatcataaatctaatcagtggcaagctagggtatgaatctatacagtctgactccagaacttaaacaccaaattattatactaatctattaataaagaaatactaactaaacaagtatctcttaagtactgcaaataagaaatggtgaccatgacttattttccattacttattagttaaagtaacattcctcagccctctatcctgtacccttacacacacacacacacacacacacacacactaaatgaagataaactgtcaatttgtttcttctaaattaggtaagttctgacccatacccaaaatacatatgatcttagtaccaactgtaaaagtgctatttttctgaattatttttaaataagttaatgtttatacatttgatgttttctgtttccacattttaaacatacacttaatttaaaaagtatttccttgctcaaagtaaaagaaagtttattactacagactcttttctgatatagtaaacaacagcaaataatacgctaaagcaaatgtcaactgatataaccacagaaatacaaagagataacacaaggatcctttgccacctgaactctatttgaattctcgttttccaaaactcaggaaccgaatagattccaaaaactgcattggaatctatccagactcacatgtatcacttgctatccagactcttactagccaaaactcagggcatggctcacaaaccacccctgctatcagaacaataaccaatctctcattccaaactcaggaacccaatagttttagatagctaaatacatatgcatatatatccaagggcttcataaatttaagaattcttgtttaaactatttatacagactgttaaaaatgtgaataaaaggcacatatctgtattttcattcaaatttcatattttaactccatttactgagaatttttgtgtaaatgtttttaaactaaaatgtggtcatattattttaaacttttagaccattcaaaatgtattttttaaactgcttagtacatgacagatactattaataatagagctaagtaatgttaatgtgtggctgttgtgaaacagctctaaaaacagccttaacacattttttcaatatatttcatatgttatacaaataccatgcgaaataagattttcaaggaaaactactttcaccgttaatttttcagtaacatatttcacagatcatattagtgttttcttaaagtcacaacaagcaaagtgcaaaattaaagaaacaaatacaggagtacagtagtcgaaaatggcaaaaattccaaattaacttagttacaaaagaatggcatgaaacaatattagaagtaactactccataaaattcatccaaaagtcaaagaaccatcacacaagtaatgaattaactaggttgagaaaaaaagaaaaaccagttctcataaaacagtgcattttcccaaatatttaatgtaggcttacacgtgaacctaagctttttcggtgcttgacaaaaagttaaaactatcatcagatgggaaatgaattcaagcacatgattttttttcccacatactcaagaattattttaagaaacaaggaaaagatggcaggtttaagaaaagtcaactactttcccaaactcttgagtacaaatataaaaattataaaaattgtaactagagctcccattttatcctagtttggctatgctctccccagagctcactttagatttagtgatctgaaagaatgtgaaccccttaatcaaccaaattccaatagttgcttgacacagtccatctattacattaaaagagagagcaaaattaagtttcacaaaaataaatcttgtctacaagcctcacaaagtgcaataacttaggattcaataccttttaacttaactgatttcatatacagcaccaacacacatccccaaaaaaagaacaaaaatcaggatattttcacgttaagaaatgacaggtatattctgcccacgtttgtcatcctaaaaagctgactcactactaagcttcaactacaagccagaaaacgagagccctctgggagagcacacccaaaagagctgtcaaggttcgatgctttgatttcacatggtggcacaatgactgactccaacacgttattaataaatgcaggcacagcttatgtcaccatttctttaggttaagttttcatacctcccttcccagatgtccacattagacacaactctgaacgcaaatgtttttcttatataaaaccgaagagaagaacgacttaggtaggactccagtcctaccagtctatggactctaccatagactggaggtagagtccctccagtctatggttttattcagccagtcttgaagtaacaatacaatatttatgactcgaaaaattacattttactgcaagaaaaaaaaaagacagattcgatccaatcaccgtaccttgctctgccaaatgttagtaccagaacttctgaaataaacaaacctgtgtctatgttcatcgggtccatggatcaggaagactccggggtttttagcccctttaccggcatctacatgtggaattaacacatcttctaaacccaaatcaaagcgtttgtgttttgaagagtctggaaggaaaaagaatgccccaaaacacagagtgatgaaggcactaagaataaggagaagaataaacttctcagaaagtctcaaggtagccctgtgatgtgggaaggaaggcggccccaggttcagaggtggtatcctacgtccagagaggggcagcagggctggggtagtcatcgtttacgctcttggagagaatactttagaaagttctcatcttatgtcaaatgtagaatacattgaactgtcttcaaaatcttggccaaaatgggaaaactcaattttgctcctcttaaaggactgttgtgctttttaagagggcacgtcattcacgcccatccattcccactcagaaacgtgtgtgacctcccccaaacgatcacaagtttaggtcctgcgatatcctcttcaacatctgtacttcatcggattattacaagcctcctcttcattcctaggggtagatcaggcaagccacactgcagaaaagctgcaaggtgggttcttccattcctgcacctcagtgagatgctcaaacgtagtcttccgccccgaaagggagactggcgacatccgaggagttgtagaaggttcacttgatctccttcgacgcttctattccagaatctcttaaccttagcggtggaaaaaataagggtctcccacggacgtctgcaaacagggaggaaggtctcccacttcgctgggaagccgaagcagcggcgctgggcgaagtagcaggaaggagttctcggccgcccgcgcttcccggcgctgcctggcaggaacctggcgcccggctgagtcccgctgctgcccactcgacggctggcgcgaagggcaatagcgtccgaaacacctgagtccggccagccgccgcggccgccgccgctgttgctaccgcacgggtctgtcagggagcggaacttcctcctccggcggccactgagaagccccggcgtgtcctgggggaggggaggcgcggcggccgcccccgccgagctcctcctcctcctcctcctcctcttcctcctcctcctcctcctctccgcggccggttcagtgaaccccggcgcctgctccccgagctaggccgccggccgcagtggccgagccctcgcgcctaagaagccgagccggggcccacgctccgagagcccggggtaggcgccggctcattcctcactcagccctggagcggcgggagggcctgggcgcgcgggagcagccgcgcctcgggcgggcagaggtcggccgcgtctccttcctgcccggccgcgggggcctcctccgcgccgcctccggtggctcgcagctgctggctctggcggcggctgccagagaggcagcgcgcccacgccgctcggggctgcggcccggtccccgtaccctgcctccccaggcctggtgagcgcagcagctgctgggccgacacccgttgggctcacgccggagaggaaccggagggcgggggcgatgggacccgggccggcctaccggccccggctcgcgagtgggcgtccccgggcggcggagtgtgaggtgcgcgcgcacgctcccggctccgctgccgccgcccctcccccacccagcctggctgcccgggctccggcctcgcgccgctgccggctccagcagcccgaaagcgtactgctgccgccgccgtctgagcgcgaaagaagagaaggtcgccgatctgcgctgccacgagaacttcaccggtgcccagggccttgccaccgccagttcgtggggttgacccagcgtttgggcgagagggagcgaggggttgggtcgcgaaggtttcgctgaaatgtagtgtcaccggagttaatggcttctgatggcttaggttaacgtttactgtgattctttggaagtcttgtcttcagcgatagaccgtcaggcccgaggattcagcaacagggtctcaaacttccacgcagcagcccatgctcacgttattgggcccccgaggctcgattaatagagcaccaacatgtgccatgttacgtttttaaaataaagtggtgaccctgctccttcagctgggcttcc

SEQ ID NO: 4731 - DNA, 6000 bp, Homo sapiens
gcagtgacaataataaaattgctattttttgtgtaaatttatatgtccctgccaggcattgtggtagagcttactttttttatttcttttgagacagcgtctcattttattgcctaggctggagtgcagtggcacaagcttggcccactgcaacctccaccacctgggctcaagtgatcctcctgcctcagcctcctgagtagctgggactacaggcacatgccatcacacctggctaattttcgtattttttgcagagatggaatttcaccatgtcactcaggctggagtgcagtggcatgcatgatcgcagcttactgaagctttgacctccccagttcaaatgatcttcttgcctcagcctcctgaggaactaggactacaggcatgtgccatcatgcctggttaattttttttttttttgagatggagtcttgctttgcccagacttgagtgcaatggcgcgatctcggctcactgcaacctctgcctccctggttcaagtgattctcctgcctcagcttcctgagtagctgggattaccagcacatgccactacacctggccagtttttgtatttttagtagagacggggtttcaccatattggccacgctggtctcgaactcctgacctcaagtgatctgccagccttggccccccaaagtgctaggattacaggcatgagccaccatgcccagctaatttttaaattttttttagagatgagtcttcactatattgcccaggtggtcttgaactcctgggctcaagcaattctgctttagtctccaccaaattgctgggattacaggtgcaagccaccatgcctaaccaaggaagagttacattttatttaaaatatatatttattgttattatttttttagagacgtggtctcactctgtggcccaggctggagtgcagtggtgcaatcacagctcactgcagccttgaactcctgggctcaagcaatcttactaccctagactcctgaatagctgggactacaggaccatgccactatgcctggctaattaaaaaaaattttttttagagacaaggtgctatgttgcccagtctggttttgaattcctggcctcaagatcctcttgcctcagtctcttgagtcgctggaattataagcacgacccactgtacccgggtacattttaaaataatatagataaggagcaaaacattattaacaaaataaatcaaggtgaccatgtctatatccataccgaataataatagtgtttagtctcaaagtattaaatgaaatagcttttagggaaagttttcacaaaatggagacagccttggtagtaagctacttgaaggcaggcaggaacaatatcctatggatctttgaatccctcaagagtctcttgcttctaataggagttcagtaaatatttggttgaacaactaattggattcagttgccattaagaatgggcacagcctaaggaagtggctctccattcatcaatcaggtgctttcctgcaaattgtttgctactcattagtgaaactgaacactgtctctatgagaagaggaacacagcaaactaccaagacaggcatattttttggaatgatcataaagagagatctgaaggcttagattaggagacacctgggcaattcttttggctctatcatagatttattccctgcagcagtgcggtggaggagcggggggcaacccactgctgcttacatatttacaatgcatcaacttttattgttagaaaatggagatagggtagaaaagagagaagatgaagaattctcatattccaggaggatagagaaggaaaagaagagaaacagatgaacgcatctttgaattatctagttgttccccctggccttgtttcctatttttgctgttctttcttcattttagtatttgttaactcttgcctctctccctgaaaccaagacaatgagctagaatcatcaaagatattaaaacctagagctctctgtcttgctttagtccaaagcttggtgggaaatggaagttgaaactaatggctgaagtgagtgttttaaagtagctataaattgcagtgacctgtgcttctcgctccttttgtccttcatggtcatggataattgagtgttggcttggtgtatcacccaagtgctgtggcatttgaaatgaagtactctatgagatgtgaaaaagttggaagtggtagttctctatgtaggagatcctctgtaatggtttaaagacctgcaagacacatctgggctattggccagctccttcagcttctgaccagaactgcttttattgacaccccctttcctaaacatagcttttcgcagtcaagtagacaaatataatacaatggaatgagaataaattttggcttcagccagacattggtttaaatcctagcattggccaggtgcagtggctcacacctgtaatcccaggactttgggaggccaaggtaggcagatcacctgaggtcgggagttcaagaccagcctgaccaacatggagaaaccccatctctactaaaaatacaaaattagctgggtgtggtggcacttgtctgtaatcccagctacttgggaggctgaggcaggataatcgcttgaacccaggaggcagaggttgtggtgggccaagatcacgccattgcactccaacctgggcaacaagatcgaaactccgtctcaaaaacaaaaacaaaaacaaactagtgctacctttagtcatttgtttggctttagccaagttattttatttctgagctttggtttccttgtctggcaagtatatataataatacatacactcgagggtatttgttaggattaaataaaatgtagtatgtaacaggctgatataatttattttccctttcccaataatagtccctctaagagaaatcactatattatgttccacaccatctccttttttcaaggattctggaactgcagttagagaaaggaatctgttggaagggaataagaagaaaaagaacaggaagaaatcatggattgctcatgtgatcatgaaagggacttttgttttggaaacttagaactcaaagaataaagatgcggaaggtgaagtggaagaaaaaataccatcaagatttagccttgtggaataagtgagaacaagtagttaatgagtgtgaagatcagttatctgaacacatctgatttgatttcttcttccttattctgaggggatagagcacactggattctgctcatttcactgtacctcttattcaggaatgagaaaagccatttcctagctggattgtgtctccaccctaaaaactggagtcccgatgctcaaacctactggattgtctgagggatagaatccctgaaggaataagaaggttctttggcagcaactctcactggcttcccccatctaaactgaatcaaggagaagcagggcaattatattttatttatttgatcaggaaagcataacacaggaagtttgctcctttagcatatactgcaggagtccccaaagaggaaaaaacttccttctcaagcttgtctttgccaccttcttccctattttccactccactttctgctccagagagtgtaaaactaatcttggagcccacagggctgggtcggggaccagccgctctgaaatgacgtaatgctttctgcggtacacaaagcggcctcccccgggctgggcctctttcgcccctccccctccggcctggatcgcgcccccgccagcatcaacgctggtcagtccccctttttgaaaaggcggcccagggaaacagggaacaaaggccccggaaggagagcgtcggcgctgccaggaggcccagaaatagacatcacgtcatcccccagcccagcagcgccaagcgccatttggtagcatcggagggaccccaccattacgatgcggaatggagcttgcagggctcacgtttcctcctagccccagcatccagctgaccggcttaaggagtggcttcctttttgctccccaccccgcacccctctttccccagaggccgccgcctcccctggctgccagccacacggcccacagtctccaagctgccatcttgatgccccatcccccttgtcacttccctcccccgcagcccttaggaatgggagggggaggaaggggcaccgccctgtgtgccccaagggggagggcttggcctaccccacctctcctcccccagaaggaggggttcacatcctccgcacgcttgctgtttctcacctccagcagtgctgacagtgcaccatacaaggttttagcatcctggacttccccaccctcggtgtggctcaggccctgccagtccctgcagcccatagctcaagttcatgcactgtcaactgcccactacccactacccaccaccacaggcccgattttagtggggctggcattttgaaggctctggtctgggctgcattctctgccctgccgctgggcccccttggccttgcaaccattctgaccacctcaagcttagttttcccgagtctacttaccaaagctaggtcggatattggtgatctcagccatgtcgtaatcagaggctgttgctataacgtttttgcaatggtgagacagctctgggaaccctcggtcagtaccgaggcagcagctgtagagctctaggtcagggaagggggaaggtatccagcggacgcctcctgcgacggtccggcccctagttgtcagctgcgctcagctcttaagatgctccggggatgcgctgagctaaggatgcaggtgcagtcagactggtcctgatgagaggtaggctccgccttcttccgaatggtcctcggaagaagactccgcctcttccgaatggtcctcggaagaagactccgcctcttccgaaagattacggaagtcagccctcgcccccttcaggaagctctcccggaggggactcctcccaccgccgagttttcccgagaatgaggccgcgcccactgacgcgctgtggttccaaaacgagaaagtactgaagggtaagaagcataggtagattattatatgaaatcctctgatttcagttttctgggctttaatacagcagcaaaatgttctcggtcctgagttccagaattttgggaaaataaaattctgtactgcctggatttcagtatcgactgccatcattatgcatttctgagaccgctaaaggttattacagaacttttttttttggcttatatttcacagtggatggaaactgtcttaaacctcagaaactctgatgaaagaccaaacctggggatggttgcacaactctgaacatttactaattttaaaaaaacagccgggcacggtggctcatgcctgtaatcccaaacctttgggaggccaaggcgggcagatcacttgaggtcaggagttcgagaccagcctggccagcatggtgaaacccccatctctactaaaaatacaaagattagccgggcgtggtggcacacgctacttgggaggctgagacacgaggatcgcttgagcccaggaggtggaggttgcagtgaaccgagatcgcgccactgcactccagcctgggcaacagaacaagactccgtctgaaaaaaaaaaaaaaaaaaaaatttggttgtacacgtaaaacagatggatattgtggtatgcaaagctgtttaaaaaaaaaaaaaaaaacaactaatgaaaagtgccaaagttaatcagtgttgaatttttttcatgaacctcaagtgcttagggtttcgtatgagagaggccaaaccgaaagatctgtgtattctgtaggtcaaagaacaacacacatgaaactccgagcttctggagtcttccttggtatttgggagagttggtgtgattcaggttagtcagactactgccatgtttgcataaatttcaaccttcattttggctgtggataatttcatccgttggattctgtttacagataggattagttcaaatgtataaat

SEQ ID NO: 4732 - DNA, 6000 bp, Homo sapiens
gacgttcaagacagcactgaaggccgagcatggggcgcgaggcaccatgcaagagaggaggctggatcagggaccccaaggcccctcagccacacccgagactggggagaggggtggtgatcatcatgcaagagaggaggctggatcagggaccccaaggcccctcagccacacccgagactggggagaggggtggtgatcatcatgcaagagaggaggctggatcagggaccccaaagcccctcagccacacccgagactggggagaggggtggtgatcatcatgcaagagaggaggctggatcagggaccccaaggcccctcagccacacctgagactggggagaggggtggtgatgaaaacagggctccctgctgcatcagactagctccaactcaaaccttattttttttttttttttgagatagaatctcactgttcgttgcccaggttggagtgcagtggtgtgatctccgctcactgcaacctctgcctcctgggttcaagtgattctcctgcctcagccactcaagtagctgggattacaggtgcctgccaccatgccaagcaaattttttttgtatttttagtagagacggggtttcaccatgttggtcaggctggtctcgaactcctgacctcaggtaatctgcccacctcggcctcccaaagtgctgggattacaggcgtgagtccccgcgcccagccatggccacacgatttaataacgtctgtggacatcagtggccatcgataacggacagtgaccagtgatctccatcctgacctcccagttcccacaaaccggaagtctactctacccagtttccttgctgatatgctttggctatgtccccacccaaatcttatattgacttgtaatccccataatcccccatgttgagggagggaccttgtgggaggtgactggatcatgggagcagtttccccaagccgttccagtgaaagcgagttctcaggagatctgatggtttataaggcagtgttccctgctcttgcccgctctctctagcctgctgccatgtgagacatgcctcttccccttccgccatgattgtaagtttcctgaggcctccctggccacacggaactgtgagtccattaaaccccttttctttataaattactgagtctcgggtacatctttatagcagcatgagaaccaactcatacacctgtagacagccacacattccacctcctttcagtctccacctgcaagagatctacagacttggcctctctaaccggtttattcctcctcagagaaccaccaccagcagcctgtttagtgtctgctcccaacctgaggatgtcaatggccagggcttggctgctcaccccacacacccagggcctggagtgcagagctcagccagggcacccaacgcgtgctcccaaatgtgtggcctcagcaccacccccaaccctgcttcttgttctggggtccctgactcttgcaatccttgttcaccacagccttcccactctcattatcttctctaacgcaaaatgtcatcacttctcccatcaacaccacaggagcctcccaactccccccgtgggtccagaaggtctgagcttctagtctcttcccatttcaaggccctcctgtacccataagtcaacatactgttccgatcacccactcccccatccacccttcaggatactccacagccaagcaaataaacatcaacacgtcctcttgcctgccagccccttgacagaggcagccccagccagccctcctcattcccagctcccaagacagagcagccccagccagccctcctcgttcccaactcccaagacccagcacggcccaggtcccactccaaagtcctgaccgacacactccttctcacagctgcttcccagcctagcctgtactggaaactccccaggcccttcccggcatagccagagccaccgccttcagaggcctccctgatttccctgccaaatgcctcccactctgtcacacatcactggcctccatgtgaccccacacacaacgcagggcccttctgggccccagcgggttcctctgcctaaggagtgcctccccaggagggcccccaccagggatggggttacagtcctgcctgggaaggaagtgcttccacacagtggcatccccagctcctggctaaagaagccaatgggccagggatctcccctcaggccaacacctggtgatggccacagtgatgaccccaagcagcaccgccacacaggctgtcctttcgacactcaccctgaagctaacactctgccatatacaaaataattcactggacaattcaagtgcaggtgggtctgggcttagctaagtggccaggccgcaggtttaacgaaagttcatggacagccgcgcaaaaataaaatagattccatccaatgagtcacaaacaagcttctctcccatacctgcttggagaggcttttaaaatcatgttcacgattcaactgctgtttccccagccactcttcctgagcttcacacagaacagcattctcacgtcccccaggaggccagggggctatttcccccaattcttctcatcccaatatgacagcaggaaggacaaggaaaacaaaaattcacaaaggggctgggcgtggtggctcacacctgtaatcccaacactttgggaggcccaggcaggcagattacctgagatcgggggttcgagaccagcctgaccaacatggtaaaaccccgtctctactaaaaatacaaaattaatcaggcatggtggcatgtgcctgtaatcccagctactcgggtgactgaggcaggagaatcacttgaatccaggaggtggaggctgtggtgggccaagatcaagccattgcactccagcctgggcaacaagagcgaaactccgtctcaaaaaaaaaaaaaaaaaaaaaaaaaaaaaattagccgggtgtggtggtgggcacctgcaatcccagctactctggaggctgaggtgggagaattacttgaactcgggagccggaggctgtagtgaactgagatcatgtcactgcactctagctgggccaacagagaccctgtatcaaaaaaaaaaaattccacaaaggaagcaaactgtgagaacagagtttgaagcatatgtgcctcgggttcccttcaaacatccccacagacaaaggacaccaagcatatcatcctgctgagagaaagagttggcgattttaaaacaaaaaggcacaggaaaaaaaaatgttcacacacagaaactgcattaaagcagcgtgaatcaccgagggcagctgtgcccaggtgctgaggcagtggctgcccagcgtccctcacccgtccctctttgtctggacagctctttcctgcttaggggatgtggcaggaaaccttggcctgacccatcggccaggcgcatggcacacccaggtccaggactgccagggaagtctctgccttctccaccagactgctccggaggctggacggaagcccgggccgatggaaatgggacactcacctgcgactcacacatgcacctgcctgggtcacctgcctgtcactcatccacgcacctacctgcctggctcacctgcctgtcactcaagcactcacctacctgcctggctcacctgcctgtcactcacgcacatccctgccgagagtggaactgctaaggaggtcagcggtgccaggccgtgcagatgacggactgcaagttccgggcacccagacccaaccacgccctaggctcaggtgctagactaagcgagatactcacgatcctttcttcggaagccagattacacagtctggttcccctggagcagggcgcggggccaccgacctgccccagccaagcccgctgtacactcttcgctgcccacctcccaccgggctgaggcccgacctttcagccgcttcctatctgggtctggcaagaggatggcaaccggactagagttaaatacacacgcactaagtggcaggcactgaaaaggacgccaggaggtgacacctggccaggggctgaaaggatgcagggaactggcaggtgtggatggcgaggcccggcgccgcttagagacttgttccgggctcgtgtctcactcgccggccggcggtggtctcccactgtcaccgcccgggtttcccagaaacgctggccctaagcacagtcccgggcacgctcgtttctctcggggtttacggggcagtctggagtctaacagttcaggggcgaggcgacggcgggctcgacggcagccctcccccgacacagactcccgtgatccactgacgaaccaggatcgaggctgcccgtcctggggcagctgcaagtgtcccagctgacgggaaacccggccgagtggtcaagtccccgacatgaccctgacccggagctccgggagcccgccgtaaccgacctcgggttccgcgcaggcaggctcgggccggggccccgcgggcggcgggcgcgaacggagaagcgtcgcgcagggtccccagcagccccgggccgccgctgtggccggctccggcaggggggacgagcgggcccgaggacccggcgcaggcctgcgagcgcgctcacctctccctgtcgctgcgcgtgggccgccgccgcgctcaggctcgccgtagtcgaggccggagcagggtgcggaaaagcggggcccgcgcccgaaacagccgcaccgccccgggattgggcccaccgaacccgccgcagcgccgccgccgccgcctcagcctccaagatggccgctcgcggggcggaaccagcctagcttctgcttccggtgcgcggtccggggcggtgaggagggagggggagggctggccgctctaggcagactggcggaccgcgcccacgactctctgtcgccgtcgaccccggggtgggggatggggcggggggcggggcggcgcttgcgcactggcgggcggctccgggcaccgttagtgggcgcgagagccccagaccccgaagccgcgcgcttccctccccatgtgccacggcccagggcggcaggcccggctgagggcgaccccggtggagaaagaaccccgaccctcccgcctcccggctcccgccttgtcctccgctcccacgccccacccggcccttaggggaggcgcggcgcggcccgggcatggagcgtcccgggcccctggaggctcagtggagggttgggctccagggagctcagagctctctcgttcagggacccgagagtgacacgcgtggcatctctttgcaacccacgtccgcgccgcagcaccctcccctgcaggtgcctgcccagccccgggatgcccctgacctccccttggacagactgcagaaagcgcggggcgctgcgtcctctccacctctctctgaccccagacacattgggagagagcggtaggtggcggggcgctggggtgggacgctgggggcaggcgcgcagcccaccgcctccctgagaggccgctgaggacagcggggagctgagggtggtcccctggtgggggatcaggaggtggacctcgccacctggctgcctgtggccctctcctttgccccaaccctgactgcctctcaggaacaaccacaggtcagcaaggtggctgaatattgagggtcagtcccgctgtggctacgggcagagggcaggctgtgtccatgctcagccctgactctggccctctgggacaccttggtgggtctgagacgttgctgcaggccgtggggcagaagccaggaggagtgtccacgcagcctcagcccgtgggaatccagcctgcctccattactgccgtcaccggctccaccttcggagaacatctcagcatccagcctccttcctctgcctcctctcaggcctctgccgttcccatgcagggcaggccaaactgttttcacagcatggaaagttatgtgagggaagccacaccggccgcagatacaggcaccagcacatccactcgcatgcac

SEQ ID NO: 4733 - DNA, 6000 bp, Homo sapiens
ggtcagcctgcaactacagaaccatagagttcctggccaggcgcagtggctcacgcctgtaatcccagcacttttggaggccaaggcgggcggatcacctgaggtcaggagttcgagaccagcctgaccgacagagtgaaaccccatcactactaaaaatacaaaaatgagccgagcgtggtggcatgcacctgtaatcccagctacttgggaggcttaggcaggagaatagcttgaatctagaaggcggaggttgcagtgagctgagatcgtgccattgcaccccagccagggctgcaagaacaaaactctgtttcaaaaaaaaaaaaaaaaaagaactatagagttcctaagttctctatctctctgtttcctttgctgcctgccttaaagctgctgttacactttttgttttttttaggtagagtctcactgtgttgcccaggctagagtgcaggggtgcgatctcggcgcactgcaaactctgcctcctgggttcaaacgattctcctgcctcagccttccaagtagccaggattacaggtgtgcgccaccacgcctggctagtttttgtaaatttagtagagacgtggtttcaccatgttggccaggctggtcttgaactcctggcctgaggcaatccactcaccttggcctcccaaagtgctgggattacagttgtgagccaccgtgcctgaccagctgttacttttctactgagatgacatccacagtttgcatctagatgtttctttctgttattgtttttctaactagtgactttgtgttgatatgtcatggttagaggtgtaaagcaaaagctgtagggtttttggatgagtgtatatgtgtgtttagatgtgtttatgtgtacgtgcgtggattctgatacatgttttgtggccacaaggtatcaaagtggcttaaggagtatgcatacatttagtacataataacaaatttcatgtgacttaagtaaaaaatttttttttttttgagacggagtctcgctctgtcccccaggctggagtgcggtggtgcgatctgggctcactgcaagctctgccttctgggttcaggccattctcctgcctcagcctcccgagtagctgggactacaggcgcccgctaccacgcccggctaattttttgtatattttagtagagacggggtttcaccatgttagccaggacggtctccatctcctgacctcgtgatgtacctgcctcggcctcccaaagtgctgggattacaggcgtgagccaccgtgcccggccaaaagtattggtaaagtaatataaggagtgtcttaaaaactgtcagcatacatttttgtttgcatttattgatttataaggggtcaaaacttggcataagcattgtaaaactctaaacccagctgaaggccaggcatggggactcacacctgtaatcccagaactttgggaggccgaggcaggtagatcacctgagatcaggaattggagaccagcctggccaacatggcaaaaccccgtctctactgaaaaatacaaaaattagccaggtgtggtagcacatgcctgtaatcccagctacttgggaagctgaggccggagaatcacttggacctgggagggggaggttgcagtgagccgagattgcaccatcgcactccagcctgggcgacagagtgagactccatctaaaaaaaaaaaaattataggaaaacgttctttctacaaaaattcttattataaggtaaataattttgtctaattcaaagcttatttaaagtttatgtataaaatgagttaaaaagaacaaggaaataagagagaccaaggaaagttatagatataaagaggtctttttgttaagtaaggttaaaaaaaataattttatatgagaaagaatcttgtatggtaaatttttgtccttaaataaatgactggttgtttaaaaaaagggatgttcagcacaaactagaaagtccacatgtcgtgaacggtctgtgtaagctgcaatacctttggtaaaaaaggaatttataaaaatgttacatgatagatcgggtgtggtggctcatgcctgcaatcccaacactttgggaggccaaggagggcggatcacttgaggtcaggagttcaagaccagcctggccaacatggtgaaaccctgtctctacaaaaatataaaaattagccaggcatggtggtgcatgcctgtagttccagctgctcaggaggctggggcaggagactcaatggaacctgggaggcggaggttgcagtgagccgagatcatgccactgtactccagcctgggcgacagagtgagactccaactttaaaaaaaaaaattgttttaagaggtaatgaatgctggtccatgtccattcctatctggcctacaaaatttaatgggctgtaaatcttttaactgtaagtccctgggtcatagggagtcaaactgagggacaggattgactgagggtgggcagccacactcgcccagcaacgctgagacacaataaagatttggtggacatggatgttgcctctggcaaatcttggccagaagggggtgaatgtaaaccaaaaattaaattctaaggcccccccagccgtccaaatggacccttcctctcagccaagggcgttccagtgttaacctgggaacttgttcaggccatggcgggaaggggtcgtgggtcatgcctcctcccttttgaaattcaggaaaagctgactagcattaacatcaacacaggccttaagtctgataggaaacattaacaatctattctctctgaagccggcaacccgaggcttcagctgcgtggaaaaccacaaccccttactgcaacccagacattcctttctattgataataactctttcaaccactgtcggtcaggatcattttgaatctgcctataacatagaggtctccccacaccaccccaatttatcctgctctttcagattgaacccgtgtaaataaatcatgtctccctaaaatgtataaaagcgagctgtgccacatgcaccttgggcacctcccgagatgtcatgggtgtgtccttaaccttggcaaaacaaactttctaaagggactgagaccttcctcagtttgcaccctccaggctgggttctctgtccctcaagcatcccctggccagacaatccctgctgttcagaggcagccaaggctttctggtccaaccctgggggctggaggaggtgggggcaggaggtggtaactgggttgggggatgttttcttggttgccaaagcagagggtgccccccgctgctcaagatgctgagggtggtccctgttgtcctattcctgaagctgccagaggaagtccctccggagggctggcccacagcagaagggctgctcctgccctcagagggcaatctcagggttgagaaggttacagccaccatctgccaccaacctagctgcttgtgccgatcccactggccaaggccatcggctctatggctagaggcctgggcagcctgtgtcctgcttaccagaaggccacagatgcgggtgggtggggtggtggggtcttggcaagacgtgctggccacacctgtccggggcaccttctccctggggtgtgactcagccatgctcctgagcaggggcctctgagttgagcctcgctgcagtcttcccagctgcagggcccccacaggtgtgctgtcatcgcacactactgagggacagacaaggcagagcgggcctccatctgccgcgggccacagccgtgagtgtgcatgcgagtggatgtgctggtgcctgtatctgcggccggtgtggcttccctcacataactttccatgctgtgaaaacagtttggcctgccctgcatgggaacggcagaggcctgagaggaggcagaggaaggaggctggatgctgagatgttctccgaaggtggagccggtgacggcagtaatggaggcaggctggattcccacgggctgaggctgcgtggacactcctcctggcttctgccccacggcctgcagcaacgtctcagacccaccaaggtgtcccagagggccagagtcagggctgagcatggacacagcctgccctctgcccgtagccacagcgggactgaccctcaatattcagccaccttgctgacctgtggttgttcctgagaggcagtcagggttggggcaaaggagagggccacaggcagccaggtggcgaggtccacctcctgatcccccaccaggggaccaccctcagctccccgctgtcctcagcggcctctcagggaggcggtgggctgcgcgcctgcccccagcgtcccaccccagcgccccgccacctaccgctctctcccaatgtgtctggggtcagagagaggtggagaggacgcagcgccccgcgctttctgcagtctgtccaaggggaggtcaggggcatcccggggctgggcaggcacctgcaggggagggtgctgcggcgcggacgtgggttgcaaagagatgccacgcgtgtcactctcgggtccctgaacgagagagctctgagctccctggagcccaaccctccactgagcctccaggggcccgggacgctccatgcccgggccgcgccgcgcctcccctaagggccgggtggggcgtgggagcggaggacaaggcgggagccgggaggcgggagggtcggggttctttctccaccggggtcgccctcagccgggcctgccgccctgggccgtggcacatggggagggaagcgcgcggcttcggggtctggggctctcgcgcccactaacggtgcccggagccgcccgccagtgcgcaagcgccgccccgccccccgccccatcccccaccccggggtcgacggcgacagagagtcgtgggcgcggtccgccagtctgcctagagcggccagccctccccctccctcctcaccgccccggaccgcgcaccggaagcagaagctaggctggttccgccccgcgagcggccatcttggaggctgaggcggcggcggcggcgctgcggcgggttcggtgggcccaatcccggggcggtgcggctgtttcgggcgcgggccccgcttttccgcaccctgctccggcctcgactacggcgagcctgagcgcggcggcggcccacgcgcagcgacagggagaggtgagcgcgctcgcaggcctgcgccgggtcctcgggcccgctcgtcccccctgccggagccggccacagcggcggcccggggctgctggggaccctgcgcgacgcttctccgttcgcgcccgccgcccgcggggccccggcccgagcctgcctgcgcggaacccgaggtcggttacggcgggctcccggagctccgggtcagggtcatgtcggggacttgaccactcggccgggtttcccgtcagctgggacacttgcagctgccccaggacgggcagcctcgatcctggttcgtcagtggatcacgggagtctgtgtcgggggagggctgccgtcgagcccgccgtcgcctcgcccctgaactgttagactccagactgccccgtaaaccccgagagaaacgagcgtgcccgggactgtgcttagggccagcgtttctgggaaacccgggcggtgacagtgggagaccaccgccggccggcgagtgagacacgagcccggaacaagtctctaagcggcgccgggcctcgccatccacacctgccagttccctgcatcctttcagcccctggccaggtgtcacctcctggcgtccttttcagtgcctgccacttagtgcgtgtgtatttaactctagtccggttgccatcctcttgccagacccagataggaagcggctgaaaggtcgggcctcagcccggtgggaggtgggcagcgaagagtgtacagcgggcttggctggggcaggtcggtggccccgcgccctgctccaggggaaccagactgtgtaatctggcttccgaagaaaggatcgtgagtatctcgcttagtctagcacc

SEQ ID NO: 4734 - DNA, 6000 bp, Homo sapiens
actctagggagagccaggaatgagaaaaaaagaaaacattagataataggctagagaagaatgtggaataaagggaaagtttattggccaaggggaaagaaagcagtcaagtaaggagaaaaagatgagaaggatggtggaatactagaggatgaactgataatactattattaatattattaggtaacttttattgagcatttactatactccaggctaagtagtacttagcattataatcttataaaaataattaaaaactcagtacagtggtttgattatcctattttcacagagaaagatgaggtttagagaagttaatcaatttatagtaagtgtcagaatcaagattgaactcaagcttgtttgactccaaaatctgtgcttttttttaaatattattttttcagctcttattgagtctgtctgtttagaaattctgtgcttttaaccacttcaaaatacgctactctaagatcaaaggtaggtagaatggctttaaaccggagtaggggaaccccgttttctgaaatgggaggaaaggaggtaagaatggttgtgaacacagataaccttttagattaaaatgcagaaagtattcacagtaggagatcataccttttggcttcacttttgttgagtaagtacgaggcatggttatctgctaagagtaagagaggtgagttagaaaagggagctttgaggagagtgacaaagattcagagaaactttgaggggaatgaaacaagtagctgattaaggtcaagaaaaggaataattcagtgagctgagggttaaactcctggcgttggcaaactacacagctatgtgattttctatagtagccttcaggcctctgtattagtagtaaacaaactatagcagtgatccaagtgtggacttacatatacatgaaggtaaacgaacaagagggtttaagaaagtaagttggatccaagcatctagatcaagcagaaaaggaaagggtcaaacagattaggagaaaatgtccaggatatcctttggctattataaatatttaccggtggagacagatgtaaattcagagtttagagaccatatttatatgacttatgaagccacgactgaagacagagaagttgggcagtttaggactgatggtggtatgtatagtggaaatggatgattaaaaaaaaaaatcaccaagattgctatgaaatggaagagaaaacaagcaaaaattttaagtttatatggtggggaggggaatggaagaaaagagaaacagatatatacctttaatatttcattgtggcctcctttcacattgacaaagaaagcttaaaaagactttcagaacaaaattatgtcctttgcagcaacacagatgcagctagaggccatcatcctaagcaaattaacccaagaacagaaaaccaaataccacatgttctcacttctaagtgggagctaaatattgggtactcaccaacataaagatggcaaaaacagaaactggagactacttgggggcaggggaggggagaagggggaagggttgaaaaactaattattgagtactacgctcagtacctgggtgaccggatcatttgtaccccaaacctcagctcccacaatatacccagcacaagtaccaaatctaaaataaaataaaagttgaaaaaaaaaaaagacttaaactacacacacacacacaagtagctggagaattcatttacatccaagtaaacacaaattctggcaagattatagaggatccaaaaagaaagcagaagcaaaatgcaatttcaaatagctttgcaaataaaatggaaggcgtatagcttcttattaaaaatgagacttaatactttcagaattgtacagagtcttgaccttaggacttaagagtgtactctggaactgataagtcttatgacggtatagagggcttaaaacatgagttagttaacagttgctttttaaaaagtgacttctgggttgaaaattagctactgttaaaaaaaaaaagatggccatcagcaggacagttattaaagaattaactataaaagacacctttcttggatcatttattcacccttttaatcatttaacaaatatttattagtgcctaatatgtgccaggtccaagggatagaatggcaaatgagagcatgaatgctactctcaaggagtttataatctatggaggagataaacaagtaattacaaaacaatgtggtagtgttgttacaggggaagtaggtgaagggtactatggcagtaggtatagggacatctagtccagtctaggggaagcttcttgggtgttcaacttgagatctgaaggcttaaaggggagggatatgaggaaaaggcccagaaagagaaaacacactgtgtggaaatctggaggcaccatagcatggccaggttagggaactaaaagaagttcaggaagtctaaagaataaattggagccacagctgaagagagaagagccagggtcccatcaataagggacctgaaaagccatgtaaaggagtttgaacttcatcctgtgccgtggtgagcaagattcaatacgtgacctctgatttcagatttcatttcaaataaacctttcagttaatacaaaacagaaaaaatgagcagggaggggcgcagggggcaatggtggtgtttccaaggtaaccacacctctctagagaggtgctttttattaaacaaatattcactacaactctactatgtgcctgcaactgatctagatgctggtgaatacaggagagaacaagacagacagtatcttggacttcatggacagataacaaacacatgaatatacaaatgaaccatagtaataaatgccaagaagataataaaacatggaaatgaggaagaaggcagccgaaatggaaagctactttggttgtgggcagggtgtcaggtaaaaccttcctaaagcgacatttttattaataccgaaaggatgataaagtagccacataaatatctgaacagagaacattccatgcaaaggaatctttgggtctttcttccacatttgtaaaaaccaggtttaacaattaattactgcatatggatacatgtgtgaagtgaaagtctatgattataaggcatacaaaattagaaagccacttccttggttcaacgtatcaattatatccatgctaaaaatcgtagaggctgcaatgcaaagccaattttctactgacattcttatctttattctaagtgaaaagaaaagctaattaaatattgttatttttcttaaattggtactaaggctaaaaataatcctgagttgtcaccaagggcactgggtagtcttagaaaggttttaagcagaagagttacatgtctaggtttttttacattaatacatttgaatactatgcagccaataaaaacaatacttatgaaaactatagaaaaggtggtaaattttaaaaatgaaaaaactattgcattagagcggtaggattatggatggcttttccttctttcttattttcttaaatattgtaaacaagtttttgaagagaaaaggacaatgctccgctctacggagacgagtattaggatgaagcaatacaaaaactgaatcaaagaacacaaatttagttcactttaagcccccaaaggtaactgtttctgttatttgccgtttgagagaaagaacaagcaaaaacaaacacacacacacaaaatctttattggaaagatgaggggaagaaggtcaacaggcagtctgagcttcacaaatattggccaacaattatttattgaatgcctgcatttggaagtggggatacagctatgaacaaggcaggatctcaaaaaacaaaatcagaaacacagacataaatgatgccagtgctatgatgaatgctaggaagaaacaataattaacaatagattacatggtaaaagcaagaggctaactagacgaaacttctattgagcagagacagtgtcttacatgtttttacgctcagagctttatataatggtcgataaatgtttgttgactgtacaaacaaatgaaggtggccaatggagaagaaatgagggtcagaaaaacatccggaaaaggtgggtaactaagcagaggataaaggacgaggtgtcagtgcaaaaacgaaaccttatactttcaagcataggtattaccttatactgatactttgaagcagcaaatttctccacacccggattcaggatttgacatctaacagcaaagcctgcactgacgtgtcctcagtatccagtattggcgcgtcgcacaccgcgcgcccagaaccacacaggcttccccagtccaggatcagttggcgcagcccggaagcttcgaggagctcctagaaccgccgccttagctggcggcgccggctcttagcctggaggtcggcggaccgcttccaaaagtggaccgaaattccggggatggatgccgggtggggacgcggacggccgcaggccagcctcctgacagccggggctgagggaaccggccgcagcaaatcgcacaccctctctgtgtgccagagtgactggcgcaggccgcgtaagagaggagcgagaccccggaccagcccgcaccgcggaggaccggagagggcgattcggtgaagggaggcggacgggtgtcggggcgggaggcggtgactcacctgggaggtaatcatgatgctggagtcgatcaggaaactcatggcgaagtgtaaggaaggctcctgcctccacttcccactcccggaggccacagcacgctggggccacaggccccctcacacggtctgccttctcccaggtgctgcagccgggactgcggctctccagcccgacgccgtcaagctgcgccccagtcagccaatcagcggctacatccacagccccgcctcgggctcggggtgggtggggcggacgctaggcttccgccgcggaagccccaggggcggggcttattaggggcggtgctaaaagcagcaatgcaaggtagcgttaacgtttctgaggctgaaggaggtagggcctgagagctaagtggtaattctgttttgtaatgatcctaagataataatggtaattatagtaagtcgggcattgtgtcctaaatgttataacttttacttgactcggcaaatatgactgtacaaagtgagggaagactggaaagtcagatgagatatgaacaaatataactaaccaaatacatttctgtgacaacaatgaaaagcacactgtctgtagcaatttagtgataatattgtactgcatatcagtcaggccacaggtggagtactgcactccatgtaccacactttgaagagattttacaggccgggccggctcacacctgtaatcccagcacctggggagaccaaggcgggcggatcacctgaggtcgcaagttcaaaaccagcctgacaagcatggagaaaccctgtctctactaaaaatacaaaattagccgggcgtggtggtgcatgcctgtaatcccaactactagggaggctgaggcaggagaatcgcttgaacccgggaggggaggttgcggtgagccgagatcgcgccattgcactccagcctgggcaacaagagcgaaactccatctcaaaaaaaaaaaaagaaaagaaaaaagaagagagagattctacagagacatattggagctcgctcaaatgtgagccaccagataagggctgctggaaggaggcgaagaaagatgactcagaacatgacatctgtcttcatgtgaaagaatgggtagaactgatgtggcactacgaattatctgtagggcaaaggactggaagttaattgaagatagattttaattcaaaacaaggatcagttctttaagagtctgaagaagggttattttaggaagtagctgcctctgcccccttcccacctgttgcagtggatcaaatatacactgaatcactacctcattcattcaacactcatttcatgaaggcttaacg

SEQ ID NO: 4735 - DNA, 6000 bp, Homo sapiens
gcctcctgagtagctgggattacaggcgtccgccaccatgcccagctaatttttgtatttttagtagagacagggtttcaccatgttgtccaggctggtctcgaactcctgacctcacgtgatctgcccgccttggcatcccaaagttttgggattacaggagtgagtgaccgtgcctggccttattttttttaatttttactttttgagatgaattattcctctgtcacccaagccagagtgcagtggcacaatctcggctcactgcaacctttgcttcctgggttcaagtgattcttctgcctcagccccccaggtagctgggactacgggcgcctaccaccatgctgagctaatttttgtatttttccgtggagacaagggttttaccatgttggccaggcaggtactgaactcctgacctcaagtgatccacctgcctcaactcccaaagtgctgggatttcagccgtaagccacggcacctagccaattttttttttttttaaacatcgtcttgctgtgtcacccaggctgcagtgcagtggcatgatctcagctcactgcagcctcaacctcctgggctcaagcgatcctcctctctcagcctcccaggtagctggggctataggcgtgtgaccccatgcccagctaattttttgtagagatggggttttgccatgtgcccagactggtcttgaactccttgagctcaagtgatcccacccacctcggcctgccaaattgctgggactacaggcgtgagccactgcacccagcctgatataataaacattttacttacttgtattttacttaactcttccctccatcacctgaatatacaagggtaaggatttttgtctttttcactgctactgacctagcccaagcaatatttggcaaatagtgctcaaatatctgctgaacaaaccaacctttgaagatgcttgagaaaacttctggatgaagcgaagcatactggcccctattgaaagtcttgttcaggaagatgccaggtagttctgattaacatgttacagctaagcagaggcactgaatcaggggcatgtttctgtgtataacacaaggtgtcacttaattttcctcattttatacattaatttttaaatagtagtaattcatgaatataacactttcctttgaaaagaatcattaatgttttcaaactgtcggtaacacagtaacaaaatagatccttttagtatctgaactgttcttttagctttggctgtctagtgtaatagaaagagtaatgcacatagagattttacagatacttccaccatttcctagctgtgtgacactgggcaaattgcttgagtactggttttctcatctttaaaatgaagggtcttctaagtggtgtttttgtgaaattaaaaaaaaaaccaaaacaaaactggaaggtcatagcttctgtttccttttttcctcctattttggggcttaagagttcacaactcaaaataacgatagtaccaaccaatataatttaggtttttttaatttgtttgtttgttttgagacaagagtcttgctgtgtcgcccaggctggagtgcagtggcgcgatcttggctcactgcatcatctgcctaccgggttcaagcaattcttgtgcctcagcctcccaagtagctgggattacaagctcctgccaccatgtctggccaatttttgtattttcaggagagatggggtttcgccatgttggccaggctggtcctgaactcctgacctcaggtgatccaactgcctaggcctcccaaagtgttgggattacaggcatgagccaccgcgcccggtgagcattaactcatttaatgctcaaaataacctcattaacttagtactgagagagaatagcctgttggagtgcagactttggtgtcaaacttggttggaatcctggctccactacttattagctgtgtgtctttgaacaaattatttaatcttgttatggtgcagttcattcacctttgaaatatggatactaattcatagggttgatgtaacatttttttttttggatacagggtctcgctctgtcacccaatctggactgcagtggcgtgctctccgctgtctgcagccttgacctcccgggatcgagggatcttaccacctcagccctctaaggagctgggactacaggccacgccaccatgcccagccaatttttttttgagacggagtcttgctctgtcgcccagggtggagtgcagtggtgccatctcagctcactgcaagcttcgcctcccaggttcatgccattctcctgcctcagcctcctgagtagctgggactacaggcatatgccaccacgcccagctcattttttgtatttttagtagagacggagtttcaccatgttaggatggtctcgatctcctgacctcgtgatccgcctgctttggcctcccaaagtgctgggattacaggcattaggcaccgtgcctggccccaatttttgtattttttgtatagaaggggttttgccatattgctcaggctggtcttgaactcctgagctcaagcaatccacctgcctcggcctcccaaagtgctgggattgcaggtgtgtgccacttagcctgatataacacttaataagttactacatgtaaatagctgagaaccgtccctgacacaaagcactttacacaggagggactgattaaaaactctaatgtaagcagccagtaaaaacaggtgaatgataatatggatctagatctgacaatttcattcttaaccaagagaatgggatgtctaaaaaaacctacagttgctgcttaattttaaaaaatcgattgggcagggcgcagtgactcgctcctgtaagcccagcagtttgggaggccgaggtgggtggatcacgaggtcaggagttcgagaccagcctggccaacgtagtgaacctcccccccgtctctactaaaaatacaaaaaattagctgggcgtggtggcaggcgcctgtaatcccagctactcgggaggctgaggcaggagaattgcttgaacctgggaggcggaggttgcagtgagccgagatcgcgccattgcactccagcccacgagacagtgcgaagctccgtctcaaaaaaaaaaaaaaaaaatcgattgaactaatttattgatcacagatcttagggctgggtcaagaaatcctgtataccagttaatgtcttcatactatacttaaggaagcaagtagggaggtaagtaatcctgggcctccgagtagaatttagatcacacccacacccacccacctgagccccagaccaaaatgcccgcagagcgtacccatcacttttgttcaaaatcactttcttcttaaggactttccagaccactccatttaaaatctcaaccatccccccatctttggaaactccctttcctctgtggcacgtgctttccaactagtgggtattaaaaagtgataacctaaaaagtccagggacggcaggtgatgcgggattaaggactgagactcaaagcttaatcctcctaatataaatgaaaaagctcaatattcccattgccctggtgggaagactgcaaactgccagcttcaaactgacctctgagaaaggaaggcggggtttagacgccagtgtcttcgggaaaccctgcccgagagtgcccgcgtctccaatttactaccaacccttggtgccctcccatcccaacgtcgcaaatttactaccaacccttggtgcctcccatcccaacctgcacctgtggcgactttgagacttgccagcgttgcacggagagaaggaaaacaaccgcaacaacagcccaggtccactggaaaggcacttccggcaagtggattcagagaggcccctacttcctgagggctgaaaaaaaatgagtccgggtagggacttgacctgcgctaattggttcctaggcccggctttctgtttgggggccattcttaatttctagttgaatccagatgttgaacggtccttgaagttctattccagggctcccaggcagcagaatctgcccacagagttcgggtaagtagagtgcaagtactgaaacaatctcagaatgatggtggtgaaggaaggtaagagacgggattttaggcccagtgtgacctgaattgcttgccatctgtgggacttatgttttactttgcaaaacagggtttataaggcctatggggacacatctcactgcattagggccctttactatcatttagagggggaaaaaagcccagttcttacatccattttctttgctgggacctataaacttcattaagggttaaagagcacaagagcaggattttcacttccatgaaaggtgtggtgataagggccctaggcttgggggtggttcggaaagtcagatcatttctcctactgccctcggctttatttctcggctatgtgaccttgggcaagtcccttctcttatctagacttgtttcacaggaaatggcaccaggcaattttagtgcccttccgtgtctatggataaaactgaagacatgtagtaggagatctcaggggcccacgccggccagtccctccaatcctccggattctaggtagtctagcttcctggttgccagccattacacggtttagctttccgtgccggatggagccacagcgaagtcttccttaatagtaagcgcttttagtcgagctaggccttcagttttattgccttctctgtcatggcagcgccgccccttccagtagtgcgatacccaatgagacttcaggtaggagaaacggcactgtcgcaagcgcaggctctcgccggaatcccgcccttcgcttgggcgggggagtgacgcctgcgctccaggggaactactactcccagcgggtagcgcggccgacgcagccgcgcagcctccggggccaggccgtgtggcccgctggggactggagtctcaacgacgcgcacacgagaagtaaggagcggaaggtgggaaagggccggaaaacacacgttcctccgaaaccggtttgcaagtccttgtagaggtagtttcgggacgcgcactggccaaggggcgggctgtgggagggtgaagaaaaaagggatacacacatgcatacccacccactcattcatacgcgcccaggccctggaagtgggcaagggggttagaaggggcgtactaaactaggcttgtccgtgcctcaggcggcacgaggaaaggcagaggattcaattctgtagggggcagaggtgaccatgcgccgcctcaagcggcgaagaagggagccgggggcggggcagggcataaccgccgttctggaggccgaacgttggcagcgtagggaactggcgtccgggagggtcgccggagcagtcccttgcgcatgcgcttcttcaggtgggcgtgtgtaaggcggggtcggacgggggatgggagggccgtgctgctggtcgctcctcctcctccacccgctctgcccctcctggaccttgtgggccgggcagccattttgggaagagctttgttatggttgtggactagccgcctctgccgggtcgacaagctggggacgcgtcctcagacgcagcgtctagtccctggccatagctccgccgctgcccggtgagtgggagtttgggaaacggggcagtaggagatcctggagtcgttctggcgcggggctccgcccggtgcctaaccaacgggctgttaaaactagttgaaagaagctctcacacaggtggttgggtataggtccgacccgagaggggcgagcggagcccacgggtcaagtggttcggatgcggcacccccgcctcccccgtgcatggagctttgcacgcgagcgtcgccggggctccgcgaaagcgctcctactttaacttcggtcgtcgggtcggaacgctcacctgcggctctttggctcctctccaggcgatccggcttggtgctcgttgagtgacttggcttacgggtttttttcttt

SEQ ID NO: 4736 - DNA, 6000 bp, Homo sapiens
ggggcagctatcttacttaatcttgcttgaattctcctcttcattgtctctgtgagggaagccaagtcagcatctctcttcacccactgtggagaaacaagcttctttgacctcccaaaggggtctgtgatgtgggatggtaaacagcccagagagggtgactgtcagcttttgcctctccctcccccagcgccagtggcctggtgatgcagtggagatggagatggccaccgtgctagagcagtgtccctctattgtccgctttggctaccactttacacagcaggggccacgagctcgggcagcccaggccatgacccgaaacaatgaactacgtgagtaactgcagacatgatgtgtggagtggtcagggaagtgcagaaattggtggatcctcctgaaagcagacctaatgactaacagcccagggtgctaccaaagagctattcatatgagaatttcaaatcccaagagtgatcagaaagtaaacagaaaactccccctgccccaaatatggaccagtagagaggtagaaaggatgccagagataatcatacttgtttagaggtatcgtaattttatttgtggtgtggtttcttgttttgttttgttaatgtgggatgggcctgtaaggtggcctaagacactaccaatttatgagtttggctaagggactggaaaggagaagagtgcctttgcagaaagcaggagctggaacaaacacttatgtttaatattgctcctttacaggtcgccagcaaaagaagagataacactgcatttccctttaccaactagcgctgggagcactggacacttaaatcctcatctgtcctcctttcctgtaaataaaagcccttctatccattttgcctgcctccttccttgggctttggggtgagaatcttggcgctaacccccaagggttactgccagttcaccaggggattatttatactctggggatcagcaggcagggaggttcaggttactaggaggaggtgggggtgttccctcccttggtgttccccataaccctgccaatgccttttgactcttctactttcacagggaacttagccacagccctgtttccagatgtggccaggtccccctagtgcctacctgcagtccttatgtgatttgaagggggaaaggactttgagtggtagtggagaagcaggcagacaacatgaagggcaaagacctctttttgacagtcttattaatagggcaccaggctgatgcagctgacgcttggcatggctttggtaggaggtgggggaggggttagaagtatggatagccgtggctgggtgcggtggctcatgcctgtaatcccagcactttgggaggccgaggtgggcggatcacgaggtcaggagatcgagaccatcctggctaacacagtgaaaccccgtctctactaaaaatacaaaaaattagctgggcatggtggcgggcgcctgtagtcccagctactcaggaggctgaggcaggagaaaggcgtgaacctgggaggcagagcttgcagtgagccgagatcgtgccactgcactccagcctgggcgatagagcgagactctgcctcaaaaaaaaaaaaaaaaaaaaaaggagtgtggagagctgtgtaccttgcaggcaaggagtagttggaatgagaatgaacagatctgaaatcctgagatccaacaaggaaccagacttaaggaaagttaagttctcagcacccattgtaatttatttgtgaatgaatgggaaaagggtatcagtccaaggggagatcaggtggttcctcctcatcagagtcaaactcaacattttcatcttttacccatcgacctcgtccatctgggatccatccagagctggaaacatcagagaaaatagcatcgatcaggaaagaggcttattaagaagttagtggtgagctcacaccagtaatcccagcactctgggaggccgaggcaggtggatcacttgaggtcaggagttcgagaccagcctgaccaacatagtgaaaccctgtctctaccaaaaaaaaaaaaaaaaaaaaaaaaaaagttagcagtgagaaaaaattgagagccatgtaagttgggtggctaaaacaaaacgaaaccaaagatggaaaacaacaatgggagtccgggtgcggtggctcacacctgtaatcccaacactttaggaaactgaggcaggtggatcacctgaggtcaggagttcgaggccagcctgaccaacatggagaaaccccgtctctactaaaaatacaaaattagccgggcgtgatggcacatgcctgtaatcccagctactcgggagcctgaggcaggagaatcgcttgaacccaggaggtggaggttacagtgagccgagagcgtgccattgcactccagctggggcaacaagagtgaaactccatctcaaaaaaaaaaaaaggaaaaacaatagctttgaaacaagggtgtcagagagaaaagaaaatctgaggaaactgattaggcatactcaccttcgaagggtgagataatggtccagggctcgtcttcttgtggggctcatgggtgcaggggctgagacagttgctgactcctcggcctgtgggccagccgcaggttcaggttccctactgatcttcccactttggagtttgacctctgagggtggcataggggaaagggagacagagggaccaggggcttctggtctaggtagagaagaatagtctgtaaaagcagtaagggaaagggccaactctcctatgactcccaacctcttaaaacagtgcttcttaaactatatttctcaagatattaataagttctgcatacaaaggatttcagaatcatgaatttgggaaaggctagcttaaaattttacaagttttttttaatcttaagactttgtatagtttttaaaactgttattcttcaagtagaattacaaagtgccatttcccaaactttatttaaaaatcacaaaattctccttttctttttctttcttttcttttttttttgagatggagtctcactctgtcacccaggctggagtgaagtggtgtgaccgtggctcactgcaacctctgtctcccggattcaagcaattctcctgcctcagcctcttgagtagctgggattacaggcacacaccacacacccagctaattttttacatttttggtagagacaggatttcaccatgttggccaggctggtcttgaactcctgacctcaagtgatccacccacctcagcctccaaaagtgctgggattacaggcgtgagtcaccgcgcccagccaaaattctccttttcttgaaacactaagtaacatctccagaacactagtattcctcagaatacacactggaaaactcttttagagccatctgtctccttctgagccttcctacctctggctttcccgtcccatacctgtacttccggcggcagcaactgttatagtggggagctctgtgcagagcactctgggtgataagtcgtgtctgagttagcagaggagcctggtaaggagatgggagacagagtcagagccttcagccctccgcccttccagcctggtgtgtgcagcagggtcttgcctagaacacactctccactctctgattacctcagctttggtttcttcccttctcaattcattctgatgttttggattctgctttctttcctttcccggctgcttcttgccatagaaaagctgcaagcctgaggagaaagggaaacagaattaaaagcatagcaccaagagtggtgtgcagagatttcgagggtttattccccatcccgtcttccccctaacttactggacagatgtttcttgcctgcacggtgggcagtcagcatggccagggtgtccagtaccggtcgatgggggcagatggcacaagcaaagctgagcaggggtagagaagaggataagtggtccaggggaagagggttgggcccgtccctgccataggtcccaccctgtcctagcagtctttgcaaaacccaactccctggtgacccaatctccacttcttccagtcctcactggccgccaaagaatcctaggtactcctgctgtcctaattaataacaaaagtttgttgaagccaggcgtggtggcatgcgcttgtaaacccagctaatcgcgacgctgaggaggcaggatcacttgagccctagagttcgagggcagcctgggcagcaccgcgagacctccgtctcaaaggaaaaaaaaaaaaaagtctattgagcctctaaccgcagaaccctcaggcttgagccactccttgctcttaccgtccatcccgaagcatcagcgcctcatcctctggaatgtaactggctaggaggtccccgactcttcttttctgcagggagtaggggaagaaatccggacgggatcagcgggataggagagaggggtggaagtgaaattatagaaatgaggagtgaaatggaataaggaccctggggagaacagcgatcatagaccgaaaaaggagtcactacacagctctaagtcgcctggttctctcctgcacccccgagttgttgccagagcaatgaaacaaagctccttcccaaccttcagggagcgactgaagcggctccagatcctctccgctcacgcttactttgagcacattgagttgactccaatcgtctccttccctcttgaaagacatcacgactgtgagtcccagaagtgataaattctctgttccggtttcgccactcctccaggccaccgtagcaagagcgggacagcgccttctcttttttccttctcttcctgtcggcctccgtacttccggggacgcacttccacgcatgcattgcgcgatccggaaatccactctctggtgctcggagggaactgcatttcctatggtgccctgcgactccgcagacgcggagccttttgggaaatgaagtcttttctcaaagaccttgccgctcaactggatccaggcccttgcatcttggcggatctgaggcgtttggagggacaacaacctagatgtggagccgaaatttgagggtgtgacctatcttatgcggagcggacctttgaggatctctgagtggaaggtgtactacaaattcttgcaatcctcacgctcttcgtctgcggcgacagttcacctggggtgggcctgatttgttcctgactctagcaaacaaaccccgggaccggggagagctgggatgttggagcgccctgaggccaggctacttgggggcaaactgaggaaagagtgttgaggattatttctagagttcaaaggtcagaggtcaatgtagcgaggagttgtgggggagtccaaagtcggaggggtgcttaggggagaattagggagggactgaatactcaagggacagatttgtggataagtagcttggagggaggagaaaccgggagggggcagatggcgtagtgctggggaggcggggacacaggggaagagagagggggaaaggaatcccctgaatattcattcccagacttcaggcctgtcagtcgcagtctcggtcgtacctcccctagttgcaaccttagctgttggcagggtgaagagatggcttccccgtctagacagcccccgccaggggggtcaggactgcttcaagggagccgggctcgttcatatggaagcctggtgcaatcggcctgctccccagtgagggaaagacgcctggagcatcagttggagcccggagacaccctggctggactagcactcaaatatggggtgacggtgagttttccaggattggggtgaagacaacagtcaggagggatttagtcctgagaagaatgtagtggcccttctaggtaacctcccctgaaatgttcctaatgtgttgcactctgttctgcctttatctttgttttcccatcacagtgttgcacaagtcctgccctactattccaacggagaggaacagctcctattttattatgccagacactgtgctgaggg

SEQ ID NO: 4737 - DNA, 6000 bp, Homo sapiens
ctaatgcctttcttctttcatgacctatgtcccagcagccttcctaggggctctactctactgggatcagagagctagatatgtcctgtgggagcctggaccatccatccctcttgtttgtggacagggctaagcgtgttgtgttcccccacctcctctgttcacatacgtatacacacagcctccgtggtttcctctgtcacttttaattaagacacaagttgagtaagcagcctccacaggctgtattcccaggcccccgcccaccctgacctttggcccagaagctactgcttcagtgtgtggggtggaggagtgagactgggtccacagtgacattattgctgacctcttctgtgtgaggaaaaaggccacgagaccctttgtggggccagccctgagtgctcctctcccaagttttaaggcagggagggggaaataactgtacagcccttttagcccccagctctggagtggcagacagcaatgaggccacatccctggagctgcccgggggaagtgggtgaggaaccaaagccgtggtccctgtagagcagctgtggggaggggagggccagtcccctgctcagtcctgaccacataagccttggtcacaggtgtaggtggagagggcactgacggacactgccctaaggtgcagtcctgaggcacttaggtgggcgcctatctaggccatgcttctcagttggccttgaccttggcaatacctggagctccattttgctgaagtgcacggggcagccgcttgcccttggtataagagtgataccagaagttggagaacagcatgaagaagatggtgccatacatccagatgaggtgaataatgactgggtactggtagttacagctggacataaagtagtactgggagatgtgcagtgagaccaggacaaactggatctaggatagagaaagaccagggtcagagggaatagtgagaggactagaggggaagagggggtagagaaagagacaaacgttgagtagggagagatggggtcaaaggtgagacagactggataaaggcaggatccaggctaggaatgtggggggatggttataggtaagtcaggccaagcccctcaccagctgaatggctgtcatgtgctttttccaccaaaggtagggttgtgccacagggccaaaggcagataatccgtagtacaggtacattatgacatgcacggaagagtttatcatggcatggaaagagcccattcctcctgtgagtggacaataagacagggtcagcagagtccagcctctggtgcccaccctttcccatagtggccttcaccactcacccggggcaatctttaccccccaccaccagctccagggaagcacagagtgatggaagacatgtaggaaggtcacctgcccgtctttctttcggagaataaagatcacctgagagaagagtgagggaaggggattcagaacctgggcttctccacctcattctcccctcaagttctcacatctcatataactactcactgtgtccatcagctcaatgaacttggagaagaggaagagccaggccacccgaaccatctgcaagaagttgggatagccttaggacctcatacactattctaagagcctccctaaactgggccttgagcacaggccccaaactggtcatatctaccaggttgcttatgacctagccccagcccctacttaccctaagtgcctcagggctgttggaatagtccacagggtcacagcgccaggtataggtgctcagccagcccgacatcaggaactgggaagggatgtggattagaccaccagagttctcccttcccagccatccctccccttcgctagctgaggacatggatctgaacctctctggaaaggagaaatgccatgctctggctctatggcctgctccttatcctgctgacagaaattaaagcccggcatcccaggggcccacctcatagacaatgtagagggagagtgccaccagtgagaagttgtagacaatcatgaagccacggagctggaagggcttccgattagccatgatgcgaggcccaagtgagagaacgaagtacacgtaggtcaggagaatggaggtcattagcaagggggaccccatcagagggtagccctggatccggggatctatgaataagggtcaaaggaatcaggaagagtcacagggttcgaagggtcttcatttgaagggtctacagacatgaggtcaggtcacaggatcaagggtttcataggaactctccattagaagacagccgtagatccagggatcccgggaaagaaggaaggaaagggctggtggatagcgtcttacctgcgtgcttcatcacctcttggtacaagttcacaacagcctccatcctggctaaggactctggggaggtacagagggcggatgtcagacagatcccactgcacacccccatcccacagagataagacacagaaccagacaagacacctgcaatgcctcattgcagaaaggacagaacagtgaaaggaaggaattactgggaactagggggaggaggcagtttggttgaggcatctgctccccacacatcctgcttgcctgggaagagctgttccacccttcctctccacaccttactctcctctcctctccacagttttacttcctggcctcccttcccctcttcctccacaagataactctcaattccaggtctcttactggagaatcttaccttctcaccaacagggagctcttgaactccgtctcccttcctcacccgagtccctcacctccccagctctgggtctttcttctctccagggattctccccttcaatctctcctctcctgccctctcctcttcccatccctctggacccttcctgaactctcttctccccagggtccctcctgtccctgccaggactctcacctctctgggcccttctgtccctccagaaccttatcctcggattcctccttgcctgtgctgggacacttatgtccctacgattctcctctgcctttcctgggactctcacctccagcctctcctctccagcgctctcctctctcctctcgcagagcccttcctctcctggagcctggctctttgagactcctgccccggcggctccacctgtctgactagatctggcagcagccccgccctctgcccgcccctgctgtactgtgcagggggtggagggtgggtccgggccacaggtcagtgcctgggggagcaggacccaccaggattgggaaagccaagtaaagccccagactcgccacccacccacccacgtgggaccagcctgatgagctaaggtcctagattctgagccagaaacctcctctgaccccagccccagccccagccctggcccaaagcactgctgaaaatccacacccagcatcctctcctaagccggccataactgctcagtttgtcctacttcagaatgggtacaatcactcttcccttcctgggaagggcagggaagccagtggcatgtgaaggggttggggagtgggggaggtcgcaggaatcttcccctccctcagggaggggccccgttgggctaggccccctccccctcagggcctgaaggaatgtcgggggaaggctcccagggacacaaaagcctctggccagacccaggagagcatggtactgacagtccctgagggacaaggcattcttggaacagagcagggcccagggcagcaggtgccccagactccctgcttccagagaagcacctctgcagatgccaagtgaagaggcgcacctctgacacctccctgccccgcacacccctcacctccaggaggcccggcttctttaggcccaccgtggtcaggccccaagcctgcggtccacacccacctctcacctagctctccacccccaacagcgaaggtgccacgccgagggctggcacacacgtctcctgcctgacacaccacgcaacacctccgtgggctgacacgcatggctcccggccctcacgcagctcggccaccgcccaggcacacgcacgggctcacccgcggggccactcacacacgtgtgcgcgctgcctggccacgctcggatcccctccttacttgctcccccaccatcgggcttgctggccgcccatcgccggcagggcccaggccggggcgagggcgccaacacaggttcctccctgacacatgggagccagccagcctgttatctctcaaccaccagcccccaatatcaacccacacacccggcaggccaggagggaccaaggctcctgggaggacctctccccaagctgcaggaaaatctgggtgtgtctctcgtcggggaactcagcccgtcccttccttcctttaagatggatggaagggaaaaggtgcctggcaaagttagggtagcggggggagggaggggagaggaggagggagagaggtaaatgcaggggtggtggaggaaggcccgggtgtaggcaaatgggggccagagacgggggtgtgggggagggagggtgctggcgaggcccggccccagggagctgggacctcccacccactggccccgggaacaccctcgcccacagcctgggcagggcagggcagggctgggccgggctgggccgggctggccaggcagggggcgccggcacgtggagagtccgtggaaggtccagactcacccgtaggggccaggcgggcaacggcggagcgctcggagggagcagggccagagagaagtccccggggccagcctgcctgcctgccacttcctcatctgctgggccgactttctgtcaccagagggggaggggcgggccgcgcggggggcgcccgctgattgggcggccggcagggccggaggccggcagcgcaggctcggccggggcgggggcaggggcgtgccgccgggtcccagcaggaagcgccgcggcccgggcttcccaccccttccctcgccgcccgggcccgccctggccagttgcagcggcctggccacctcaggagcacgctgtctcttcccgacgtgcagcccggggcccggccctgtccccgggtgactgctccccggcaggactgcacatctgtggcggcaggcccagctcagggctcgggggaggttcggccttgccttcaaagagctccctctcctgcagggcgagcgcagagcggcgggcgagaccacactgcgtgtgctgagggcgcactggtcttagcgggagggaagcctcacgagcctgtacacttggaggagccctaagcgttaggatctgctgcgagggctgcctggaacggaggtgagaggatacaagtggcccggggcaagcatagtgaatcactggctaatctggccttcgaggtagtgaaaggaaaaaagggaaatgaagctgactgtggctgaatgtagtaggtcttgaaggccaaatggggcgatctgatttttattctagaagcagaggagaaactaaagatttttttaggagactatattcaagcttgtatcattagttcatcagacgtttatggaccacccaccgtccgtgcactcacggggcttgcagtctatctggctgaatcactttggcagccagtgtgaggagggcacagaaaggagaccaggtgagaaagccagcctgaccaaagaagatgtggcaactgatgggattggaggaggcggacaatgtcctccagacagctggactggctctctatatatttatttatctcttctacacctccagcccccacctccacactcactaactggactcaactagtgggggcaaaggacagactagattttagtgaaatggaatttctacctccagcggcccctggaacagtagcacacaacgatctaacaactgcttgtatgattggatggtgtaagtgcggacagaattagggaatttgggctactctgggcacactgcttatggggcagccctgctccgcaaggaaaataaacacatttttttaaa

SEQ ID NO: 4738 - DNA, 6000 bp, Homo sapiens
ggtgcccgccaccatgcctggctaatttttttttatttttaggggtttcgccatgttggctagactggtctcgaacgcctggcctcaggtgatccacctgcgttggcctcccaaagtgctgggattacaggcgtgagccactgtgcccagctaccatctaggactttcatagctagagaagagaagtcaatgcctggcttcaaagcttcaaaggacaggctgactctcttattaaggtctaatgcagctggtaactttgacgccagtgctcatttaccatccccaaaatcacagggcccttaagaattatgctaaatctactctgtttgtgctctgtcaatggaaaaacaaagcctgaatgacagcatatccgtttacagcatggtttactgaagattttaagctcatgtcaagactgatcagaacaaaaagattcctataagaagattactgctcttgggtgaccaagagctccgatggagatgtacaaggagatgaatgttgttttcatgactgctaacacaacatccattctgcaacccatgatcaaggagtacttttgactttcaagtcttattatttaagaaacacatttcctaatgctataggtgccatagtgatttctctgacggatgtggagaaagtcaaactgaagatcttctggaaagaatcaccactctagatgccagtaaaaatattcctgaatcatggaaagaggtcaaaatatcaacattatcaggagtttggaagaagctgattccagtcctcatggatgactttgaagggctcaagactgaagtggaggaagcaactgcatatataatggaaatagccagggaactagaattagaagtggagcctgaagatgggactaataaaacttgaatggataagttgtttcttagagataagcaaagaaagtggtttcttgagatggaatctactcctggtgaagatgctgtgaacattgctgaaatgacaacaaaggattgagaatagaacttaaacttagttgataaagcagtggcaggttttgagaagtccaatttagaaagaagttctactgtgggtaaaatgctgtgtctttcatgaaaggaaaagctccatcaatgcagcaaacttcactgttgtcttattttaagaagttgccagtcaccctaaccttcagcaatcactacccagatcatcaacattaaggcaagaccctccagcatgatgactccctaaaggctcagataaccaataaccactagcatttttgggcaattttttaaaattaagatatgtactttttttaggcataatgctattgcattcttaacaaaccacagtatagtataaacataaattttatatgcactaggaaaccaaaaaatttctgtgactcacaatattgtgatctatttcagtgacgtggaaccaaacctgcagtatctctgagatatgcatgtaccaagttctaaaagttagaaatacaaagactgctcagaatgaccacagaatgtatcagacacacgaagcaaaaaagtaagttaagagttgaaagtctgggatttgtgtcctggcttcccccacattacctacagcttaacctctaatactactaatatttatacatcatctgggagacagacacagttgatatgaaatcatacaagtgctttatgaaaaggaggactgtgcctatctatacaggttccattacgtgtcatgtttcctcttcacaaaacattgaagaaagctcacaatcccagaactgtcaataacagtatgaatagtgacagatgccagaaggaataaaatctctcagtataacaacagcagaaaccttgatccaattggctgctagagcctcccctttgtttcaccctgggcagcacctgccaggtgatggccacgctgccaagatgactcccaagtgcagccaggtgtagaaagcactggatatgaccgctgctctccacaccacacgtcatcatcgctttacatatgtcatccatcttggaagcattttgtgctgtcttccttgacaacagcaactggatgtgtattaatccaatttcatgagcttgtcatcctggtgtttatcatgccaactaatttttagcctaaaaagcctgagaaattctaacaaaatgcaatgcctttcttggtacctagcccatttctaaaatggctttatacaaatactaacatttctctacttcccaaccttcaatttatccaatgcggaagacttttaacaaagcaccaccaaccaacagtttaagaaacatcactttggatttataagcaaatgcagctatcaatggactttcagaacctaacttctgtaacttaattcccaatgtgttcattaatgcatatacttagtttgtaatataatgtctccaaacaaaagaaatgctaaattcggtgggttcatttattttaaagagacaaggtcttgctctatcgcccaggctgggagtgaaagtggcacaatcatagctcattgcagcctcaaactcctgggctcaagggatcctcccacctcagcctcccaagtagtaaggactacaggcacatgccaccatgtctgactaatttatatacatatataatatgtatatgtataatatatatacatatataatatgtatatgtataatatatatacatatatattatatatattatatacatatatactatacatatactatatatattatatatatattatatatgtatatatacatatatatacatatataatatatataatttttttaagagatgggatctcattatgttgtccagtctggtctagaactcctggcctcaagcgatcccccgctttggcctcccaaaatagagatgacaggcatgagccactgtccccgacctaaatgaggttttttaacagaaaaaaaaaatgtattaatgaagtacctgactcattacttttttcattgacattacatttaacttccaacaaagttccctccccaactttttctctatttttttattttaaccaattgtcaatatccaaattataaaagtgataattatcttgacagactgtaaaaatatgagtttcacattaaacttacttgttctttatttggaagaaagcactggtgagaaatccaagcaaagtgagctagttttagtttatcttcccaggaagttgtcttgcttttaagcttaagggaaatgccagaataaacagcagccatggctaggctttatctaaaatttaaaaacaatgggaaaaaaaatactataacaatgtcagactgagcaggcaccagaaaaccaacagtattgcagtactgtatcttgtttacctaatatgtattcttttaaaagtttttaatgaatcaacagatttgtcggggtaaatctacatacaagatgcttgactccagaattttctgggggaaattcagacaaaagcaagcaaaagatggactgcacacacagaagatggactatatgtattccagctatgatcaaacatcacttccacaaaggtgagtgttcaggaattcaacaaggccaaaatcagtgattacattacttgtggaaagagtcattcatacatggtttcaaattgaaagaggaaaagatacataagcaatatccggagaaagtaatatgtctccaagtgaaaaagaaaaccccaaaggaatacagttatttcagctgcaacagtaaccttccactaacacttttattcagtcgtgtataaatttacaacgcacatacacttcaaaaaagactctacaagagatacttgcacaaggaaaagactaaaaatagaaaacaaaaaaccatgaaatctcgggggtagcaaacataccaaacacctacagttactattaaactgggtaaacttggctttgagtttcctaaaagttatagtaaaaaggaacgttaagacgttttcattttagaaattaagttatccttcactctactgcagagaacaagaacgtcaagtgctgtcagttttcctattttgtcaaaatgtccaaaacgaattcaacgatgcctgactttctaagttcaataccatagaaccgccatcgcgacagctacaaagtgcataacaggtgtttgctgaactggctacaaagacaaccgagatgctctccccggctccgccagagttcggctctccgggcctccaaccgcccttaccgggcaatgcgaagtccagggcggacagcacagccctgccagcactccctgcccagcagaaagagaccaagcaacaagaaccaggggagagcagctaggagccaggagggagttcgccttcgcgaatggagcgtgccgaagccgctccagcccagagtctgctggcggcaccggaactgggcagggttggggggccccccatctgggcccggccttaggtagggggatctcctctggaccagccccgggtggggggactcacctcgggacctggctgcccgcaggggctgaccgcaggtgggggactcacctcgggatccggcccggtagggggctcagctcgagacagctccgggtagacaggggaggacggcggcagcggcggcggctgctgtcccggtgcggcggaggccgctgtacgggtcccgcgtccccaccacgtgggaccggtacccgcgctccttccgccggacgccggcggcgcagcggggaggggctgcacgcacgccaggcgtcgccagccgagcgccgaggcgcctcgcccattggcggagacggttgcgcgttggaggcccgagcggcccagcccgcggcccgctccgtgtcagtcagtcatggagcggccgcccagagcggcggcgggggcggcggggcgcggggcgcgggggcccagctgagccggccgtcggagtgagaccctgcggcagagacgacggaggcggaagcaacccgatcccggaggcggcggcggcggggggagccggagccgcctgggatgttcagtgagtgccgggagcacgggcggggagggccgggagggtcgcgaggcgcgcgcgcgcgcgggcgggcgggggccggggcggtggggcctcggcggggcgcgccttggctcccgccggcgggcggtgggggtggggcgcgggaggcggggctggggggcggcgggcggctctgcgcgggcgcgacggccgcgcctccgccctcggcctcccgagtcccgggctgcggccggcggcgtggcctgcagtcggcggctacacctggactggcgtcgcgttcctgcgcaggggtgggtcctgcgggttggatgccgggctcggggaggaggtggcgggcgcccgcggggaaggtatcccagtgcccgacagccaagcagggagcacggctccacagctcctttgcatgtaggggaaaaggaaatgtctttgcggcgaagtcgggattcaactttgcacatggtgatcgtgcgtgggtgggtgtggagtcgatctccgcgtgtgacacgggggagccagagttagactagctgctgcaggagagtgcttacctgcaagggtgtctctcggggctcgttgcctcatgacagcaaggtaaggttggtgcgcccatggtgtgggacgggttcaccacctccagctcgcgaagctgccaggcttttgaaaatgtattcgataaggcgttggtccgaagtgagtggatggttagaaacagtggtgtcattttagacttagcggaagtggagtgcaggaacgctacatgcagttctcccatcagttgtgaaagtcgttgtaatgcggatctcgcagtctttgtggttctgggatcagaaggtaagtgccagtcccatgcagtgtctgtcttaaattactgtacctaaactgaccttgcagattggaatctcggaatggtgactcctgctaacaagcagttgggagctgtgctgagaggaacattaagtgcggagcgtgtcttatatcaggcgattcaagtgtgccaacacctgagttggggatgtaggggaggacacgg

SEQ ID NO: 4739 - DNA, 6000 bp, Homo sapiens
ctgtccaagggagaaaaaaggtggggaaatccaggggaacccttctacctgtatttctgagggctccttacctgatttctcaagtttcttctaaccttgctgcagctggttagaagcactgtgatcatgagtgcttactgtgaaccacgtgctctgcaaagcactttacatgaactgacttgtttaattctcacaactgccccatgcatttcactgatgaggaaacttaggctcaaaaataagattcctgcttaatgtcagacaactattaatagtggaagagccaagatctgaacccaaatctgtttcctgaaccagggctccaaccagcactgtttctattgtctgtcaaaagtgaaacctcctccccaaataccaagtttgctaggttcaattaaaccagtaaggttaaactaagattactttttaattttaaccatttgagtgaaaatgcacctaaaattattacacatttcccaatttcttataaattgaataccctgaatataatttaacttttattttttgctatctcagaaccattgctgtatttgttactaagaatgctgtaacatagtaagttttgtaaaagacattcctcaggaatgactgtgtcataactcggatgtaacagattgcccttgtatcaacacccttggcctgtgagcatttacaagtgcttggaagagttttgactctgaatctaccattaccccatgcctggttagagctattatttcttgctactgtcaatgtttgtctctagcagcccatctgatgtgctacctctaatcttcaatgggctgtgataccccagatgaggtagtagtcattagtgctatgcaccaaatatttctggctctttgcttcccagacatatgctaacactgaaattctctaaccttctttaaagttaggcatggctatgtgacttgctttggccaatgaaaatgtgaatgaaagtggcatgtgccatagtgggacagaaacttgaaaagccagtgtccacttgaccactatcttttcatttaatcaaaatggtcatggcagtaccatattaagatggagtttctatcagcctcagttcctgagtaactgtgaagagtttcctgtacactcatgctggacacgtcacatgaatgagaagtcaagttttgttctgttacgccactgaagtcttgaggtttttgttagtgcagcctaatccaagctatctatgtcaatacagatctctcagtaagggattctctcacataaacaactttatttatagattttaatgataaacattttgtttggataaagaattatctctgcatccatcctgattcaaagctattttcaatataaaatatatttgccaagtacctactatgtacaaagttggatgatgaagaggacagtctatgtcttgaaatagcttcagtcttatactgtgggtagaagcaggatttaaggcaattatcgcaaaaaggcagactctaatgttatggtggtttaaacttaaagaagagagacagctcatctagatgggaagaaaaagtacagataagcttcacaaaggaagttccgtatcaaatggccctgaaacatacgtaagaacaattaaagtcaaggagactatttaagatagaaaaagccaacatgagcaaagatacagagcacaaacagcaaagcacaaagagcaaatagttccattgacctggaaaatataacagaatggcaagaaatcagtttgcccatattgcccatgccaggctggtctgtgcctaacgcaacagataatggggagccattcaaagtcctggctggagaagtgacaaacttggaagtgatggcaatacacatgatggatggaaggaaaaaaatgttagggggtttctgtggtaattcacaggaatggtccaatggccccagatcagtgtgatgacagtaggagtgaaaagaagcagatgccaggctaggtatggtggctcatgcctataatcccagcactttgggaggctaaggtgggcagatcacttgagatcaggagttcaagatcagcctggccaacatggtgaaaccccgtctctattaaaaatacaaaaattagccgggtgtggtggcacacgcctgtcgtcccagctactcaggaggctgagacgggagaattactttaacccaggtggtggaggttgcagtgggctgagatggggccactgcactccagcctgggcaacagagggaggctctgactcaaaaatagaagcagatgccagaaacagtgtggaagtagggtcaacaagacctggcacccaaccaaaaacacggggagaaaaaaagaagaaaagtaagaataaacttgaggtgccgcttctgggttgagagaactgttattccaagtagctgaggtgaatcagaaaagcgacaatgggctaggtgtggtggctcacgcatatattctcaacactttgggaggctgaggtggaggatttctttctttcttttttttgaccgagtttcacgcttgttgcccagtctggagtgcactggcgcgatctcggctcattgcaacctccacctcccgggttcaagcgattctcctgcctcagcctcccgagcagctgggattacaggcgcctgccaccacgcctggctaattttttgtattttttttttggtagagacggggtttcatcatgttggctaggctggtctcgaactcaaggtgggaagatttcttgagcccaggagttcaagaacagcctgggcaacatgacaagaccctgtctctacaaaaaaaattttttttaattctccaggtcacctgcctgtggtcccagctacttgggaagctgaggtgggaggatcgcctgagtccagaaagtcaaggctgcagagagccacattcactgcactccagcatgggtgacagagggagaccctgtctcaaaaaaaaaagaaaaaagaaaaagtgacaatgacaagtaaagtgttactgtattcctgatagttagctacagcttcctttgaagtaaattctattacttgtttactctttgcaccacacaggacaaaggtacctcttggattaatgccatcaacctaccttttgtgcaacctcatatcctgctttttctgctaagaaaccccctggaaccacccatgagcatctcaggttcccctgcacctttgtcatcctcactttctcatctgctcacttcttccccttcatacagccggctacccactcttcatgacccaattcaagcctcagcttccctgtgaaaccttcctcaaacacatggatttctccttttctcggtttctcagagtacctaccatcttggaattctagagaccatatcacagttatcattgtcatgtgtgtgctttattccctcaagtatattataggcccattagagcaagtttcttatcttaaatggttttgagtttcccctcagtcaatgccttgcataaaatatgtactcaagaggcgttccattgattgatacaaagtctgttagtctctgagaacatgaatgtcttgtttcatcgttaacattttatttttattaaaccatggttagacagttagacacgcgaaatggagagattcaccacttaatatctcaaaatatccttaagaatctctaatcataggaggagctgtattgccttaagagattatttgaaagtatcatttggctataaatttctgtgccagcttccttttaatcctctgttgacttgaaagtacaccaaacatttcagtgatcatctctacaagataattctgccttagaaacaacctaatttgtcatggggactatcttacttttagtaacctaataagagttttttcctaccttaatgtccagctatctataattcacagtacatccactgaaaagtttgagtattttactttctgaggtaatagccgccttcactggtccttccctcaattaattacattcagttatcaggtttcactccttcctcatacgtgaaggaaacataaatgaggcttactgaggaatcataaaaatggacattgttgtaaaaaggaatccaaaatgttcatgggacactctcctaaccaaacctgccctcctcactaagatattttctcttgcaagcaaaagcaccgaggacacaacgggggaaagtgccagaaggaaaggaagcaagagaggcgtactttgccgatcaaactgaccccagttctggcccccgctagagcagtaagcaatgacaaccgctacccaaacgctgccgattcccgctcaggcgctccctggacttttctttccttttcccacagcagggcccgaatgacggtgtccgtgctctgcgccaaggtgcgcagcgctgcggggtttcacacggagatgatctcagacctcctggcctgcgtccggccggcctttcccccaggctcggcggcccccacccaggagaggtcatccaggtactgggcccccagcccgaaggacgactgggccgtgccccgaccccgccttcccgggcactagcgcgcgggctccgcgccccgcccagcccgggacccgcggccggcgggggaggggcggggcggagcggcgaccgttattcgcggtcagccatcgcgccccgaagcgcactgggcaggcccttaccacagcggagagggaggcaggggggaggtggcgcccggcccgacgcggggcaggaaggcggaggcagcggcgtaggcggcggcgacagccgcgggggaccccggcgggagcccacaacgcgctgggctgcatgggcgccgccatagtggggacgcagcggcgggcggagcgcgcggccgcgacccggtcgggcgcctgcgaccaatgggctcgcggaagccgggcggagcgagggcctggccaatgcggagctgcgctgccccgagcagcccaatagacgcaggagccgcggatttgccgtcccgcccaccccgcctaccacgagagcagtgctgcggcgagtgcggggcgagaggttcgcgctggtggagcaccccagcttgcaggttcagcgtgggtgtctctcccgggcacatcgagctgtctagaggaaccctcttcccctggcttcacggcccagaggacgcacggctctctcccctcgagagcgtgtttcgtcgcccgcgcggggaacgcaaagtgctagggtagtcacggccacttcacgccgagggacatctcatctcgccctccaggtcgtgagcgcacccattccgctcactgaggccgaaagcttcggacctccgtgggccctggtgggtaagggggcacgggggtgagcgttaagagactcgtagaacatttttagtccgcgcgtggcacaaggcctccaagccccacgtacactttgcagccctcccactcctttttcattcctgcggctgagccctggtgttatccgcctggggcggaatttaaaacttaattcctcaacaaagtcggggtggtctttaaactgcaaccttggatccaaaggccctaccttacaaagggaaggcagtttgccctacaaaaaggcttctgggaggagctgcctaaggcaggaagggactggcaggccgggaggtgccgcttttggctggggccagttctcttgaggtcgacccgactgcataggcagccagtaggggagagaacgggccggtctgtgtgatttggatcacctgagttgcagtttcctaagagttattaggttgaccaaaaaaaaaaagtgcagtttctggaaaactggtcagctgttgagtaaaaactgctgggattaaacccagcgcccacccctggaggcagtggggtcatcgagaaaggtagggatcctgtgtaaaaaggctggtgaagtgttcctctcttccaaagatgtatggattagtgttctctcaccaatccactaaggcctggttctgcccagcctcccttgctacatcccctgggaatccccaagtggagtgtgggcaaagaaaaaaaaaggccaacttcc

SEQ ID NO: 4740 - DNA, 6000 bp, Homo sapiens
aattatatatctgatcagggtatagcttccagaatatataaagaactattacagctcaacaacaaaaaagcaatatcccaattttaaaatgggcaaaagacttgaatagacatttctccaaagaagatatacaaatggtcaataagcatttgaaaacatgcccgaatcaaaaccataagataccactccacaccaggtagcatggctactataataacaataatagcaatataaaagtgttggcaagaatgtggaaaaattggaacccttgaatacggctggtgggactataaaatggtgcagccactgcagacaagtttggcagttccttaataagtttaacatagaattaccatatgacctagcaattctactcctaggtatatgtccccaaaactgaaaacagaaattcaaacaaataattacatatgaatgttcacagcagccctattcacattaccacaataaccaaaaggtgaaaataacccaaacatttatcaacagataaatggataaacaaaatgtggtatattcatacaatgaaatattattcagctattaaaaaggaatgaagtactgatacagtgctacaacatggatgaactttgcaaataagctaagtgaaagaagccagacacaaaaggtcacctactgtatgattccatttatatgaaatatccagaacaggtcaatccacagaaagagaagggaaactagtacttgccacaggctaggggagggggcaatggtggggaagtgactgtttagtaggtattgggccttctttgcgggtggataaaaatgttttgaaactagacagaagtaacagttgcacaacactgtaaatgtactaaacgccactgaattgtacacattaaaatggttagttttatttatgtgaattttacctcaacaaaaaatatggctaaatatcataatcacaagaaataaaatcaaactattaggaggttcaatggaggaaggtttttaggaggaagatttttaggaggaagggcgtgaggaggaagggcccaagaaaggagtctgaggcagagatagtcacacttatcaaatatttcatttgctcccttacaaaaagctagatagaggccaggcgcggtggctcacacctgtaatcccagcactttgggaggccgaggtggggggatcacgaggtcaggagatcgagaccatcctggctaacatggtgaaacccagtctctactaaaaaatacaaaaaattagccgggtgtggaggcgggtgcctgtagtcccagctacacgggaggctgaggcaggagaatggcatgaacccgggaggcagagcttgcagtgagccaagatcgcgccactgcactccagcctgggggacagagcaagactccatctcaaaataaataaataaataaataaaaataaaacaaaaagctagatagaaagaatataactggtaattacaagagagggtggtaatacagtactgtgattgagacgtaaacagtgccaagactggggagaccacgtaatttactatccatctagaatactcttcagaatgaaagggacttcattagtaatcataccagacaacaggtgtaccacctggactatcccaagcaaactgggacatatgatcatggtagctaagagagtactttgggggagcaccttatatagaaatattattcagctatcaaaaagaatgaaaagaaatggggttcagaaaaagttcctggaggagcaaagatctgaataagaaattggagttagtcaagtgaagaaatattccaagccaacaggacattacatacaaggccaggagggaaagggcacgaccttgtgagaaactataagtaggcatagttctgcacagagcagagaaagcatatgtctgtggggacaggggttgtgcatacagataaagtggaagggctggcaggaggcagatctggagggtcccatatgtcacactagagtgtttgaattttatcctaaggacaatggaagccactgcagggggtaaggatgtgcccggaacagatttgcacattgtaaaagaccacgctggatgaatgcgagaacagagggaagacagcaagggctacagatagggaggacagttagcaagctctaggtgagagctgtgggtggcccaaaccaagacagtggcattagagataaagggaaatgagcaaggagaaagcaattttgagtggtgtgttcccatgagatatccaagtagactatccagctggccagtatctgtatgagtctgaagctcctttatttattcaacatggttttatggagagtaataaatgctggtgatacagctgtgtacattcagaccacattcctattttcatgaaacttacaatctaatggtggggataagagaaaagtaataggtaagtaacatatgaacatgtaaacaataacatatgagacagggatgagtgctataaggagaattaaagtaaaataatgtaaagagagtgactgggcaactctaaatgggatcaagaaatgctactgaatatttaaaaatgaatttaaactgagagatgtgtgacaaagaaaatgtaatcatggccgggcgtggtggttcacacctgtaatcccagcacttcgggaggcagaggtgggcagagagcttgagctcagcagttcgagacaagcatgagcaacatggagaaaccccatttctacaaaaaaaaaaaaaaaaaaccacacacacaaaaaactttataatagcttctgtccaaacctgcagatgcaaccaactcaagtatcagtcataaattattttggacaaacaactatagttcaacctactccatcttctgtacttttagataagggaaatgactataaagcaataagcatgtagattctcatgccttggccacctgagtagctggaattacaggcatgcaccacaccatgccccactaatttttgtgtatttggttttgccatgttggccaggctggtctcagactcctggcctcaagtgatccgcctgcctcagcctcccaaagtgctgagattacaggcgtgagccaccacgcccagcccagaacttttggttagcagtcatttatgtgtcccttatgtgccaggaactgtgctgactgctaatatatgaaattaaaagggagctgttcacaatgacctctcaaaatggaaacaatcttcccagaacccaataccttcctttcacaaatacactggtgacaaaaataataccccaagtcttgttcgttactgcattgacaaattttccatgttaggcatacacaagccaatacagttaattattattattattattatggttacagtttattattattatttgagacagagtctcactctgtcacccaagctggagtgcaaaggtgcaatctccgctcactgcaacctccacctcccgggttcaagagattctcctgcctcagcctcctgagttgctgggactacagatacccgcaagcaggcctggctaatttctgtatttttaacagagacggggtttccccatgttgcccaggctggtctggaactcctgacttgaagtgatccacccacctcggcctcccaaagtgctgggattacaggtgtgtgccaccgcgcccggcccagttaattattttataggtaattttcaaagcaagatgacaaggtcgtttggaaaattttgtccttacaaagaaatttatagcccacttcaatccaagacggcctcctattcaacggcttcatctcctcttttatagacaaatacctcctggggcagttcatccatacaggccatagttctcacggcctatgactttttccggtcttttaaggatctgactttcacctaccactccagtacttacctgattgcccagcacggcggtggcacaagctgtggacacctctttgggcccaaaccacactgaggcgatgcgggagggcaagcccaggatgaacacctgggccaccgagcacaagcactggcccaacatggtgacccagaagagatgctgctgcacactgccgcacttgatccaggcacccaggcagttgaggccggagcccagcagggcggtgagccgcaggcctctggtgtccagcagccaggtggccgggaagatgaggggcacgtaggccagcatgtacaccatggacagccagtcgatgtgcagcaaggtgacaccgtagaagccctcgaagacgttgctaatgatgctgtactggatccactgaaaggcgttgaccagcgagtacaggctgaagatcaggagcaccacgaagcgccgcggggagagcgccgtaaggggcagcgggctgctctcggcccccggggtctcagctcccgcgcccgcaggcagcagccgggcctgggtctcctcttctggggccagtggagtctgaggcccgcccagaactcccgaggcggcagcgaggctgtcccggggggccccattcaccgggaaggtgcccgctttgggcccgttctgcagctccacgctctccttcccaacgggcgcgcccctcggcaacgggaggtatcctttcgcgagcgggtgtccgggcgccaccgccgccccctcctcatcgtctggccgcgccatatcccaggctccccggcgccacctcgctcccccgccccactccccgactccgctctcccggcccacagcccgaggtcctcctggggccccacctccaacccctcggcccaccgctccttccccggtggcgcgcgccgcgaaccgcaatccgcgctaccgcgtgaacagatgaaggtctcctcccccgcgccgcgcggcagtcaccccttgtctggtcccgcccctagagtcgcgcgtcctgcatgactacggccctccggccaatcagcgtgcgcctttgtccggcgcgagagccagtcggggagctaccgggcgagaacttcgggaggcgggggaggaaagcggccggcgagcgctggctgacattttcctgcccggaaggatgcatggcccggggtctcctgcacctgagggtgggcgggaggcggccccgcgggttgtgttgctggaaaaaggggtctcgatccagaccccaagagagggttcttgggtctacttcagggaagaattggaggcgagtcacagagcgcagtgaaggaagcaagtttattggaatctactccgttagagagtgcaagtcctcagactgcaggaggaggaactcccgtccttcggtagtgtcactacttagaggcagctgtgaggagctgtgattaatcgtggaatgtgctgatgtgcccactaaaggtaggggctgttggtgcactaatgaccattaatccttcaacctaagcctgcgcattgacgttatctctgagtagagggctgggccgggctcggtggccacgtctgtaatcccagcactgtgggaggccggacaggagtctcccttgagcccaggagttcgagaccagcctgggcaacatactgagatgccatctatttaaaaaaaaaaaaaaaaaaaaaaaagccagtagccaggcgtggtggtgcatgcctgtagtcccagctactcaggaggctgaggcaggagaactacttgaacctgggaggcggaggttgcagtgagctgagatcgcaccacactgccctccagcctagcctgggcgacaaagtgagaccttgtctaaaaaaaaaaaaaaaactcaggacatctggacaattccgcagacttggtgggagatgtcctgtatggccataaatattgtgtaattataattgttggtcagcttagaatgcggctattttcagacctttagcattaaccttataggtgccttgtgagtgcctagttactcactttaacatgcagtcgctctagccatgttttattaaaccagatgcctggtaagcagtggctcctctaacaagtgggcagcttggaactgggaacgagagagccaccgaaacagaatgagggagacaaagaagtggg

SEQ ID NO: 4741 - DNA, 6000 bp, Homo sapiens
gacttattcagggagactgcacgggggaaaccgaggcatgagaaaggctgtatggatatctcatcaccctttcacctggtgcccccagaaaactaggaaactaggagccgcctccaaataggacctggagctggagttcccctaaggaatgtagaggccgggtccccaactcccgaacggagtgggtgaagccaaaaaggctagggctgtgcagagatgtcttgggtagcttcgtgggccacctggacagggtaagtttgggtgctggatcgctccatcgttccccttttcccagcgcagagaacaagcgcttcaggccccaggatgggacctagaggcagatggccaaagagaggggccctaagagtctgcggtcccgggacggactgaggcgacactgagggcggtgcctgaaagtccgggctccaggaggcggggtgcgaggccgccaagcgtcgcgggaagcagatgaagaatgcgtgagctgggactcctgttcccgggcccggggaggcctgggcagccgacatggaccccgctgccagacagcccgcactcacctcgcgagggtctcactacatggtctccgcgcgcttccggcctagagtcgggaattcccgccccctcccatagctcccccctcccccacaggagccgcgtacccacgaccgactgccaatggcagcaccgagtgggcggggacagaccgggagtgacgtcagttaggagcaatcagagatcgggagcgggagcgggcggagcaggcgacctgaggagagtgagcgagagcaagagcggatattaggaaaaggacctcggggctggggccctggggcgcatctgtggaggactgaggggccggagcgggccagtcaacaaaggctttgattatatggatatttttaaaagagggagaccccgcattgtcaagtcttccggcccacatctgaaaacatcttcctggccttgggccaaagtctcatctgtccctcagaaggctctgacacctcgtcagtgcctcttggcgcccaagggaaagcattcccctcttgggaccaacttccttgactgctttccctcaccagcacccacaacaaggaaaaagacaaggcagaattggaaaggggggaaagcaaagagagggtatgtcttgaaaatcatcccttctcgactacttatggcactcagtgcagcctccgccttctccaggtgggtggggacgtggtgggaccggaatgcggggtgctgaagccgcgcccagggaagagcccccagcgcattccaggatatctgcgtaccgcgcctgcgggcgtctggccggttctcccacctgatttccagcccagctcccgccaccctcgccggtcggtttgctgtttgctgttccttgaatgccccaaggtagttgtttcagctcaggactttcaccgtttcctcaacctggattcttgtggcccacaactctgtgccttgagaatcctcttctagcctcaagggacggtaagacaaaagaaaatttaaaaagggggctcagctgttcttttatgcaaaggtgaaaaaagcttcattgcctaaagaagggacagatgggatcttgcttcctacaggaaaattaattttaaaaaagaaaaaaaaaaggggggacagtgtaatgcttctcacaaggctccagaaacgaagcccagtaattccttaagtaaaagaggaatgtgaagacttcttaaggggccgggcgcggtggttcacgcctgtaatccaagcactttggaaggccgaggatgaatcacctgaggacagaagttcaagaccagcctggtcaacatggtgaaaccccgtctctactaaatatacaaaaattagccgggcgtggtggcgggggcctgtaatcccagctactcgggaggccgaggcaggagaatcgcttgaacccgggagccggaaattgcagtgagccgagatcgcgccattgcgctccagcctgggcaacaacagcgaaacttcgtctcaaaaaaaaaaattattcgtaattggtaacattaacaaggaattatgactgggggggtcaggaaacctggattctggtccaagttctacctttatagttgtcaaatatatatatttgtttatttatacacatacatatgtcatatatgattaataattgtatatatttatggtgtacaacatgatgttttgaaatatatgtacattgggccgggcgcggtggctcacgcctgtaatcccagcactttgggaagccgaggcgggcagatgacgaggtcaggagttggagaccagcctgctcaacatggtgaaaccctgtctctactaaaaatacaaaaattagccaggcgtggtggcgcatgcctatgatcccagctactcaggaggctgaggcaggagaatcgcttgaaccggggaggcggaggttgcagtgagccaagatcacacctctgcactccagcctggacgacacagcgagactccgtctcaaaaaaaaagaaaaaagaaaagaaatatatgtacattgcagaatgggtaaatcaagctaattaacatatgcattacttcacatatttatttgtgatgagaacatttaaaatctcttggcaactttatttcttttctttttccttccttccttcctttcttctttcctcctttctttcttgacagagtcttgctgtgttgcccaggctggaatgcagtggcatgctcttggctcactacaacttctgcctcccaggtttcaagcaattctcccgcctcggcctcccgagtagctgggattacaggcgcccgccaccacgcccggctaatttttgtatttttagtagagacgggatttcaccatgttgaccaggctggtcttgaactcctgacctcaggtgatccacccgcttcagcctcccaaagtgctgggactgcaggtgtgagccaccacacccggcccaatagatctcctcaattttaccttaccttgatgtatgattttaggcaagtcagttttcctcaccagagtttgataaatcaggggcaaggaggaagttaaacaagcagatgactgcagagggtccttccagttctaacatcaacggaagctaactacattccccactcaaatcatctctgcacatacagcccgcaggaagccctttgaaatgtatttaaccacctttctcgctctcagaatgatctcaacaagaacagctttgctttccttggagctctgcatcaatctaggaaggctgctttgtctcttcactacttgagcaggatggagagatatgagcgggaaagacagataagaaatctgagaaagccccacaaggtgggttgatagtgtgaagaacatgggctgaagcatccaaatcttggttcagctacttacagggtaaccttgagaaagttacttaaacttgtcagctcggacgggcgtggtggctcacgcctgtaatcccagcacattgggaggccgaggtggacggatcacgaggtcagatcgagaccaccctggctaacacggtgaaaccctgtctctactaaaaatacaaaaaaattagctgggcgcctgtagtcccagctactagggaggctgaggcaggagaatggcgtgaacccgggaggcggagcttgcagtgagccgagatcgagcctctgcactccagcctgggccacagagcaaaagaaaaacaaacaaacaaacttgtcagctccatctgctgtaagaattatatgagtaacatggaaatgcctgactagaccctgttcccgtttttacccttagcccgttcaaatcttcataaggataattagtagcagtttgagttctgggattcacactccaaactactgttttactcacccagctacccttttctgaaatactactgaaaaccatacctgtatcagtttacctccattgttttacttgaagtgaattcctggaccatcagacattagaccaaggcaaaaaaataaaaataatcaatcaaccctgagttttggtattactactttctagtcatggatctgcctcctcataggtaaaatttgcaaaatattacccgccgtgtgtgcctcagaactgttatggattaaggaagagaacaatttttatgaaaacgttttgtaaattatacaagtgtgggacataatgttcccggtaactgtatgcaaacaataagacaacaaacgcaaaaggctttttaacttgttgcagttttcctgccccgtgtccctccgtgaatgagcagcgtgcagcgagcgtgtgcgcacagctgctgttctccattaacgccacactgctcggcttgcggacggggaaacccgccatcgcgctcctgccgcctgccgagcgaggatcaccgctccactggggtcagcgggctgttgactccccgcctgggtgaaaccggagcttccgagtcacgtggcgcgcgaagacaaacctggctgctcagggtttcccggagctttctcccagcttcccggcgattcatattctggcgcttacccctccctttaggctggcggaacccaatccccgcctgacaaataagtcccgccggccggacgcagtggctcgcgcctgtggtcctagctgctcgcggtgctgaggcgggagaatcacctgagcccgggaggtcgggggctgcatggaaccgtgatcgcaccaccgcactccagcctgggcaacagagcgagaccctgtctccaaaaataagaataaagaaaaaaaaaagaaagaactgcggccccattggcctgactctcctgaacagccaaactgtctccgaccagttacggaagaggcggccttgagagggtagtgtgccattggctcgatgtcctgcccctccgaaacctaagtcttcagcttccaatcaggactcagctttgggaagagcgccacgcggtgggcgaggggatgccctagtaaattcgcaggtctcttgactctttccgcctttgtttacaaccctgccatgatctccctcttgcaaaagcgagggctacagaacaggcattcaggagtcctgtgctccagtcacagccttttctgttcttcagctaggagacaccaaaccctcaggaagatttactatagctaagagaaaactgcagcagaaagggcgcggctacctacttcttaaattccgtttgtggaccctcagactcttagtcccctactcccagatacagcggccctaccgtggctcctggcaaggtggcatccacttttgtagtgtaaggctgggggcggggtttggctggcaggtccaggatacgagatcctggaagaaagaaaaggtgtagtgtttggggaggtcaacgggctatgctggcttgacagggctgggctcttcagaacaggtaatgcttggggggggcctctttgtctaaacctgagggatagggctgaaggtgaaatatcgaggggacaggtgagggggcttgctagtgaggaaggagtgggggggcggggataatggaaaagggagcagaggagcccagaaactgtagggggtagtaagcagccatcattccgtttctgcaaccctccgtcccacacgccttcctgcagaagcatggatctcggaatccctgacctgctggacgcgtggctggagcccccagaggatatcttctcgacaggatccgtcctggagctgggactccactgcccccctccagaggttccggtaactaggctacaggaacagggactgcaaggctggaagtccggtggggaccgtggctgtgtgagtgtgacgagtgggagtgggggtggggttgagacacaactctgtgataagaggcttcagctcccacttggagacaggtctgaaaacagaccacccccaaaatagacgtaagttgtataataactgtctccatgcccaagaagtgaaaggactgaaaatgaagcataagtcagggaggacttccaaaattcttccctgcacatatatataaccttttcctactgtagggcct

SEQ ID NO: 4742 - DNA, 6000 bp, Homo sapiens
aagtatgcaaagaatccatctcagacctctctttttgagtttcagaatcattcatccaattgccatgtatctggacattgtcatgtgtatgtttcacaggcatgttgagctagacatgtttaaaactgaatcaccagttacctcccaagtgagtctgcctctgtgttacctaaatcagagactggcatcccatttatctgggtactcaagccagaaaatttcactcgtacttatcaagcatctccagcgtataaagatttgtgctaagctgtggatacatgacagcaaatagggtagtccctgtcttcaccaaagcttgtttaagaaactctatccttgatttctcccacttctgccctcacaattcagtcaccaagttttgccacttctacttcctaaaattcttctgagatctatttctatccacactggcaatgccccagtataaactgccatctttctttccctggattactacaattatctcctaactggtttccttcttgctggtattgctgccctttgagttctttttctcagagtagcgattcatcatctaaatactaacctaatcatgttgaaaccattcaaagttactattagccttaagaaggagtccaaactttgtgacatcatcactaatgttcttcatgatctggtccctgtttacctctccacccctgtctagaatctctcagttcctagactgtgttcttcttcataaacattgttagcctctatctagaatacttgttttttaccctttcaattcctagctattatcaagcatggagccaataagactgaactgcctttttttttttcttttttccctatgagaatgtaaactctgtcaggaaattattagattggttattgccatatttgcttgttcattattatatttctagtatctagctcagtgtctggcacaaaataagggttcaatgaatattttctgaatgaacccacaaatgtcaagaaagcagagagaaaagtcaactaactcagactatggaacaaggaaaggcttcttgcaagagccctaaaaaattagtaaggataaggaagagtcagccaaagaaaataaagatagtccagacaaagtcaacaagaatgcaaaaggtctcaggtgtaaagcagcctcatgaatgcgaagtgggtaggatgggagatggtactggaaagggaaacaagactgggaaggaaaacagtggcaagataatgaagaccctagcacaccaggccatggagttggactatcttgaaggtgactgcagaggaagattagaaatttaaggaggcaagtgaaatagatttacatttgagactggtcattctggctgctacttacaagatggatttggcggtgtaggtgggggtggtagtagttatggctgaaagcagtgagatgagatagaattgggagtacaaatgaaagcaaaggacaaattagagtttgaagggctcgtgagcctcccgaaagtcggaacttcaaggaacaggtcaggaatagcagtagttttagaatccatgagcaaataggttaaaacaatgagtggacagtgctcacagggaagatacagacagaaaacaactcaaggttggaactttgggaaatactatttaatgggtaggcagagaaaaaaagacccccaagaagcatgagacaggtagaaaaagatgggagaaatgcaaaacgagtttcaaggagggtttaatcaatgataccaaatgcaaaagagaggtctagaacaagaaacagtggtcatacattggtggaggaagtacatttcattttctgagacagacaaataagacaggtggatatatgtggcattgacagaagtggagagggaggaagttatatattgtatgatggctttaattttctcaattaactgggaaaaaagtactgggattgtgtgtggcccctatggaatctctattcataagaatgggtgcctgatgggaagtagagtgtaggatccagtcttagtatttcacctattcctaccacattagaccaagtgaatcaactttttgtccctattgatctgttaaagtagaaataacaatttggaaaccctgtcacttaaaaaaagagatttgtttaaagcactagatatcacagcatcaccacttgcattaaagtcctagctgcaggctgccatggtctctttggaacacccccatcttgtcactcaaaggtccactcagtcctgataggtctgtcatccagaatttaaagtgcagtctagaaaaggaacatgaaattaaaattagaaaggcaatagacacaacaaattgcagatgcatacgaatgtgttatgtgcttgaaacacacctttaagaccactctggtcactttctattaaagagaggaatttaggttgggaagaggaatgaagaaagggtaaagtttgtgagaaatcactgaaagttacaggacagggaaattactgatgataaattaaaggattgtcaggaatcagggaaagagctgaagatggagactgacaatctgtcatatatcactttgtgtcattttctccagtgtttccagctaagaatttatagacaagatgcacggataagattttgacaggcacctgggtcagaggcatcagacacaggaagtttggatgctgataaaccatgcagtctaggctgtgaagggaggtattagcaggagggctgtcagggaaaatgaaatagtagggcaaatgtagcacatgtgagggtacaaaattatgatgctacaatcagaaagaatactaaagttttctgcaatagtctgtgtttttatgggtgataacaaaactcttagactaatgtctaggttgagaattctgatgttccaccttctaccttacactgaccagtatcaggcaactaaaagttttaaaaagtcagatttaaccttctaattaaggtaatttgaataaacactcattttttaaataaataatttacttctaatataactcaatttatcacatcaatagtaatattaacccccaaataaacaatatttattgttgatataacaaaatggttgtcttgctcttttcttcctttgcctcatttttctctttctccatggtccattctaatcttggctttcacataaatcgcttggttttttttctagattctcaacgacaatttagacatttgttgagcacttgccacttgcaaggtattttcctagggaccatgtataaataataatagtcaaaataacagctaatacttttcaagtactcacaattttgccaggcacttaattaagcactctacaggaactaattcacttaatcttcatgataccgtataaagcagatagaactgtcaccctattttaaagatgcagaaacgagctcagttaggttaaatagctcgcctaagtccacctaggtagtaaatggtgtgatcagggatttcaatccaactccctttgaccgtagagatgtgctctcagtcactacgctatggttcccttccctgcctctaaggacatataatttggtggaaattatgcatgtatcagtaatcaatttgatttggcaagtgtcaatgagacaggtctcttttttctgctttcctcactgactctaatatttttttaaaatctattttcttaatgtccttttgggtcttactagattccgactttgagacttacatcagtaaatagacattgaaaggaaagacaaaagccctgaactaatgatatgaaatgtatttttatttagaattggtatagacttcactatcaataggtttagttcttcaggacaggacaaagcagcggaatttgtgtctacattcaatacaacctttctagcacttttttcacataattcagttcaggttccccatccaacacacgactgtcaccagatgatgctctactctgtgaccagatacaagtcctattacgtcttctcctgtcccaaacctcaataaaacttaatggctttctcccctgacaaccaggcctgccatggcttcctaacttgtgttaaatgcagtgtttccactcttgccaaaacaaacaaacaaaataccatgtaaaaaaatacagatttcagggccccttatctgaagaatgcaactcactcaggaatgtgcaaatttggggaacagttcagaggtgaaaagcactgatcgaagagggagaagctaaaatcaggagacctggtttctactttacagtcccacttactgtataacttctaacaaatcacttctctctgagtccagttttcatatcggtgaaagcgagaggatttgaccagatgaactgttatgttccttccacctcttgaagtcgtgcttatgagcacagagtcagaggatgtgtgttcatatcccagctatgctacttgtgaactactgtgcgcagagaactgcattctctgattcagagccctcacctgaggggatgatagtatctctccactatcccttttctcccctttaatgaagtctaaatgagatgatgcttataagcatctaacaaaacccggcacataatcaatgttcaacaagttattattactctggaattctataaattacctctgtacttcctcccttgtcaccctgaacttagtgaagtttccttcacttggttttgctcttcaactcggaccccgaaaacgctctaaacgctggcggaagtcacgcagagatgggctagacgctcaaccccggtctcttccccgaaaccgcggtgctcccacttcctgcagtccgaggttccgactcgacgccagctccgcgagcaatggttccgccctgcgccctgccccttccatgacaactccagtcccacctgcctggcgtctcttgagcccaaccggcatccgtcgcggttggacgtgggcttggcggaatggggcgggacttccagtaggaggcggcaagtttgaaaagtgatgacggttgacgtttgctgatttttgactttgcttgtagctgctccccgaactcgccgtcttcctgtcggcggccggcactgtaggtgagcgcgagaggacggaggaaggaagcctgcagacagacgccttctccatcccaaggcgcgggcaggtgccgggacgctgggcctggcggtgttttcgtcgtgctcagcggtgggaggaggcggaagaaaccagagcctgggaggtgaggggcgggcccgtcgttactttttatttgatgttagtcccagaaacaaccagagctcagttcctactaaactaacgggtgttttctggtgcagcatagaccgaagaagacgagcttgagctgaaattgttcaagttaggcatacatttatgtgtgatttttggaaaggcggtggtaatgtggtttatttggctgcagatgcttgtcagctttttacacatctccgttgccaaacgtttcttaaccaaatccaaaaccatgaatgaaaaggtaaaaatatcacacctaatccaaaattcaaaggaaaagagcagcgcatatatagcactacgcatgcataacgccatcattgttccttttaaaagttcaaggaacgttttacttaattcattgaagttgggagccatttctgtttatttttgtttaatctctgcctcgtggaactgtgatgtccacaaatagtttattttaacaaaacgaagtgtgtaaaatttaacagagtacttttagtacctactcactctgctcagcatcgtggtgctgcaaataaatgagaaaccagatgagtaattataggttaatctttgctactcgttagacagagtattactgcatatatattaagtcatttatatactttatcccacctaggagctcaaactatgtagttggaaagtgtcttcatctctcgttaatgaataaattgtaactgaaattgtacttcgaaagaatgatagaatttggatattggaggaggttccaaaaggaaatactggaagtttgggaaagttaggagactaacttggagcagaaatttca

SEQ ID NO: 4743 - DNA, 6000 bp, Homo sapiens
tcatcaataagagtgttcaacccctgtccttgaggaacttacaatctggaatccttttatagctaaagatttggatttagtagtgattctactaggtattctctaaaagctgtgggaacagcaaagtcctccaagaaagagcatgaaagaccaaaagaaacgccataaatttaaggacaaaaattttaaatattctaaatactaaaagccatttgaaatgttaacatcaagtgctaaaaacacttttacaacttaaaatagtggccttttaagaggatatacctcaatacatttaaatacatttccagaaaacgacagtgtctcaataacatagcatattgtattaaaacataaactttaacttgtccttcctattcaaactgtacctctctttatagaggtattctagttaaattaaaaataaatggtagaattaaaggcataattatttccacttgcaaaccactagtgaaataatgaaaacaggctattagtgtagtacaaagagggataaccaaatatatgcctcctgaaggaagtacacaccaatatctaggaattatacttgtcctctcccccaacactcccactcggaaatcaaacctgaactaaatttgttcagtcttcaatctagctaccaatttacaagaaatacaaaggatagagggacatattaaactaggacatgttaaatctatacctgagggacatattcatcaacatccaggatgagagaaaccggaggaaaaatggcctggttccttcaacaaatattaggttggtgcaaacataattgcggtttttcaattgccattgaaagtaatggcaaaaaccacaatgacatttgcaccaaccttacaaggaaaatacattacgaggaaaataattaagatgagggaacctatagattaaaaagtttaagagacatcccaaacaaatgtaatatgttaccttgtttggaccccaaatcaaaccaaccaattatttaaaaacaactgaggaatatttgaatactgactggatatttggcgatgttaatttttaaaggtagggtaatggcattgtggttatgactttctcgagagttatctttcagatatctatattgaaataaaacaaatgaaatcatttgtagaatttgcttcacagtaatccagtagggtctggggaaagtagataggggaagagagaaatcgtgtcgctcaactctttgtgttttgaaattttccatacttaactgttcaaaagggaaaaaagaaaaacaccattctcaggggttgccaacaaaaactgaaaacaacagtttgaattttgtctccaagccttacaagctgagcagccctggtctagtcacacaactttttagtgtccctattggttaaatggagacaaacaaataccacctaataaactcgtatttgttcaagccagaaacctgggttatatccttaacgtctctgactttcccagtctcccacatctggtctccaccaaatcctccaccaaatcctgtctgtttctctaccaaatcctgtcttgtccatcactgtggtctcacaccactccaacagcctcctttcagcctgttctccatattgcatccaaagtgatgttcctaaaacacaaaatccaatcaggttatccccagccccactgaaaatcctttttttttttttttttttgaaacagagtcttgctctgtcgcctgagctgagctgaagtgcagtggtgtgatctcagttttcattgcagcctccacctcctgggttcaagctgttctcctgtatcagcctcccaagtagctgggattacagaagcatgccaccatgcctggctaattttttgtatttttaatagagacagggtttcaccatgttggccaggctggtcttgaactcctgacctcaagtgatccacccgccttggcctcccaaagtgttgggattacaggcgtgagccaccagcttgaaaatccttcaactgctttcaatcagcttcaagacaagagcgctcctttaaaatttttttaccctcctttatcccttaaaaatccctttaatttttttaccctccttgattccttaaaatggcttacaaggccctccattttctcatactgtctatctcttcaacttctatctcttcccattctctttgacttttttatgctttagctttggtaaaattcagctcttgcattacaccctgtactcttgagtgtagcttcagtgttcatgtctggaatgttctttccacccatcatcactgtcttgcctggctagctctttcatccttcaagtctcaggttaaacagtatttcctcagagaggtctagccaaattgcttctatactaagttgggtgtcttctcacacctacacaatacagtatttgttcctacaggaacctgtacccaccctattataacagtacctacttgtttgtaaagagtatttgctgtggcaattatatatttatctgttttccagctagactataactctaggagggcaagtggtaaaatttgttcactgctgaatcctaagtctctcatggtgcctggtagccaataacaaattgccgaacatataaaattcacaacaatctggactgttttcctcatacccaagttccatcttcctagtcctcaactgcaacaaaaacaagacagctatgtaggcatttacgcagagatcttaatcttgcataggagtgagcattataaagtgaattgaaaacacgatgggaatgcagaacataaggagctgagaaatctattttcaggctgagataatttgtatccaaatttacaatctaaagaaaaatcaggagtgccaatctaacaaaaatgagtccaaagacacacatagttcccaccaaaccataacaagttttcagacctaagatgttagatcacttaatccctccagccccagtttccttatgtgtaaaacaagggatcctgatcagctggtcattaggatcctttccagggctaatatatgccctaatatttaaaggctaaaacatgtaaactagtgaaatactaatcatttgctttcatcctatagtgatatgacttttttcctttttaatctgtttaaggacattacagtctatcccgttaagcttacaactaaaccttcaaatctattcagctataaaaatcttacaaaatgctcctcagatcattaacttgcatatttaacaatggtaactgcaatctgatgaaacaacagcatctacctaagaccaaaatgaattactgaaatatattcaacttctgtgtaaataataaatcttaccacgtgttttaagtgctaaatatcttgaattgttggtcatttctatggcaatctgaaggcaaagtcgtgccccagggtgtaagacttgaatttatgggtactatttaacacctaactaaaaaactgaagatacatagtctttgcatcacctcactgggctggtggttgggataaaaaaattgttgaaaccagagtaatttttgaaaaaaaaattcaaaacaagttatagtaagttacagtaaataaagtagcttagtaagttacagtaaataaagtagcgtgtaaacattttactgttatcagtagcagcccagtttctaatcagccactggaaacccaaagaaagactaaagtagtaacaagtttgtctcctggtttagattaattacaaactagttttggcaactgcttgttccatcaaatatgtcatgacaaagtaataaaatgttaaaacgcatgctggaaaaaaaaaaagacgtacttggaacaaaaaacttgcatcggaccaagtgtaacgctatcctccagatttctctcaacagggccgccttaagtccatgagtagaagggcgctgcggcggacgctggcagccacaggttgaatgacaaagagcccccgtcagcaccactcccaggagtctgcgggctgccccgtcccctccgcaaagtctactcgaaccctgcagtcacgccttggctgtggggaatgcggctctccgcaccactctcgcaagtcaccaggtggggcaaggatcggcgggccaagaaggttggggcggacaatgtcacgaatcataaataacttctgccccgagtcccttcccttggggcagaagcggccaggagagtctggaggtaccacatgcagcagcctcatgttatcccttttccagatcaaagcatctctcgaggagcctattgaagacttaggggggaagggacttccccaccgtcaccgggcaccacgacccaactcctcggccaggcctgggaccggcatcttagcacggggcccgcggctcggctaagagaggcgctgaccccagcgcctcaaggtctccttcaccagcactgcagtccgaggccacgcggctgcctgtgaccacgatgccctctgctgggccgcctccctccgccggagacaaagtctcccaaccccggaggtcccctccgaccccaccagggcagcgagggcaccgtggggtccgcgccgcgtgccgccggctgttacccaactaaccgttatatgcgcggatcgcagcgccgagcgtgtgcgtgacgtggtggcgcaggctggagttccacggggcccagggtccggctcccgtccttcgctcgctgcctcgtttgcttgttccagtacccacgcagctagccagtcacgtcgcagctcaccactttgtctggccgggccagcgaggctgccttataacccgccggggccggagcatgcgcgcagggggcggagtcgtctctcccggccgccgccccctccccgccacacagacatccgaactgcagcccgcgcctccacacgctttcagccgcgcgcgccctctagctcgcccgcgcgcgccggcgccccctccccgccacgtgaccggcgtcccagtccgacccgcgcgctgcgcccctgctgagcggcgcggagctaccacgccctgccagactcgcccttgggtccctgtctgacgagctctaggcaatctgccctcgttcgggacacaaccatcggtctcacccctcagtttctgccagagaaaaaggaaaagtcaccgagaggcctgaccctgacgggtgggggagatgcgcgtgcggagtagcgggaagcgactgaggagcggggaatgggcagcatttgaatggatgcgggtgccgctggcacccgggaagacgctgggggccggcgctgtagagccgggcatgggctgggatgtgtttggattccaatccgggcctgacaccagttcagtgacctcgggaagttccccaaccctccgggcctgtttcctccctctgaagtggcgacagtagtagaaccgacctcgtaggctcatcgggaggtcctgatgggagaacccatgcaacttgccaccatagagccaggcccgcggcggttggcgcctggtgggtattaaagacgagtcgggaaagaagagcaggtaagagggtggggagactggcccagtgggttggggtgtgcacctcggccacgtggaaaagcgagaatgcagaggccggacgcttatggacgatgcatatgtggggccggatagaattgtggcaggcggcgctggggctgatgctcctcacccggattatcctctctaatcctcagccctgtgaagtgggcactgccctgaacattttgtaaataagggacccgaggctcagagaggtgaagtaactttccagacagcccagctcgtcagcggccagcatttgaagtcacactccagagcctgtttttaacataatagccgctgtgaccgcataaccaacgtgtgtgttgaagtgatcaaataaccatggagtgtctttgatgtccaggacttttgagaaataccgaaaaatatgaggcaaggcccctgccttcaaagagcttgcaagtttttgggggagacttaggcacaaattaaccaacatctgttgagcacttgctgcttgccaggaccctgcccttcccctcgtgtctt

SEQ ID NO: 4744 - DNA, 6000 bp, Homo sapiens
cacactgaaaagtttctgcccaccaaaggaaataatcaacagagtgaagagacaacataaggaatgagggaagatgcttgtaaaccatatatctgataagaggttaatcaccaaaatacataaggaacacaaaaactcagtagcaacaaaacaaataacccaattaaaaaatggacaaaggacaggaatagacatttctcaaaagaagacacacaaatggccaaaaggtatatgaaaaaatgctcaatgtcagtaattataagagaaatgcaaattaaaatgacaacgaaatatcaccttacaccttttaaaatggctttcttcaaaaagacaaaagaaaacaagtattggtgaggctatggagagaagggaactcttataaactgttggtgggaatgtaaattaatacagccattatgggaaaatgtatgcaggtaactgagaaaactaaaaatagaactaccatatgatccagcaaaccaatttctgggaatatatccacaggaaatgaaatcagtatatcaaagagatatctgcactcctatgtttattgcagcactgttcacaatagtcaagttatgaaatcatcctaagtgtcaattgatggatgaatagataaataaaatattatatatacacatatatttatacacacacatgcaatgaaatactcttcagcctcaaaaagaaaagacaatcccgtcatttgcaataacatggataagcctgaaggacattgtgctaagtaaagtaagccaggtatggaaagacaaataccacatgatctcacttacaagtggaacattttaaaaagttgaactcatagaagcggagagcagaatggtgattgctagaagctgtgactatggggaggaatgggaagatgttggtcaaagtgtgcaaggtttcagttagacagggtgaataagatctagggttctaacatacagcgtggtgagtatagttaacaataatgtatgtatacttgaaaactgctcacagagtaaatcttacatgttctcctaaaaaatgttaagtatttggtgtgtcagatatgataattagtttgatttaatcattttacagtgtatccatatatcaaaacatcatgttttacactgtaagcatatataatttctatttgtcacttaaccttaataaaactggaaaatattttagaagaacatagtgacatagaaaagcagcataatgaagtttttaaaatagactttttttaaagaacgatttcaggttcacagcaaatttgaggagaaagtacagaaagtttttaaataccttccccctgtcacacacccacagcttctctccacccacgtcaacatcctgcaccagtggtacattcgttacaaataatgagccaacattgacacatcactatcacccaaagtctatagtttacattggggttaactcttagggttgtgcatccactgagttttgacatatgtataatgatatatatctaccattacagtactatacaaaatcaacccactgccctaaaaatcctctgtgttctgcctgttcatcccatcctctccccaaccattgggaaccagtgatctttaaactatctccatagttttgcctctctcagaccggtttctttcacttagcaatatgttttcaatttccttcatgtctttttgcagcttgatagctcattttatcactgaacggaatattcttttgtatggatgtaccacagtatgtttattcattcagctactgaaggacatcttggcaatcatgaaaaaagttcctataaacatttgtgtgcagatttttgtggggacttaagttttgaactcatccaggtaaatatcaaggagcatgactgatgggttgcatggtaacagtatgattaattttgtaaggaactcaaactgtctaccaaagtgctgtaccattttgcattcccaccagcaatgaatgagagacttcttgctgttccacatcctgccagcatttgatgttgtcagcgtttgggattttattcattctagtaggtgtatagcaatacatcttttttgtcttaatttggaattccctaatgatgtatgatgtggagcatcttttcatgtgctgatttaccatctgtatatcatctctattgatatgtttgttcagctgttttgccaattttttaattgggatcattttcttattgttgagttctaattattcttattttttattacagttcttaatcatgtatatgatttgacatattttctattggtctgtagcttttcttcccattgttttaacagtgtcttttgtagagcagaagttattaatcttaacgaagtccaataccaatttttactttcatggatcatgcctttgatgttgtatctaaaatgtcatttacaaacccaaggtcacctaggttttctcctttttatcttctaagagttttatagttttgcattttatatttaggtctatgatctattttgagttaatttttgtgaaaggtgtaaggtctgtatctatgtatccagcttcttttctttttttctctctttctttcttttttttttttgtgattggatgtctagttgttctagcaccatttgttgaaaaggtgatcttttctccattagatttcttttgctcctttgtcaaagatcacttgactctatgtgtgggtctatcttggcctctctattctgttccattaatctatttgtctgctctttcaccaataccacactgtcttgattactgtaactatagtaagtcttgaagttgggcaatatcagtcctcagactttgttcttctcctttaatattgtgttggctattatgggtcttttgccttttcatataaacttgagaatcagtttgtgatattcacaaaataacctcctgggattctgattggaattactttgaatctatagatgaagttgggaagaactgacatcttaacaatattaaatttttccatccatgaacataaaatatctctctatttatttagttctttgatttctttcatcacagttttgtagtttttctcatatagatattgtacatatttattagatttgtacctaaatatttcatttgagtggtgtgctaatataaatagtattgtggttttaatttcaaattcccattgttcgttgctagtatatagaaaagcagttgacttttgtacattaattttgtatccttcaatcttaccataattgcttattagtaacaggagagtttttttgtcaattgaaatttttctacatcaacagtcatgtcagctgcaaagacagttttcttttaccttttccttcacaatacgtatacttttaatttccttttcttgtctaatttcattagctgggactttcagtatgatgctgaaaaggattgctgagtagagacatacttgccctgttccttattttaacaggaaagcttctagtttctcaccattaagcatggtgttagctgtacgcttttgtaaatgttctttttcaagttgagaaagttcccctctattcatagtttgctgctatacaatatgattttaatataaaaaaagcagtacataaagtagtgtgtacaatttcattccgatttttgtgacaactgtattttgcgttggaaaaaagcctggaagagaatacgttcataattgaaagtcgtcatttttggctggataatggatattttcttctccacatacttctatcttttctaaatttgccccgatgaaaaataatattaggaaaggtgattaggtagtctgaagagaatgcctttcggccgtcgggggcagtggggtggtaaggaaaaagatgagaagcttttaaaatggaaatctatgaagagagaactgatttcgtaattgcatcatcagtgggaaagtaagctctctgaggaccaggtctgactgagagatccccacagcgtaatagataatacattttgtgtctcagcgttgcctatgaaacgccatttattcacttggcatgctgagcatggaaccaggtttctttctttccaagtagttttgctaatttagagaaagagagagacagacatatacatagagagagagagagagagagagagagagagagagagagagagtgtgagagagagagagaaaagtactgaactgggagcggcagggtttgagtcaaaagagaagggtggaggagcgcgtccggtgccccaaggcttccaggcggagcgcgggcgcgaggtgcgggctccggggcggagcgcacgcccgggaggcgggaagtgggcagcagcgcccccgcctggcccctgtgcgccccgacccgacgcctccccgcccgaccaggtgcctcgagagcgcacagctgggagggctctcccggtcgcggcgagactcacgcctgcggtgtgctagggcggcggcgacggtgacgggcgtggggcgcggcgctgcctcggctgccgggtcgttgcggcgagcgcgcgggccggcctggagtcaccgggctgaaccgccgcgcctgcatcgtgccgcacgccgcggaggcgctcgggtacagaccgcgcgggcgcgcacaaagcggcccggggcggccggcgcggcgcagaccctcggtgggcagcgcactccagtcttcccaggctagcggctgcagggagctccggcccgcggcccctccgcctcaagtctgggagctgccggtcccactctgtctttgcctatggggattcgagagtttcccagcggcgcacccaggggcaagagcattgccgtgtgagtagcgccccgggcgtgggtgagcgagccggcgggcgggaggccggagcgccggggtagccctttgcagctgggacactgggcagtctgaggctcggggaagggcggcgcgcgcggtggagctgctcgggaagtttcagtcattctttccctcgccactcgccccaacccgcactgccccgagacgcccaggatagggcactggggacagctgcccggggaagtgggtgagtggcggcgggaagggaggagcgcgggctctgccgcggcgctcgcccccggagggccccggccgcgctcttgctctcgccctgggatctgctcctcacgaatcccctcctctctgtccatgctccccctgcccacccacctgcccgtggcgcctgcgaccgcagtggcatgaggaggtcaccggacgtcagcccccggagactgtccgacatcagcccccagctccggcagctcaagtacttggtggtggacgaggcgattaaggaggatctgaaatggtcgcgctccgtggaggatctcaccagcgggccggtggggctcacgtccatcgaggagcggatcctgcgcatcactggctactatggctaccagccctgggcagcgagctgcaaaagtaagaccccctcacgtcatgtttcccgttcactggtccatcttcttaccattgtcacagcagcctcggggagcgcacgcagtgaggcgtccagccaccccctcccgccctgcctgctgatacagacccaggtttgcaacttcgaggaagaggcccggagacggagttctcctggacctctgaggcgttctgatgcgttctcttacaccccttcctctcccacacacaggatctctctgtatccttatctctccactgccaaatacggaggacactcctatgtggcagaccgtgggaaacagatcagaaactcaaagtatcccggacagtgtggcttccccgcggatctgaaagtctcacagggccctcggtcaggtctcaccaggctcagatggagatgctgacttacatagccaggattttaactcttccttgcatctcctagccctgatgatagaggacaattcttggggtcttcattttggatgccgttcacgcccttctcccctggattttatcggtcttcagtaaggaggttctatagggatcattctagatagtggtgttggtccctgcaagttgaatgtttggtgtcaggtgg

SEQ ID NO: 4745 - DNA, 6000 bp, Homo sapiens
accagaaaatgatcctaaattcactcctcaaatttgtgatggtatgttacactcctaagtagagagtctaaggttttgtttgtcttatgcctgctattggaaaagagcttagacattttctatcttgtaatcattaggaaattttcaatatattcctgccaaactatgtatttcaaacaaagttctgagattacactcttgttgctctgtgctggccctggaccaagtggaagtctattgctgtgctagatgtccaaggtgacattagtttctctttcttgcccatcttgaccccacagtctctttcctacttttacagtccaagaatgaccaatatctagcaggcctcagtcataaggtattatagttatgcttcctttattttacctcttccattttatttttctacccctcatatttatagtgagtcatatttatagtgggtcttctgcttgtgctaattctctctctgaagtccacttctggttgtagcctccacactgtgccatgatgagttttattttcaacgaaagcagtctgaaatcctccttgctcattatctcaacctcttctctgaggtaggtgttccttcctctctagtaaattctattattaaagaatacatttgaaccattacccatctaaactaccaaactactcaaatacggttgacatgctcggtatatttgcaacctaatgaggttactatatcaccatggaagcaatttattaatgaaacatagctatcttacatggtacctaatgtccaaggctttgtttaagaatgacagctttccagcaaatgtaataccagttaaaccagtcgagaagcctcggttgaacaagtctcaagataacaaagaaggtgccaccaacaatttgggtgtctttcctaattattgtaaggatctcagaatatccgatttgtctctcattcaggaaatagaaaccatctgtgtattatcccaagcaaaaatataaagaaattttttaaaaatccctgacgtcaaagagtttatagtctttcaaatatattacctggaaaaataagaattttaaaaaaattttaaaatagcattaggagtgggccgggtgctgtgcctcatgcctgtaatctcagcacttttggaggggtacgtgttgtctgaattataagtgaactgacaaggatctggagggaaacaggcaggctcatgaaggaggtagcttttatgctgagccttgtaggagatgcagaatttcagctggtggaggcttggtcaagggtgaggtgtgtggtggggagagactggcattgtcatggtaccctgagtgatatacaaggctaagagatcaggagaggcagaaaaaaggaaagtatgtttgccaaaaaatacaaattccgatccatcaacatattgttagtaaagtaaaaataaaataaaagagtaagagcaaaggaaaaactatagaatgagtacatgtttctgactcaagacaacaaaaaaggatgtgattcaaaagttaaagatgctaagaatcagattagacctttgtataattacataaagagtgaatcactgatagcaatgactaatcactacgtgcatgtaaaatatacataaagtgaaatacagcagaagtttctaccagtgctaggatacactggtgttaatccttactgagcacctactaggtgacaagagctgtcctttacatgcactattacaagtaatctgcacagtgatccagctagggaggctttattaatcccattatacaagaggaaaccagggttcaaagaagttgaataatctgacctcatttgcactcctactgcacggcagagtccgaatttgacagcagctttttctggaggccattctctttaccccatgccaaaccagaatgatttatagttcaaaaggaatcaagtagattcaaggatacctccatggttatgtaaccctcattagttgtaatatgcttttatgagtgatctgaaactggagatacagtcaacactccagaaatgaagtataaaatcttgggagtgtgttacagcccatgagaccatcattgtcatgtcagtgataatagctgatgggcaggagtaaattgtccataaggttaagctctggatcagtcatttaagagaaatcagtggcaagaacatgggttttagaaacagatggccttgattcaaaattggaattctgttatatggaaaacgctgggcagaaaactttacaatctctgtttcctcatatagtcactatggtgagttaacaacaaatttatatagaaaaaataaataagcagctttggataataaaaaaaagtatatcattaagactaaggaggcttggcttcattcaggcactaacttagctgcatagtcttcagccaaatcagaaactctgaacttccttcttatgtaaaatgtggatggcaccatttaccttaggggttcattgtaagaacctgagataatgtgtattaggtatctagcatgcagctagattatgttatagcaatgtaccatattaaatcattaacacaattcttggcaaaataaatatagtttccacctcatttcattttaaacttaggctcgctctattataatgtcataggtgactataacttaataatactatagagtattaaaaatcataacaatttggtaaaaattgaacacttgggagttaaacatatttctaactttgtattgttttttaaaagataaacttcatggaaataaagtgcaacattttcattcatttatcttacagctcctaatgcattattttcactaaaagcattcccttttaaaaatacatttcattaaagtgcttaatctgagaaataatagattagtactattaataaaggcttgattttattaataagaaaattgttaaatatacttggtatctctgatacaattgttgggttgatgggtcctgtctgtgcccaatctattatgtgaaccatggcaaatatccatctttgcaaaactgccctacatccccctcaaaggaaacaaactgaccccaagacagaacttaatcactccagagtaaagcaaaccaattatagccttggccttccctgttaaagcaagtcacaagaaatgcaaatatcctagactagagctgtatacatttaatgtttgtttacacactcaacacattgtttatgaattgagcgagttttatgcagctcagattacgttttgggttttcaacaaattatttaaaaataaacagaatttataaatgtataaaaattattggctctggcgattttgcagcattgtgctaaccaagaggactactccacttttactcctttttcgtctaaatggcatcttaatgacctgcccacgctgaagcctcatcgatgctttgggaaaccatcacatacctgtcgggaaatgtgactgttggttaaggctacgtttctcacactaccgcgaaagaagtatgtgacttacaaacggctgcgatttcctttacctattccttccttcaaaggctgctttaaatggaggtaattcaagcctccccgtgccaaacaccggcactccaacaaagatggattggttcttattttttactttgaggatgggaacctgaaaatgtttcctaacgtttgctgaggctttaacatgtttaaggaatttgaaaccaagggaagtttagccgtaatactctgaaatatccgcattaggatgcgggctaggtgtccggctgttgcaaaactacggaggatgcgaggtttggaagaaactgtttggactttgctgtataccgggcaggcgtgggggttggggagggaagaaccggctgagggagaaaagaaaggcattcgtgtccacagaacacatctaaggctcctgagttgctaactccatccctaatcatctcattggtgggaaccagctggaaagggaaagatcagcgagcctaggcgtgggatgaaggcagcggttttggcctcaaccgctggcctaaacacctggcttctggggcccgcccgatcaagctgaaccccttccctcctgtcctgcaggtgagcacacggtgctctcacgtttcttcgagaaaccttccaattcctttccctgcccaaaagtgctaacttcaagggttcggaggtggcaggggggtgatagaccggaaaggactggccccggggtctcagagattttcgaggtaggaaagaacaacgatcgccccggccacggacgcatttcccctcgcggaccgcccccccacccccgcgcccagtctgcaggacctgccgctgcggcgcggcgttgggcgccaggctgagatcctcgcgcggccgctcgggctagcgcggattgggtggggtaggggttggcgggctcctgagccgcagtagcggaaggttcccagcaccacacgccgggcgggcaaccacattctgcctgtctgagagccggggggaagcaaggacgcgagtgaggcggggcgagtcccggtccggcgcgcacagcggaccgagcgggtggccctctgcgggctgcccctctccatccctccgcggatcccccgcccttacctccgggcgcgagagtgtcgactggagaaggtgctagggagcggcgagctgcctgggggtcgggctcagcggctgccagggacggcggcgtcgcccgcggggtcgctgctcatggcttgtcgcgcccgagcactgcggccgcggccacggcggcgccttcctcctacttctcttcgcgggcttccagccgggacgcagctaacgccccagccccgcaagccctcctcccctccgcctccccggccgcggacggagccgcctccagcgccgccccgcacgcagcccggctagcggcagccagcgccgcccagcgcccggccccggggtcgccaccgcccgccgagtcgactccgcggtgccagccccgctgtgacgcaggccgcgccgcccgggaacttcctcccctgcagagaccacctcgctcccgggactcgccagcgagggatgccgccggccgccgggggccttctccaggaccaggagagaaatcctctctccgcttcacgacgcggccactcccacccctgagacgcccacctggcggactctgagggaggattcggctgcgtctaataccacctccacccctcatccctcacaatgcgcggaaaaccacaggcggctgtgcgcgcagcgtcggctcagccaccgcagctcctcccctgggtaagttagaggggagcagccaccactaaaaatagcccttctgggaactcctccgaaggccagggtcaggatgaagataacccctccacaggagaagcgaaggcctcctaagagaagggtggggaggggacggtgggatagaatgaggaagatggagaaggagaaaagcaaaacccaatatccttggatcatgaagcccttgagccccttgacaaccaagtctcctttcaggccggaatccccaactgcaccgcccctgcaatacgggctaaggggcagattccagggagactcagttggaatgccccgcctacagctcccgcataaaggagttgacggtgcacagcaaaaccacctgttgtttaacgagtatggagggaggggttctctctcattgattgatctgaaccgtgcttttcttctccccattttcccacccaatttcaggatgaaaaagcactctgacgtcttgaaagctggcagctctctgtttggaaaatctctgcccagtgaaaaaatgtaccgacaagattactaagtaacacagtcttctgggaatgccttatcaatgccagctatttgaagagcacccaaagtcaaactagtgctccgcgctggcagtctggaaaaggcagatgtatgtgagtagagaaactgatagacaactagttgctggccagttggcctgttttcgtgctacaagccttcagaaaacagtcgcctccttttaccacgtttctatttctaaaccaaaatgaaaag

SEQ ID NO: 4746 - DNA, 6000 bp, Homo sapiens
gctcctatggcatggcaagtcctgtgtctggggattcctgctcatttggggtgggtggaggatggcacagacaggcatgtggagaagaaagcatctttaaaaaaaaaacacagctaggccaggcgcggtggctcacacctgtaatcccagcactttgggaggccgaggtgggcggatcacctgaggtctggagttcgagaccagcttgaccaacatgaagaaaccccatctctactaaaaaaaaatacaaaaaaattagccgggcatggtggcacatgcctgtaatcccagctactcgggaggctgaggcaggagaaccactagaacctgggaggcgaaggttgtggtgagctgagattgtgtcatggcactccagcctgggcaacaagagcgaaactccgtctcaaaaatcaaaacaaaacacagctccatagaacgcctcaaatcttttgtgatagccttatctcggacaaatctcttcccttctctggactcaatttccccatttgtcaaatggagggctgggccatggctggaaggcccctcctgctctgggttccttccaccctctaatgtcatcctggaaaggctggcagcatgtcttggggtgggaggctcagtgtgtgatcttggcaaagtcattttttattggaccatgaggtcactgtaacttgtatcacagggcagttgtgaggacccttggagttaatggacatgaatgtccctttcaaactatcccaagggtgacccaaattcagaaaggtaggcaggaagcctaaggcaaaaaagcaaagcaaagaagcccaaagcagcgcagggcactcacatgagctgaccctccctggcctggcactctcacccatgtgccatgcctactcacttcccaacaagcccctactaggaagaatgggttagtgggagctttaatgatttacctgacttaatacccatgggccagcatcctgactccccaaaagctcatactgccagaatgccagcttttggataaaggccaaggcccaggtacaagtcacccacagcccaggtaaggcatcatgggagtccaaggaagcaagaaatatttatggagcatctatggggacagagacgtacattcttttctgaattcctagacactgtaatgatgaaaactgggcaactaagctaagctgggattcaaaaccacatatgcaaacatctatgtttggccgggtgcggtagctcacgcctgtaatcccaacactttgggaggctgaagtgggcggatcacctgagctcaagagttcgagaccagcctgggcaacatggcgaaaccctgtctctaccaaaaatacaaaaatttagctgggcacggtgacgcatgtctgtggttccagctactcaagaggctgaggtgacagaatcgcttgagcctgggaggtagaggttgcagtaagccaagatacttgcctgggtgacagagtgagacctcgtctcaaaaaaagacaaaaaacaaaaaactatgctgtctgcaccacaaaggggctgagaaagcctgcagatttctgatttttccttttctggaaggtagagactggccagaaaagtgatgagtgatgggcataggcaaggctagttacaagttcttcacgaagggtggggtgagacatctggggcagggctcacccttgcgtgctgcccaggagagatcgtgggcgaacccctggcttgtaggcaaggtgattccatctgtcccctacttcctattcagctaagctcattactgtgagttacagaggagcacaatggaacacggggaagttagttaagtcagttcccatttcctaggagacaaagaggaacatagcagaaccaaggctttggagccagacacacctggttttcagatcttgtgtgaaaggcaagcgatatgacctccccaggcctctaacatcatgcacaaaaaggctgtgcttgcaggtcaaatcagcagtctccaaagggaagggctttattccagaatgtatatggaatgatctacacaagatttggaggggaaaatgactataactgctgtcttgtatctatctgtcttttgaaatttctattttatgaaggcatatcatctgttagtatcaaactgcatgtgcatgaatttaaaaatacagccgggcgtggtggctcacgcctgtaatcccaggcctgtaatcccagcactttgggaggccgaggcgggcagatcatctgaggtcgggagttcgagaccagcctgaccaacatggagaaaccccgtctctactaaaactacaaaaaaaaaaaaaaaaaaaaaaaaaacattagctgggtgtggtggcacatgcctgtaattccagctactcgggaggctgaggcagaagaaacgcttgaacccgggaggcagaggttgcagggagttgagatcgcgccattgcactccagcctgggcaacaaaagcgaaactccgtctcaaaaaataaataaataaaaataaaaaaataaaaatacagatacaccactgtgaaagaggtgttccaacattaattactgacgaggtagacagtggaaaacttggagaacactccatgaagagcacccacctgctacactatttagaaccagctggcacaaggggccacctttgaagataggcaaactctctcccttctgcccaaaattcaagaaatgttgtggtgaagagagacagtggagacagaaatgaaattaaatctgatgggcctgggttcaaatccagttcaaccacttactagctgtgtgactttggcaaacttatttcccttctctgagctccaggctagtgagtaaccagcagggctataaggtccgtgacgcttaaagtagtttggctaagaacctgctgattttctcctccacttttctgtctccacgtagtattcccttatccactcaacaaataaatacccatgtctggcatagtatgctgaatagatagttccttccctagaggaagtgacaaaagtgatctctttcagatggaaaaactgaggcccagaagttaagtggcctgcaagagccctgagatatttggacttccttgccactagctagaagagcttctcactgaacttttgtttagttatatcccacccttacggctcacctaagatcctgggagccttccccgggaacttccccggggtctcacctcaagcgagggcccaggaagggtgaaccaagtcgtctggatttatggattcaacaggtgtggggcggaaggccttttcctgccgagggtgcggcccagcgccaccccgctcagtctcagcgggacacctccacagccagtaggaagggcagttcaaaattcagtgctacccccgcgtcccagctaagaaaacaagggccatccaggtgccctcccagctgacgagatggaaaaatcaaagtataatagataaagagggaccgtttcaaaagaaaaaggggacttgaaaatattgtagactagggggaggaaaggaggtggaaagaaacaatgccctacacacaggaggggctccacaaacaatttgttgaaaagaaatcgctctgcggacgctacaaagatgccctgcaggacaagcccacttacacagaaaaaaagaaatcctatctagggagttgttggtccccagagtccccatccctcattccccaaccccgtggcgtgcgcgcttcccgctagacttcagcctggggctctttcctggcccccagatcccccgcccctccggttgcgctccccgcctggccccgagggtaaacctgcctccgcggaacacatctccgcgagactgggccaaagctttggggcctgcactcctcgcaaaggagagcctccgagaccggaggttcatctcaacccccgcgttcgagcccgggcctggagaaaagtgccctcccctcggcctcggcctcgtcaccgcgggggactggcgggaggagtaggggaggccggtgggacacctcgcaccaggccgcccacctacaggggcgtccgggctaggggagcagacggagagcgggggcggctcctgactcctccgcgcgccggggccggggccgggccgggggctcggcccgctcagccaatgggcgccgcgctcgggccccctcccccgcaccgggaggggccgaggctgggctgctgctgccgaggtcgtgtgcgacgtgccgctcccgggccctgtgtccccagccccagcagggccgcgtggacggcgcggcgcccccggaaggaggccatgtgctcagtgccggcgccaactacgcacgcggcgccctccggcccgctagatccgaagcccatccccactgcggccagcggcccggcggggcgctgcgctcgggacccgcaccgagccaggctcggagaggcgcgcggcccgccccgggcgcacagcgcagcggggcggcgggggaggccctggccggcgtaaggcgggcaggagtctgcgcctttgttcctggcgggagggcccgcgggcgcgcgactcaccttgctgctgggctccatggcagcgctgcgctggtggctctggctgcgccgggtacgcgggtggcgacgggcgtgcgagcggcgctctcccgctcaggctcgtgctccggtccggggactcccactgcgactctgactccgacccccgtcgtttggtctcctgctccctggcgtgctcactcggggacccgcgactagcgaccggcacgctcgctgttgctacctcttgcctcttgccagagagcgcgcggaccgtagcgtttataggaccccggccattggctggcgacgccggtgtgtcaggggtgtgtgggcaggacctcggggcggggcctggggcccagcctgtcctgggcggcgctctgcggggagggggtgaggggagtggccggggccggggccccccctaaccactgcctcgctcaggctgccgatcggctcgttctctctgcgttgggaccgcggagggcattcgctgtgtgactcagggcaagtgtgcgcacctctctgagcctccgcggccttctctagcaaaatggtggagccggtacccggctgtaaggcaagctgggatgcgcggagtagcgggtggaaagctggactggagttctcactcggccgctgggtgacttcggtgcactagggatagtaacagtaccacctcgtagggttgtagaaagaccaagtgagttaatatttgtaaagtgtttagaacagcgtctactgcatggaaagtagtatttatttgttagagagactccaggaggtcttgcccagggattgacttctcccttccctgtctccaccccccacattcccgtttgtgagccaagccttgcttttgcaccggccgggctctcttgcctggaaatgcatacccatctcaaacctgggctttaaaatcacctcctctgggacgccttcctctacttctcacagttcaggtgagtctatggtgacctgtaagtgtggaaaatatgaaaggcaggctaactgactgacatgataggacattaaggacatgatagacctcgggtttgaaccagctcaactgtatactggcccggccgcgatcctgggcgagttcctggccagtgaggctgttttcgtttttttctttaatttttttttttctcagacagagtctcgctctgtcgcccaggctggagtgcagcggcacgatctcggctcactgtaacctccgcctcccggattcaagcagttctctgcctcagcctcccgagtagctgggattacaggcgcccgctatcacccctggctaattatttttatttttagtagagacggggtttcaccattttggccaggctggtcttgaactcttgacctcgtgatccacccacctcgcctcccaaagtactgggattacaggcgtgagccactgagcccggccgaggctgtcttcttatgagtaaatggaattcccacaccaatctcattgctatcaggagaggtgcaatttccag

SEQ ID NO: 4747 - DNA, 6000 bp, Homo sapiens
ctgggcgctaatagtattaagagagccaatttctctaatgttctctttcttaaaattgaactgcctctgttttcaatcactcttctcccacttcatagaaagaacacatacctgtcattcatcccagatctttccacgctacaatgctcaggggtataaaaatataagggttctaaactaagggacaaaaggggcttttccataagaaccaaagagcaaaaagaaagagcatctaggtaaaattcaatgaagggggctgatcttgtttcagtcacaccacaaacacaagtatggctctgtgacttaactctgtttctgtctaataatgagaactaaaaaatatgatagatcattgtgataaggacatattcaacaactttatctgaatttaaaaacaaagtcagactttttctgacagaaaatttagtctatcttggtccactggctttacaatgcagactggcttttgccagttaggctgtttggtagacattcatgcaaactaagtagcgttaacctgcgaatctaaaattttgacaaatatatgcttgaaataagcacacaataaattatatgccagaaattaccttctctgcaactacttaaataagcatttttaggtatcagtttaaaaatgtatgagggggcacagattttcaaaactgttttaggaggtctacatgtaaaaaactttaaagtcactgctacatgttaattagaagctgtggaaaccttttctacagtcattttaccagactttcccaggtagtctgaatgtggcccttccctgaggcagaaggatggaattaaaccagtttccatagttctttcctagccctagaattcatagaaagccaacaggataagaagtaagaaaaggaatttattgctcacttgaaaaaagcaaagctctgggacaagcaccatggtggtgtacaaaagatgaatacatggttcctctaccctcaaaggttttggggcagggtgcagtggctcatgcctgtatctctcagcactttgggaggccaaggcaggagaccacttgagcccaggaatttgagaccagcctgggcaacatagcaagactctgtctctacaaaaaatagaaaaataataaaggatttggaattcagcagggggaataagacacaaacacaaagaactaacaaaaaggctgcatggcagaaatgctgaaaaagagttagcattaaccaggaaagcacatcatatgtctaagaaataaaaagcaaatataatagacatagaacattgactttttttttttccctgagacagtttcactctgttgcccaggctggagtgcagtggcgtgatctcgactcactgcaacctccgcctccagggttcaagcacttctcgggcctcagcctcccaagtagctgggattacagatgtgcaccactacgcctggctaatttttgtactttttggtagagtcaaggtttcggcatgttggccagactagtctctgactcctagacttcatatgatccacccgcctcagcctcccaaagtgctgggattacaggcgttaagccactgcgcacagctgggcattcaacattattgtaaaactatttccaagtgaccctgagggtccaggatactggaccttggatatgagtcagtgatttctctggcctataacttagtcatgtactttgaagttagaaatggcagggaaaggcacttagccattgagagaaccacagtgatcccccagcatctaaaccttggaaccatgtacacattaaggctctagacattatcttcacaaagaatggctcccaagataaagttaactactagtgctgttaatgaaagtgagcagaaagaggggcattaaaaaagtaatggttctcaccagaaaacagacattttatgaaggtaaatactcaaaagttcaagatttaaaagtctcaagatttatccctcaagaatgtcaaggatctagtaagcttgaagagaggaaatggagtaaaagggcttcaatgccatgacaagaaaatgggattttaatccacaggccacaagaaactaataaaagaccaaaagagctagattgctagtggagagatgagtgccactgcctgtgtaaggtaaagcctgaaagtgaatacgggcatagaaatggacaggaaggtgactgaccagtggaaaagactaaaaagaacttagtggccaaccgatggtgggaaaacagaagaggtggaaaaggaccgagtttgagccctgtgttgccaaggtggtgaggccatcaatagaaacagggaaactggctggtctgaaggtagtgagttatctcagttgattgttcagtcagttacagattaaactccttgttctattctttcctcccttttcactactgcacttgactagtcgaattaaaaaaaaagaaagaaagaaacaaggaaattgagaaaaggacaaggagtagataccggagcctgactattgttttacaagaaaactatcagaacatggaattgctgctcctaacatcaaagcaaagttcaaaaagtccaaaaacacaacagctaacaccagggctaaaaatgaaagaatactcacctcggtatgaactcagtaccacctgctgagcaaggtcccaaaccttgatgctaagaagcaaaagcaaacagacatttaatcttgacctacactatcaacataaaaacgtgttcaaacaagaacttcctgtaatcaacattccccaagtctttgcctcttggactgctgctatggtctacttacgatggactgcaaaatccctaaggaaaccttatagacatgctaaaataagtcactggattcttagaataagcccaaaatgttacctaatgaggttaacaggataggaaaggcacccacaggaggcttagagacaggagcaatgagaacagggacccaccagatgtctttgctaccactgacagcttgtgtgccagagctcaagacactgactgtagacacaatgtcatcatgctcatacttgcagaacttgctgacaataagtgtctcattctcatctagttcccacaattcaacagcacctgttgggggtagggtaaggaaaacatgagcttggattataccaaggcagtaattcacttctaggattcaaagagccattgtcactaaattaacaaagtaagttagttattcctgtaaaagcaaagtccacatcattggagagttcagctaatttctgagtctttgactttattctgcgttactgttttcctaatgacagcccagacaagtaggtgcagaaagcttccagaaaaagacaaagatggaacagtctgtaaaattcattatctgcttttagtgagagaatatggaaaatgagctgcaaggggacaaggatgaagtttccacaactgtttaagcagcacactatccagtgatgttaacacttccccaatatttggacactagtaagtatttgctgaactagttgaataaatgtcttgcagagtctttaaaaatatgttgaataattgaacgtcttgcacagtgactggttaagtatagagaatccgccaaaagttgtcttgattatgtagtgttcaagctcaactgtcagagaggttaaatctatcaaaaactgggactttaaacttccatgcaatgccggccaacttccaaattctgattttaaaaaaaaaaaaagccaaagcctgcatcgctaagcctaacagtcaacaaaaagaaagcagaatgaagacaagaaagcggtaagaaatgggaagagacatgtagcacagattggcttcaatgtcatcttaaaatcaagattatgcttggtctgggctgtgggggttaaggggcaggttacacagaagaaaaatggttccaatccgttgcttaattttgttacggatttttctaggaaatctcaccagacaatttagaattttagaaaaggtatttcccacctacacaagagtttgcattcggggccaacactctcaggctcctccaagcactgagtataggacgttagatattgagctcaaccctacggtaccccaagtctccattctaccgttccacccgggggtgggggtggataatgggatagtgactcacctgaatcggaggccactagaatacctctctccccaacccaagtgaggtcagccactccagcctccgtttggactccggcggagcagaagccttcgttgggggcggcacaggggtccttaaaaagccagagggagccggcccagcagcgcccactcaggctggaggccccgaggagaagcgccccatctacggggggtacaagctgtcagcgcgtgaagggtagaagggttcgcctccatggagaccgcacagaacagcgttccggccgggtctggatctgagctcaggaacgcggggcagggctggggacagctcggtgacgcgacccagggtcaggataacatgcagggcggggatgggctgggagggtcagtctccggggaggggcgccctgggccggggtaagggagctcccaggcccgggatctcggctcaccggaccggtaccgcgcagcctccaactgccgttccatgcaggcgggcgcatttgggggaagattccactcccgggccgccgggggcactagggggggtggggtttccttccgcatctccacggttccaactccaacctagactcaaactggacgccggccggagactccgctccggcagcaaaccccacgtggtgcacctctgagcctccgcccctctcccgagggaaccgcaactctacttctcgcgagaattgcttctatggctccatcctgctttccggctgtcgccctcatgcgataggctctcagcgttacttgactcttctcgcgataattttttttaaaaatctcccaaggaaagttgaaggaagagtacaaaattttcatctcgcgagacttgtgagcggccatcttggtcctgccctgacagattctcctatcggggtcacagggacgctaagattgctacctggactttcgttgaccatgctgtcccgggtggtactttccgccgccgccacagcgggtaaggggtatagaccctgctctggactatcagagtgattggaaagaagcgaatctaggggtgacagggaggggagaagggcgcagcgacacgggcctgagaggcgagtggtcagtgcagttcggaagggagcgtggggtcttgagggacgggaaagaggggtacataggcttagtgatagagcctggcgggggtaaggaaagggcaaaccagatttcatttgactttgctgaccttcgccttgtctatctgcagccccctctctgaagaatgcagccttcctaggtccagggtaagtgtgaggataatgctccctttcgtctttgttttcactaccttttatttcccgattcctgcccccacccccttagctttaggtcagaaatttctttccgataattttgggacacttaaaccctctttcagacaagacacttgttcctgtaactgccaggaacgctctcatgtcacctaatgaccaagattttagcaggataagtaacgtattctaactaaactagaaattggttttgctgtcttctatacccgccctactcctttgtgaccttcccttgggaccttatgacatgtagcttccacagcctgaatccgagtagatgacatacccaagaataaattttgttcaataaaacagtaaagcatgttgtttacagtcggtttcccagatacctagtttttgctgccatatgataacaatcagagaaatcattcattgattcagtaaatatttatgttgcctaaaaacataaccaaggatacaagaatgagtatggctaattacctgccctcatggagctcacagtctaggaatgggaggcaccttaagagtattggtttagagtgagggctccacagccagtacagggtccctggcccctccacttactggctgtgtga

SEQ ID NO: 4748 - DNA, 6000 bp, Homo sapiens
agcctgtttctttaaggagaatacagtgtatgaataatgagcagaaacaataaatagggttgataattgaggcagttttctaactctcataatggaaagagaatggactgggaatgggaaggttagggtccagtaatcagctgtgacaacagcaaagaattaatcacagacatttaaccttctacccaatactggaatcccttctatcagccttgcagatcatctgtctagcactttgtatgtctatcattagcactgaaatatgtaagaatgtggacgtggcggtcagataggcatcttgagttcaaatcctagacctgctccttgactttgagtaaagaacttaagcttttgtaatctcagatttctctcagtaaaatggaaatagaagataataccttatatggttgttgagaggattaattgagttaatatatgtgacgtgcttagaatgatgcctggcacatggaaaagttctacgtaagtggttagctattatatgcctgatatgttgtaagctcctggacctttttgaatactctctttgatgagagtgctaaacactatatgtaacagactttttcagtactgggtagctctaattatgttcatctttgaattgagatgatacatacattcttggaacctcaatccattcttagttctaattttgcttttctatgtaagataacacacatgtacctgggtcaaacatctgttccctcacaatcctgattgcccgtaaggacttctctggttttatcttttttttttttttttaatgaggtatacagaactgaatataatactttaagtatagtctggccaatttattcatcctacaaatacttattgagaacttactattgccagtactgagcttgaacaattgaactattatcaacagtggatttggaaactattcttgtattaaagcagcttaagactacacttttaacagttacagcatactgatgtctccttaagcttctgatgaaataaaatctagtccctttatatctgctgtcatttagtctccttcaagttttcagtgtatttctgtcccacttcctaccctccattcctccaatctctcaacttctatctccttgtaatataagaatttacattatttcatttattttggtacaatgcttatcttttgaatattatttctgcctccaaatatattagctaccccaccaggttttgaaatctgagaatcatgcttgagattccttcatttacatcaaggtttctcaattcagcactaccgacgtttgaactggatatttctttgttgtaagaggttgttctgtgcattgtagaatgtctggcagtatctttgtggcctttatacaataggtaccagtagcccctccctccccgacccatcctatggtaacactgaaaaatatctccagacattgctaaatgtcacctgcaggcaaaccaccccaggctaagaagcactgatttaaatcatagcactaaatggtatgcttaggctgacaagtctccctaactagctaccttagttcaagtccttatcacctcttgcttagtttaacaatacaaaacctggtctctctgcttattttatttatttttttgagacagaatcttgccctatcacccaggcgggagcacagtggcatgatctcagctcactgcaacctccacctcccaggctcaagtgattcttgtgcctcagtctcccgagtagctgagtagctgggattacaggcgtgtgccaccacacccagctattttttttttttatttttaggagagacggggttttgccatgttggccaggctggtctcaaactactgtgatctgccgtctcggcctcccaaagtgctgaaattacaggcgtgagacactatacctggcctctgcttcttattaaataccccaacttaaacctagcccactcacattactgccaatgtttctaaaatgaaaatctgacttgaaaactcaacaggctctctcctgcctacagaaaactacttaatataacatacataatctagtacctgtcatttttttttttttttgagacaaagtctcactgtgtcacccaggctggagtgcagtggtgccatcactgctcactcgcagcctccacctcctgggctcaagccatcctcccacctcagccttcccaatagctgggagtacaggtgtacaccacaatgcccagctaatttaaaaaatttttaaaaatttttgttgttttgtttttgtctatgttgcccaggctagtcttgaactcctgggctccagtgatcctcctgccttggcctcgggattataggcatgaaccaccactgtgcctggtcctgccaaattttataaccttatcttccttcattctcttactctcctggaattacttaacagctctcaaaaacaaacaaagaaacaccacaaaaaaattgccttatgctgctccttctgccttgtatgcccttcataccatgactttatagcaatgactatcaagaccaatcaggagcaatgactaccaagaccaattagcctccagatttgtaaagccctccccccattttgggctaacattcattcttttaatcaattaaaaaaaacatttactgactttctactaatgctaggcaccggtaacatggcaatgaacaaagctccagccttcaacattctagtgggggtatgggaagggtgagtgtgtatctccatacaaaatttcaggcagctctaagtgctatggagaaaaactgagcaaggtaagcggatagggagcaacaaaatggggaagagttttttggtagggagtcagatgacatttgacccaatcatctggggaaaagagagaagagcaagtagaaagatattgaggcaagaatgcgcttggtagttttcagaggaacaccaaggttggagaatgagctaaaaagagaccacaaggagatggtgtcaagagataggatggaatcaattcatgttggaccttctgggttatgctaagtttggattttattcaagtgggatggggagctctggaaggccttggtgggggattgacataatcctcctggctattatgagaatgggctgtaatgggacaagaatagagatgcaagactaattaagagactactaaaatacctaggtgaaagtttatagtggttcctactttagcggtagtggaagcagcagtcagagtccaaatttctagaggaagagccttgctgaggtactggacatggagtgtgaaagaaaaccaaggatattccttgtatcttgtaagtataagttatttactacctggtattacaattatttgtttaccagtctgtatggggtcctttttcttctaagttggaagcagtcaattatagccttactttttgcatacatgagacttaattatagataagaccactttttcaagtccattttttttcaatttgagttaccgtattttgcaagctttagaactaagtttggaagtaaaaagagaaatctctaggaaaatggacatgtcttatggaacaattttaacggtaacagctgctaaatttactaagcacacgctatgtaccaagaactgtttttgagtttcacagcaattgtctcttaattctcaaaagccacaatgcactattatcgccattttatagatgaggaaattgaggtcacacagccagtaagtggaggggccagggaccctgtactggctgtggagccctcactctaaaccaatactcttaaggtgcctcccattcctagactgtgagctccatgagggcaggtaattagccatactcattcttgtatccttggttatgtttttaggcaacataaatatttactgaatcaatgaatgatttctctgattgttatcatatggcagcaaaaactaggtatctgggaaaccgactgtaaacaacatgctttactgttttattgaacaaaatttattcttgggtatgtcatctactcggattcaggctgtggaagctacatgtcataaggtcccaagggaaggtcacaaaggagtagggcgggtatagaagacagcaaaaccaatttctagtttagttagaatacgttacttatcctgctaaaatcttggtcattaggtgacatgagagcgttcctggcagttacaggaacaagtgtcttgtctgaaagagggtttaagtgtcccaaaattatcggaaagaaatttctgacctaaagctaagggggtgggggcaggaatcgggaaataaaaggtagtgaaaacaaagacgaaagggagcattatcctcacacttaccctggacctaggaaggctgcattcttcagagagggggctgcagatagacaaggcgaaggtcagcaaagtcaaatgaaatctggtttgccctttccttacccccgccaggctctatcactaagcctatgtacccctctttcccgtccctcaagaccccacgctcccttccgaactgcactgaccactcgcctctcaggcccgtgtcgctgcgcccttctcccctccctgtcacccctagattcgcttctttccaatcactctgatagtccagagcagggtctataccccttacccgctgtggcggcggcggaaagtaccacccgggacagcatggtcaacgaaagtccaggtagcaatcttagcgtccctgtgaccccgataggagaatctgtcagggcaggaccaagatggccgctcacaagtctcgcgagatgaaaattttgtactcttccttcaactttccttgggagatttttaaaaaaaattatcgcgagaagagtcaagtaacgctgagagcctatcgcatgagggcgacagccggaaagcaggatggagccatagaagcaattctcgcgagaagtagagttgcggttccctcgggagaggggcggaggctcagaggtgcaccacgtggggtttgctgccggagcggagtctccggccggcgtccagtttgagtctaggttggagttggaaccgtggagatgcggaaggaaaccccaccccccctagtgcccccggcggcccgggagtggaatcttcccccaaatgcgcccgcctgcatggaacggcagttggaggctgcgcggtaccggtccggtgagccgagatcccgggcctgggagctcccttaccccggcccagggcgcccctccccggagactgaccctcccagcccatccccgccctgcatgttatcctgaccctgggtcgcgtcaccgagctgtccccagccctgccccgcgttcctgagctcagatccagacccggccggaacgctgttctgtgcggtctccatggaggcgaacccttctacccttcacgcgctgacagcttgtaccccccgtagatggggcgcttctcctcggggcctccagcctgagtgggcgctgctgggccggctccctctggctttttaaggacccctgtgccgcccccaacgaaggcttctgctccgccggagtccaaacggaggctggagtggctgacctcacttgggttggggagagaggtattctagtggcctccgattcaggtgagtcactatcccattatccacccccacccccgggtggaacggtagaatggagacttggggtaccgtagggttgagctcaatatctaacgtcctatactcagtgcttggaggagcctgagagtgttggccccgaatgcaaactcttgtgtaggtgggaaataccttttctaaaattctaaattgtctggtgagatttcctagaaaaatccgtaacaaaattaagcaacggattggaaccatttttcttctgtgtaacctgccccttaacccccacagcccagaccaagcataatcttgattttaagatgacattgaagccaatctgtgctacatgtctcttcccatttcttaccgctttcttgtcttcattctgctttctttttgttgactgttaggcttagcgatgcaggctttggctttttttttttttaa

SEQ ID NO: 4749 - DNA, 6000 bp, Homo sapiens
ggtaagagaattgcttgaacccgggagatggaggttgcagtgagccgagatcacaccactgcactccagcctgggcaacagagcaagactctgtctcaaagtaaaataaaataaaataaaaaattagctgggtgcagcggtgcatgcctgtagtcccagctactcaggaggctgaagtgggaggatcaggagcccaggaacttgaggctacagtgagtggtgattcctccattgcacttcagcctaggtgacagagggagaccttgtctcaaaagtaagaaagaaagaaagacataaataaataaattttatcccttattctcttcttaaaatgtgacactggctgggcgcggtggctcatgcctgtaatcccagcactttgggaagacaaagcgggcagatcacgaggcgggcggatcatgaggtcaggagttcgagaccagcctgaccaacatgatgaaacctcatctctactaaaaagacaaaaattagccgggagtggtggcgtacgcctgtaatcccagctactccagaggttggggcaggagaatcgtttgaatccaggaggcggaggttgcagtgagctgagattgcgccactgcactccagcctgggtgacagggcaagactccatctcaaaaaaaaaattaaaaaatgtgacattaacattcatccttgaggtggggtctctgttccctccccttgatcatgggcagacctttgcaattgcctcaacagtaagaatgtggtgaaggtgccactgcatgacttccaaggacgggtcctgagtggcaattctcttcagtctggtgctctcctactccctctgagctgctatagaggatgttcagctaccttgaagctgccatgttggagaaacttcatggaaagcccacaaagagataaaggagagaactgtccaagcaactccagctgttccggccccagcggttgaaggcttcccagtactgacatcagacatgtgagtgaagaagccttctaggtgacatcaggcccagccaccatctgactatgaccttataacagaccccaggccagaccgaaccagcagagtcactctcaaattcctaatccaaagaaattgtcattttaagctgctgaatgttagggtgatttgttatggtgcaacaggtaattaatacatcaatgtgtgctgtccagactgtgaaactcatcctctttccataatttccacacacaaaaagaaaacttactcacacaaggcctttcttgtggttagcccacaaaagatggagagataagtgatgtgaaacaaacaacttaaaattgaatttggacatcccagttctaaaaatcctttataggtttaccccacccaccccaagcaatgcccaccatccctctcttacatcctcctcctcttgctctcatcttccaacaaacttcaaattcttcttcactctgttaggcagagcaattacattctctcaagctctttctcccaaactcagctccaggacaacctttcaaaatccagagccctttgctaacctgcccaatggagttggacttttctagcttcaactaggttcatcattttagctgatctgcctgtggccagcttccccacattggatgccaacctagtaaaacagtcatccataaatcataaggaaagctaaaatgtatcaagcacctactatgtgctggttcgaggttaaatgcctcgcatgagtcatctcattcaatttccacaaaaaccctttaagataaggacaatttgctgggcacggtggctcatgcctgtaatcccaacactttgggaggctgaggcaggcagatcacctgaagtcaggagttcaagagcagtctggccaacatggcgaaaccccatctctactaaaaatataaaaattagccaggcattgtggctcatgcctgtaattccagctactcgagaggctgaggcaggggaatcatttgaacccgcgaggcgaggttgcagttagctgacatcgtgccactgcactccagagccttttaagactctgtcttaaaaaaaaaatatatatatatatatatatggactattagtatccccattttacagatgaggaaaatgagacttcatagagtttggggtgcctgtggtcatatctataattgtgaaaaagtcagattccaaagcattttaccaatattgcctaagtgagtgggagggaagggaaggctctctggagtcgggctatgctggacagcggggttcggaaactctggtgaataaagtggtagttgtttctatgaacatggagtgagaaggcccaatcctaaacacaccagtgcttaaggcagctgcagagaattaaaggcaatagaaaaaggggagctggatggcaggagcttggatggggaagacttcaagggcaggtgaagatgccaacagcttcctgcctggaggaccgaagaagggttgggcttcactgcagacctccaggagacagatttgcttgttgggacagagtagggaggtgaaagcgaggtgaggaagttcgggggtgggggaggtgcacacagctccactaaagagctggaagaggccgatggagtattcatgagacggctgatccaggaaggactgtggcatattaatatggaaaaggcctgtttgtttgtgcttggagaggaaggagccagaggagaggggagcaaggtgggcgggagctggggagagcctgcagcaagatctgcagagcccgaggtgctctcggcctgggccctggagaggacgtagggtaagtgatggggcacaggctgtgcgtcagggggaaggtgctggggcctgaaggtcccgaggggaacctcagacggccttatgccttctcacaaagaaactggaccatcatctccgacccgcaccccggtcgcccctcgaggacagagggtgggcgcaggaggctggaccgagcggggcggagctggatgcctggcgccggcctccctcccggcaaccccgccggtcctctcaggtgacagctcacgccggcccccgccccgccccccgcatattcaggagccccagcccaccctgcccgcgaacagccagcgctggaggagcgccgggagactctgccgtcggtgcgtgcgcggacacgcacccgtcccccttggtctcgccgccagccatggccgccgctacggcctccccccgcagcctccttgttctcctccaggtggtagtgctcgctctggcgcagattgtaagtttcgcagcccctccgctgccagggtccagggtgcggggtctggagtccgggatggaggagctctgcctgtgtcccgcgcctactgacacccctagcccgagaggccacctgaggacagcgccgcgggcaggtcccctcggtgggtgcatacatggtgcccatcgcggcaccgtgaatggaggtggctgagccggagagtcaaacgggacccgtccccagacgcgcggcccggcccgggacaggcagcgtggggcaggagctggcgcccggtcctggcagcccggggagcccaggtggcggggcatacaatggtgctcattcacccgctgcgcagcctccgcccccgccgcctcccagggggcgccggctccaaccagacgccgctgtcgccccgaggcggcctctcggccctgcccgcctacccacgtctcccttccgagggccgccgggggctgcgggcgcgcgggtagggcagagactgggcccggtcgggtgctgggtgtggtttcgagctcgcctgcggggcgccagcctggcacttcgcggcctggggaggtcgtgggcaccgggacccctgcctgggtccgagctggcctcttaaaagggccgccttttaagatctctgatctgttcagagatgggcagcaggatggagactctccagctgtgagctcgcctcatcttgatatgacttgtgacctccctgaaacctcacacccacccaggggcattgaattgcaggcaaacgggatccagagagagggtctgctttctgggaggtgccggctcctcctgctcccctgcagcagtcagggcttagcagagggaggaccgggcagctgtgctgccgaaggggcgctccgagtgggaagatagtacccgcttcacctccctacacctcctttctctgcgcctcccccactttcccgtcgggttttcccgcaccatggggagaggaggaggcgctgtctctgcctgtcgttcacgtaagaacaacaacccgagccaccgctcactgagggccggcagcctgctaggcacaaccttacattccatctgtgatttatttgagctgtccacgtctccatctattccccaccgcgaccgcgcaagggcaaactggcacagtggaaggagtcgggcagatccagggcggactcctggcgccgccgcccactctcagtgaccatggacccttcacgttctgagccagtttcttcgactgcaaactggggcccgtaatagcgcccgcctcccggttctgagtattctgtaagataatgaatgcatgtaatggcacacagtgcctgctatacagaagattctcaatacgtgggagttcgcggaagagctgcgcccctaggaccccgctcccagggtcgcttgcagccccggggacgcccagcttcctgcactgtctgaggactgccccaccccgtgtgtgtttttcagagaggtccaccgggagagcggggccccccgggtcccccgggaccgccgggagtgcctggatccgacggcatcgacgtaagtctctaacctgagaccagggcgggagggaggcggcagacaaaggagaactttgtgagcgctgtggtgggggtggggacttcggggtgcccggagatgtagtgcccctcgtcgccaataggcggcgccggcccgcaccacaaggacgccgtttgttctgcaaaaacctcaaaccagccctgacatgcggagcccgttatagccgccgacagacaaggagctgctgttcagtccgccggccgcagctcacagcgaggcctcatccccctcctctcctttcccctccttgtggggtaggaggcgactcaacccctcaccctgcctctggcacatctggacgcttcttcaggttcgcttgggagccttggccagaccaccgaccagcttgggccagactcctgtctcttcccttcggttttctctccccgatttagaatcagctgggcttgttccctgcagggtgagggttaaatacctcattctgaaagctcccgcaggagggccgcttgatgtttaccagtctggacagacttctattcaacctggtgcccccaccccccaaacacaggatgctgggcccccggccaggccctggctgctgagggctctgaaatgcctggaggcctctctggggctgaatcgcactctaccggccctgcctgcccaccaccaagggtcctttggcactggaaggaggtccttccctccttgggaacactgaatttcccccttgcagtcccccttggtccttgccactggctcagcttcccgttctcctgccctgcagtctggaatagagctgctgcccaactcgctcatcccccttcacgtttctctaaaagccccaaccttcctcccacacgtgcccaaatccaagaggcatcagcttggagcccccagccctggtagtgggtctcacagctggcacctcatgacatcagcatgtctgtaccttcttgcatgttgctgtcaccctctccagcccggccagggttattctcatgctcctgtgatttgtttttggtttttatttttgaggaaaagggggctcttttcccaaagattgcaaggcttaggggacctggacagaagagaggagagtgaggagagcctttgggagcggcctgccagggcctgtgtgtgcccacttggggtagtgtgagccgtagtgtgctgtctcaccaacttgtatcttgcagggtgacaatgggccccctggaaaagc

SEQ ID NO: 4750 - DNA, 6000 bp, Homo sapiens
gttccctacctacaaaatggagatgattatggatcctacctcatgggcctaccgaagagccccccaaatgcttccccactaccattactattatccagaaaataagacaactctcttcagttcacctctggaccctggctctgcaaccctttgtaggtatcaaaccagaatgcaacaacttcaagaatgagaactgaggccacaggaaaggaatagaagaggtgaagaaaaatgttaccctagtctctttctcctcctcctactgtcccagtcccggccctagggggaggagcagcccctagcaggaggaacccaaagctccaggctggcttcccaacctccatgtaggaacaaccttcaagataacagttttggggaaaggggaggcagtgcaaggcactttggcatgacttaaacagcactctcatgagcaaccaaaggtgcagggttcccctgaagggctcaagtcaaagttctccatgtgcacacactatcaagaaccaacccccttcagtctcccaggacacaggcatggtgagacctaccagcagaactctatatcactatggtctgtagggttggcttggcacagggaaggtgatgctaagcttcgtgtccttctgggagatatcacagtcagggaacactgggggtcccaaaaagcaaaggccagatctcctcctgccttggtattaatatttctctgagtacctaggacagaggccagcattcagcaggaatttgatacacattgctgaattacttaggtaaacccagcaccttcaaaaagtttggtgtgccacactgtgcctaaaaaacttttatctaaaaacaaaactttaactcttggacctggaggttcttcataagtcctgactcacaataaattaacatggcacatctctggctcttagattccatgtcccaccgactctcatccttcattctacccaatgtcctcaaaaagaaccctctttgcccagggcaggttcagaatgacaggtgaggagcaaagaggagagacagttctgcccaggcctagttacattttgtccccatttacagcagataattagcacatttgggtcttgttacaccaaatctccaaatcatgcatcagacagcaagtgcccacccccaccccccaaggggattatgccaaggttacaggaagataagcaacacaaaatgccttcaagagccttcctacttaatttgagaccctcttggcagctgaacaaattcctgcccagtagggggatggaggagaggcttgaaactgagctttctactatgggtatccttgaaaccccaaatgcaggggacaaaaggcataaagaggagacccttgtaaatgtctcctactgagctgggctcggcaggactgcttgggagagatggcaagcaacgaccctgttccatctctcctctcccaagcctgagctcgggagccaattctgtttctatttagcaatactgccctgatcacctccccagggctactcggtttccttgaggcttctgtagaaaggaactagaccaagaagaaaccgaggacatgatccaaaggaaaacagtattctaggaagcagcagccacttctgacagggaggtagagaggaagttccaagtttcccagcaggcaaaggtggccctgggctcacagtcaagagctgccctactcaggtcctacctgcacgatgtccaacaccatgccagcagccacggtcccaaagcctgccaggaggaatggaaacagtacttgcagcccgatggaaaaggaggtctccttgagcggggaaggtggcgcagggccacggtctgtgctgacgtcgtcactttcgttgctctggctcccgttctccagcagggcgtcctcctcccgaacccccttggcgttggcccgagactcaatcaccacctctaccccagccccatcaggccccaggaactctgaggtcccagccaagggctctctccctgggccatctgaagagcagggagaggcagaagggccagtcccgttcagttggtggacgtccttcggctctggcttagaggacatgacaggcacggaggaggggaagggagaactttcctctcttctttttgctttctctcttcttctctaacttgggaaagaacttagtcttggggtgaacccaggcttgggcgccgcaggacctcttcccacggctctccactcctaccaggcactgcaaaaactgatccaccaacaggcagccccatcaagcactgaagccgcaagctgggaagaaacaagaaattcctcaccagacagccactaggggtgcagatgcctgactccaacccaccagctctgtgcttgaagaaaaagtatctgtcctcttatcttctttggttctcagtggcaggctcctcagagcagggggcatccagagtagaagagctcaaccaaattctggggtgccctctgaagtggcccctcttccgtaaaaagcagcttgagttcaaatctttcagaacacagtgccagcctggggctgcggctccttcccgctcctttggctgggctctgtcagcttcccacagctcctcaggctctgctggtcccagcgcagcgtctgccgtctttcccttctcttccagaaacttcctcccttcctgggaagagctaatacctcttcaaatccctggtccttaaagtcacgagaatcagtgtggaacaccttatgtgggaaggagaaagaaaagaaaaagaacattacactatagcaaaggacagcttgtactgggagaatttccccccaaggaagttaggagttcatcatatagctatagagtttgctatttgcctccctttttccgcaaaaattactcagtcctgcactgctccatctggaggctcagcaggagctatccccgccatcctccccaccagcaaccctcctgagggatcaccaccgtggtcaccagcaatgagatgtgaccagcctgggattgggaagatgctgtgcagaagccctctgcactgtttcctcagcaactgggggtgggtaggtgtgtcctcagcaagaccccttcttgaatgcccattaagaaccctgcattatttaagtggggttcagttacaaattcagtcacaaactccctgccacacagccacccctgtataaagtgactgcttatcatcacaagacagcaacagaaagacagccacacagggcaaagaaatagggagaaactgattgctgagtgaagtcccccagaccccagatcgttctagcttctgagaaaacaaaacaaagctaggaggactccctgggcagtggggcaagcctgccagaccaaggccaagagccagaggcctacccactcctgcccttgagagtcaacagtgttacaaagagctcagacagctgactcggatccaggcctctgtctctccccgtctccccctgctcttggccctgtgagcttgtcagataggacaagggagttatctcagttagaagggacagagcataaaacgattgcttattacccacgcatttcagttaattaggctcctcctgttccccagggttactgagagttggatatagtggaattcttagaaacaaaaacaaaaaaacaaaagtagcaataaaaaaaacccaaaacaaaaaccaaagcaccgtaagccaatatgcacttgctccaaatgcatctctttagctgtaatggctccacttctctgcctaaaggaatccccaggcttcctaattcctgatggactcccatcctattccatttcaccagaagagctcttattcgtaaaaaataaatttaaagagagttccaccaggtaagaggaacaggtccttaagtattccaaacacacacaattagtcaagttcagtttaggaaaggaggtatcaaaccccaggaactggcccaggagaactgtttcctctatcaattcagtcacccaccaggactcccttttccaatctccttaaacacagtactgtggttctttcaaactccctcaccagagatccaggaggaaacctctgagtccagtgcccctatgccagaaaagtttctgagtccgctaaaagctgacacccccgcctccctcctgtgttcctggcaggccactgaacctgagagggggctcccaggaggggaagccagtcctccctcaccactccccctgtaaagagacttcagacaggcctaaggccctgggacgaaagaagcaaaagtgaaccaggacgccctatcccctcctcccaggcggggacaaaaaagacccattttagtatccccaaccccgaggagggagagaaagtaactgggtggcctcctcagtctctccaccactcagattcagcaaatgcgctgcgcgccaggactgccgccctccaccaccccctccccgccccaggaccccacaggactgacctgcccctcgcctgggaggaaggggggcgcctggcaagtggcagcgtggcccgtggtctcggggggtgcagggcaccccctcttctcatcactcctcctcgacagtcctccttggcccccggcgtgcccccccacacccccagccaaggcgagcgtccagccgcgacacccggctcgctacatttcgcttctgcgttacagcgaggccgccgctccgcttccacgcgggggaggtggccggggagggcaggatatatcgcttcgggcccggcgggggggcacccggacgggggaccggggagccgagctcacgcgcccccaatcgcttcttgcccgcggactcgggcccaactggttggctgccggtggcaaacgtgatctggggcagactgggtggcaccccccccgctccatcaaaaatagattctcggatggacaacagcagcagccaatcagggactggggagggggcgggatcaacctcggcccggcccccttccttcgcttcgtgcccaggaggcggggcgccggggaaacgcagtaggaggagtgacgggaaccgggagccggctccatgcgcctggagcgcgcgggtcccagcgcccatcggcccggggtccgaggggcccgctgcccgggctcgctgcgtggtgctaccgcccccgggcccgctgcgccgcgtcggagccccagcagactttgagaggcgtgtgcgacagtgcgcgtcctctcctgcctctggatgtttccttggagcctctggccttcgggaagaccggtaaacgtccctgtggagccagccagccagccacctctgacccccgggctcaagcagccagccgcgtgctccctcctcccacttggtacccggacagaacagtccctaccttgctcttctcccgccggctcgtcactttaggctccctccagattccgcgttccttgagcaaatggctcacccctgacgaatccggccttaaaaaagtcccggccttgaaaggggtggagactggcgggcgggagcgaaaggaggtcagacccatggctggggtcgcacacgcatcacctgaggtcggagaggaggggagcctcacttcctctgacccactgagcctggtggcagcgtgcggagagatgtcaccatcccggactaaatgaaatccaactttccctgacgcaccttgtgggatcaaagaggggtgttcccatgctcacctttcgccacttcctccctggggtatctccacctctccaacacaagctcaatgccagttctctttgggatgtttttgtgcagggggtgtgacctccctcataaaggaacccccactcccaagttttcccctcttgtcagtggaacctgtgaccaacggttccttcctgtccttttcctccctgaaagtagcccgggggcattcgaacatggctctagacccctgaatagggtttggagcggagatgtgcctggggagaagagatcgcagtgctgtgtatgaagctttgggcacgtgctcacaagagcacacacagcaacctgagcaggtcattccttttgataaggatgacaaa

SEQ ID NO: 4751 - DNA, 6000 bp, Homo sapiens
aattttcaaattgtgagaaatttccaaattcacaaaagtaaaaagattatagaagcttacatatgcctgtcacccaacttcattaatcgccaatcgcttttcatatgtgatttaattaaggtgatgaatttttatttgagccggatcctcagcacctggaactgccggtgacccaagcttttcctgacagaggttcggactccagcgttcaaaggcagctctaggtccctcactcaccaagcaatgcacacgcagcccacacaagagcctctcaccctcaaggacagaaccgccgagctgacacggggcaggtggggctaccagcaccggggacgtgggtggctgggagagggacagcaagagcagaacggcagccacggccgcatctgtcctgcctgggagctgagactgggttttatatttttaaagcttggtaaaaggaaaacagaaacagaaaacgcatatgtttgatagaccacgtgtggccccagagcccgatctctccacagctggcccttcacagtgaagagaacgctgtcttcaggaagtttgagcctgaggcgaagtaacttctccatcaggaacaccagcaaacagatccttcccgaaaatgctgggagtcccgtttctttttcaaatatttatactcatctactaaaaaacccaccaacctgtccaagtcttgtgaaaaatctgtacaccaccgaaggtttcccatggacggattctcccacactgtccccttcagacattctgtaactgggagaaaaacacaaaatacttttcagtaaaaagcattcacgggtgtgaaatcctggccctattttcaccaacactgtcaagtaggtttcttccacattcagtattttgtccatataccatttgtgtttttaccatgaattgttcgggaaaaagtagcaggtacacaggcttccctggagaggaagggcagcgtgagacgcatgggcccaggagcacaggccgcattttcattcccacactggcacctcagtcacctgcgtgggcgggactgtccaccccactggccccaggagcagccttgctggccatggggtccactggctggtccatggcacgtggcactgcatgtcctccctccaaggaccgcaccctctgtggatccctcagggttcccccgcccaggcaccttgtctgctccacgccctgtcctgggtctctggtctggcaggagcaggagggatcctgtcctctcagggccaggtcctccaccccatgaacaggaaaatgttatctacaactctcaggtagtccatccatctgcgtcccagtttcttatctggcaagcggaggtaacgtatctgctcctatttcaacactgctgtgatgccatgaggaattcacctgagaacccaggtgccagaggtcacattgttcacccacttaattcccagatgctcaagtgaagggcatcatgacccccatttcaccaagtctcaaacagtggaagccacgtgtccaaggtcctgccacagccctgcttctgggcaggccaagccaagcctgactgccacctggctcctcagctgagcacgccgccaccccactcctgagaggagacggcgtcaggacctgccgctcttcggtaaagcacagctcagtacccagggcctgccggttgtcattcctactttaaagatgagaggcctcctggcccctgagctagagaagacgccaggggtgacgttcacctcccccaccaccccccatctgctccctcggcagggcagtgaggagaaacagactctggtctcaagtttggcttaaagtcccacctgtgctaagcggctgtgaggccttcagcaaaccctctgagcacgcagccagcctcagtttcctcatctgtaaaatgaggctctaagaaataccagacatgaaagcaaagacatcattcctcagcaacagttggggtcagtcttattgttctcatttacagataagaaaactgaagctcacaaagactaaagagttgccctggcccatcagcatgttcgcagtgggcaggagccagaacctgcaccttcctgaaaccaacgcttttccagtcccatcctcactgtgagcactggggaaatcttcccttcaggtggaaggcaacaggtggccagacgcaatcccgccctcaagtgccttggctctcccatcacaactgatgcgctgaagtgatccaggcagctccctccacatcatcaagtctgtgcagaatgtggctccatgacaccgttcctggatcctctgtgcagagtgccaggctgctcaaggagaccgaggggccctttggtctcgcggagccgtgtaaaccagacacagaggaggagcacctttactctccactgaaagaactccatatttaaatagaggctacactaaaatgtgtcacctggaatggccaccctatttaggccaaagccaggccatctgaaagccacccgtcacattgttcgtcctatagctccttgtaagtttccccgttttactcagactgtttcccattaaagcacttttactggactggaggtgatgagagtaatgtcagggagaaaatacccagctctcccgccaaagggtgttctctaggcaaagctcagaacttctcactctccaactgaacatgtagaaaacctactcaaaacgccatcagccaatcctgcttgtctgacacacacaacacgtataccaaacacacacgtataccaaacacagcttgcaccctgactgaacgcattgccaggaatagcctgaggcagggcggcaggagcaagaacgtgaactttggactccaacagcctgctttcagatcctggctctaccactctctgccagtgtgactaggacaggctattccaggatgcctcaggttccagtctgtgaaatgggacaacagcacctctcatgccttctccacaaggctctcgtgaggaatcagtgggcagcccgtggagcacccttggagccgggcaaggcagtgccagccctgttcctggatcagggccagccctcacaccagctgccccctctgcagtcctcttctctgctcagtttgaagcccacctcctcttcacaggcctccgttaccgcccacactgacccccagtcccttacatcacatcaccctatttttattttgtgtacaactgtttcctgatacctttctggtttacttctcaattttctcctgctagaatgaagctccttgaggggtcccttgtctggttcggggctgggccctgccacctggaagtccattacatagtagacagcccatcaattacctgttgaaggtgactgctttatgcctggtcacaaacaaaacagaaagggagataaaaccagtccaagcagagaccatgaggacgtgccagaaagtgtaagactctctatgtgccttgttccaggcccgtcacattcatccacatctgtggtccatcactctgcacgtggaaaggatgaagtcctctgcctggcgtccgggagcattgacagtctggctcccacctttctcttcacgtccccatccccaattcctccgggactaagaaagcccccggctgccgtgcaccaagcttcacgcctctggtgttgttcagtcctctgaaatgccctcccagaccccgtctcttcctccttcccaaggccacattccagcctgggctccccgctcctctgggcctgaccatcttatatctccacctggctctgacacactgttaccgccgtcgccgtcacctcaggcatacggcagaagccatgtgagagtctgaattactgagaaccctttatccacttacggggataactgcatcttcctgggaaatgtcaactcaactaaaaataaagtgcttccaggactagcggccagtctctactcttcataaagggaaaagggcaaaagcccactgaaggtacttaggctgaaagcagccctctgtgctgtgagacacctggcagagaaacgaacgatacctttatcagtggggccacagaccagtactaagtcagcctggagaatttatgattttattgcctatttagaatacgatcaaaaccgatgtaactagtttcccttcagcccgtcagtaacgccttcaccccagagcttaacactaaatcctacagataagcgctgacctggacgcaggatggggacagggcacattactctggaatacagcccaactcgcagcgctgtgggggccgcgactgcccgcttcccccagatgccaagcaggggatgcggacgagatgcggcccgggtggctcgagggctgcagcccccgcccggcccctctcccgctcccccgaccctcgcaggccccagggctccgccgcaccccccagcaccccgtcccgggcccgaccccgaggcgcgacccgtacccctcagggccgcgggtcgggaacacggtccccgcggccacccgggccccgacggccctccccgcccggccctcagcgcggccccgcccgcccgcggccttgacagcccggaagaagcggaggcggcgctgcccggccgttcccgcgccacgcagcccttcctggcacctcgcagctccgctacggccgagccgcggtctccctcacggccgcgggaaggaggacggcggggcacgggcggccgcaggcgctgcgctccggctccgggaagctgcagcgagcacttccgctccgtcctccgcggcgccgcctccagggcccccaagatggcgcgagggcggggccaagggctccaaccatttccgcttccggcgcagacgcgcaggccgttggcgggcgggcctcccggcggaagagacgacagcggcggaaacgcgcacaggcgcagctgcgtcctctggctccgggcccggctagcttcgctccagagattgcgcgggctcagggactaggcccgtggccacacccccccttgcgacaaagaccaatggaagcgggcgttgctggtcgctaagagaaccctcggcggcaagatggcagcggcgggcgagggcaccccgagctcccgcgggccgcgtcgggacccgcctaggcggccgccccggaacggtaacgactgcgggccacgggacaggtcgctggctgccctgggctccattcagggtgcgatcgctctacgccctcgacccccaaatgctcacctcggaaagtagaggtccaggtgccgcggcggagccagggccgcccccgcgtcccccactcccacaggactcgccgtgcgcctcgggctcggctcgcacccttccccgagccctcctcccgcagcaggccaagccctgcagggggtcgccccccgcgggctcctagccgggaagaccgggttccggccgcagcctcacagccagcgggacctggggttgccatggggatcccgaagcccaggacttggggcgagggcaggcgcaggagcagcaccaagcctcctgacttcctggccggtgctgtccagaaacgctaggacgcgtttcaaaagcagtttttgcctgtacttccagcactttgggaggccgaggcgggtggatcacctgaggtcaggagttcgagaccagtgtggccaacatggcgaaacccggtctctactaaaaaatacaaaaattggcccggggtggtgcctcctgtagttccagctactcgggaggctgaggcaggagaatcgcttgaacccaggaagcggaggttgcagagagccgagatcgcgccgctgcaccccagcctgggcgacagagcaagactcagtctcaaaaaaaaaaaaaagagcaggttttgataggaactgtttctagaatcaaataaacgggtctggaatgaactcagagctaacactactatcttcaggtagaacctgaccctgatttgggacagatacagtagcctgtagtaaccccctgccctcctccccgacattttcccataaaccctgcccacaaaatgtgcctgaggagctggtagggagggagccctgcc

SEQ ID NO: 4752 - DNA, 6000 bp, Homo sapiens
tttctgtttccctgtgggaggtggggtaagggagtagggggaagaatgcaacaccacagtgccatagctggggcaggggtgggacacaggtccccagtgttccaggtggcattcgggtatttccacgtagaaacaatgtgtggatgatgtagggttcaaacatatacgattggtaacatgattctgattcattatggagaataatagcagcaattaacgtttattatactttagctcatgcagtgtctcatgaatccttaaaacaaccttgtgaggtaggtataataactagtttagagagatgaaaactaggctttgagaggttaagtactctgcccaagatcacacagctgaaaagtagcatgggctgaatttgaacttaggactatgattctaaaacttgtactcttacctgtactatatacacagccttcctttttataaaataggctgacagagttttgaatgggaaaagtttccaggctccaaatgatgaatttatacaaagttttgaggtacagttccttacagactggggacttatttagatacttacttttttagggtcatgtcctgccctgaaagaggggccccttccacgggggagttcttcttgccacacatgttgccaaagctgtcatagccaaagaggagtcttcccgcggctccagccaccaccgagtagcccatgataaacacctggcaaaaacgggggcatatgagagcctggccaaagggctgagcgcacagtgccccacacccctgcagatgctgatataaaacggagcctggtggaacgtgaagctctccagcatcatagcgctttgctccgtcagtaacagtgtcagcaactcccatctatcagcatcctgctcctctgctacttatacatttaggtagagagagaatctaatccactgaaacagatttctctccattttcttacctctgtgctttttaaccttttccttaagagtctatcatttttctttttggtctaactttactgggacaattcaatttttcttcccttgatgttcttgcttaatttaactgcttcagggctatgctaattctttccccaaggttttttttttttctactactttttttgtttttcttttcttacttttaagggattctgcagaagcaacacagttgatatgtactgaaacactgttcaccaatctgcaaatagtgttttggagtaactgcttaagacatacaaaataaaggaccacaggaattctgttggacaagaacatcttgcaatctatcatcatttttatccactctcatagtgaatgtggaatatttgaaatttcagttcaaacaactgtgccattaatacatactgacaggctctctgccaagattgaatatgtatcttcccataatgcaaacttagtaagtttcccagtactgtatgcaatatataggataccatttaatactctatattgacaagttcattccaggagaacagatataatacactattcattaatatatagtattgataccttatgctgcaaaggtacattgtcctaaattcaaataccttctagacattctgcatttattactaatttagaaatcaaaataacaaacattcttcaagtgcccagtgtgttcttgagactttcttactgggagacacaggaatgaccagaacctactccttgcctccaggaacccagcctagaaggcaagcaggacttacgggctgcagacctcctggggaaggaggctccctgtcctttcccactctccaagatcctcctaagtctaactggtcagattctagaatgaatgggtcacctttgctagtagtgtgtgtcactcaccctttacctaaaggctgtggagtaggtgtgactctgtttgccaatgtggctggcatggcaagctgactgtgccttgacatgcttgtctcgtcctttcgagttggagtgtagtaaggtctggactgtgtttggatttagagggaggaaaggggtcatgtgcttctgcccagctcaccagtaatctaataacaaagtgatgttttccatttaccatcattctttcctttggaaagcctgtggtgaagaatggaaagtttttctgggtgggagaggtgggagtggtttctgaggattcctgagtccctcctaataaaactatgactttatgattattattttttatgttttgtagacacagggtcttgctttattgcccaggctggtcttgaactcctggcttcaagggatcttcctgcctcggccttccaagaaactactactataaaccttcattgtcctaatttcaaacatgcaattgcgattctatatgacaggtgatataggaggtgtgtacattggtctagtacattggccaccaaggtagtcactgtcaaccgtgcctgcaaaatcaggaaaatggaatcttgagggatgataggaaaaggcagggcaggagaggatactggaggggtaagtagaggcagagatagtccagactttgagactttgttccttatgtttaatgcaaatataaacacaggctggtgctgcatttgcaagaaccatctctgcttataatttcagctccttcccccaagcctttgtccagccctaactcagggcacaccatcaccagtcaggacatctgtcacaagacctgaaagctgaacaacagaggcagaaaaaaaagtccaaaaacaaaacactccttgctctgttttaaatacctgcaaataaaaaatgttgcaaaagacactaaaagccagtgagctaagaaaggactctgactcttaaaacagaatgccatagtgagaacttggatatattaaaacttcagacttattttgcaaatgaaatgtaattttaaagcagtttccagctccgtgccacctctcagctggttcacaattcttcaggctgtgataggtcatctacaaagattttccccaggattctcagctgttgggctgagagtttggtagtgaggtcctaggttgaagctgtggaggggctacggcagatcattaaatcacaataacagcttgaggtcaaagctgccaggcacaaggcaggccagctgctccctgcatttatacaacagcagtctcagataaaaacaccaaccatctgcgaagttaagcagaaggtattgtaggtgcactgtctctcccagctcctaggggagagttccaacgtaagcaacaaaaaacatctgattatgtgtttcagacctaaccttccactgtgcctgtaaccaagcctgtctatgtgaaacgggtcataagtgaacaaatgcctttcttacttggaaagaacaaacatgatattttagggcctattcagatggaattcttttcaacaaaggtaattactatctggtagttattaccctgctctataaattaatcatttaccatgcagcaaatagcatgccttatcctggcatggatgatttcgtgaaagtggcctttgaaaatgtcgggtgagacgttttctgctgttacctacaattctaaaataagtataaaagcagcaagattcggcttccaacagactctctcaggattataaccgcatagcctgatggagtttaccagcaatcatacatacctcgaaattagagtgggaaaaatcattccttgttagctatggttaacagtgttggctgctaaacacaacatatctctcgcgcgcgtgtgtgtgtgatgttcagctaaaggaaatgcagtttatttctaggcttaccctggcttttcctttgttaaaggtgcaccaaaagcttgaggaatatttgatttgggggtgtggcaggtgctaaaagaacttctgttcagtaagttcggagagtaaaaggagacacattggccttactaaatagcaatcacattgcaaactgttaattcccatttcctaatggagtcaccccttagaacatggcctgtagcaaaaagacagcctttctagcgagtctaggacaagaattctcccgagtacaaactgatgtttattgtgggttaacggcagaagtctctcactgcagcaccaactacgatttacatttgggacagagttatttccagacgtgcacacacactctggcctctttcctaccaagcacccacacttaccaaaccagtccaaaagagaaagaacaggaataaccatgccgtatctgtgcatttcctataaatctggggtcgccactccctttgcctaggggctccttctgcagaaaccttccagaaaaagggagagttgagaaaaagaagataaacaggtggactcaacctggaaaccgaacccaaatctactcgaagaggggccaaagtaaccaatctttttctaaatttttaaaattaatattatttttttacgtggccacctgaagctctttcacacagcctttgaaacacctgctctgcgcggagcggatgttaagccccctgccgccaagtgcttacctggaggtgcacctgaggacgaccccaagtttgcgccccgcggcccgcgtctcccccgcctccgccccagcactggagcagggtccaggttcctccccgccaggtggccccaaggtactaagcgggggcgggatccccgaggcgcgggaaaggcggaagcgtccggcagggaaggtgcgtgaaggcgggggactcgacccttccccggggctcctcccccgagggccgaggctgcgagcgcttaccaggtactcggcgcccaggcagtgcatcgtgcgctcgccggcgggggccggtgactgggagccgccgccgcctcctgtacgcggagacgcagcgcccgcgagccggggccggggccggggctggggctggggctggggctggagccggggccgggccggggaggggcgggcacggtgcagcgccgcctcccgttcgcctctgcgcctggcccggcgactgcgggcgctgcggtccactgggtccgcctcttcccggcatgggtttctgcccagctcacccgctgtcagctggggtcctgctctggtgggaggaagaggctcagacgcttccctgccctctcgcctcaaccacctcgaggcagcggctcccaggatgtgcactttgacgactaaagctgagccggcgccgccacgaccttgggcgggtggtcggcctctgccctgagcaggaagtagaaagtctcagcagacccttcctgagggccgagcaacagtgtagtggcgtattccacatagcaaacaggtaagcagcatttactgtgtgctggattctgttctcactgctattgttattcctaatctacggaggagggaaactgaggcacggccattggtgatgcaacttgttcgaggagacccagtaagttgtggaggcaggagtcgaacccagacactccgggagaccggcgctctcgaggtggtttactctgacttctctcccaccttgccttaggacaatcattgcctgacttcgcaattgaaatggtagtgtccactgaagcgactggtggcatagttttccaggtagtgtcagaccagcgcaaaagcactgttggggtgaggaatttaaaaaacgaaaaacaaaaaaaactgcaggccgacctccccccacctcctctcaatcaagcctctacccttccccctgccacccttagggttgctaggttaattgcttcctttaggtgctgcttctccctaagggtagaaacctgactggaggaaagatctgggtaagtgggagaaactgggaatgatagacagtggttctctggtgccagcgatttccttctgggctcacaccaccctcccactgcaaactcactgggccttcctggatgcatgtttatcagacagagtaggtgaaaccccaggggaacatgaattcataggacaaagaattagacactggaggagtgcaactactgttaaaagaccacaactgaataacatatgccatctgaaactgatcagtagagcagatggaccaagatttttaaataagcatga

SEQ ID NO: 4753 - DNA, 6000 bp, Homo sapiens
ccatcaaggggtggaagcacgtgagacctacaggttagatcctgcgtgaagtcactcacattatctcatgaagataacaggcactgtaatgacgagttgaaaaaccaggatacgggctgggcatagtggctcttgcctggaatcccagcactttgggaggctgaggtgggaggatcacttgagcccaggagttcaagactaacctgggcaacacacagagaccttgtctctattttttcaaaagcaacaacaacaaaccaggacatgaaacagctcagcaaacaaaaacctgaataaaacgccaccatattaacagtggtcgccagccttcacgatgtcatctgctcgtttttacaaggagcacctacttcttttgtaatctgtggacgaagacaactttaaaagcctgccatccaaagacacattatcaagtctggctaagggagtgccagataaatgcactcactagctcatgccgtggtgttaatgccagtttgaacagacaggacctggaaatgcgcagacacactcctcaatgtgcacacctcatctttcaggacccttggcccttactcctcctgaccatgtcaccacggatgccacaaaaacacctggtagtgtgaagtgcagacagaaaggggatcttggagggggagggtgccctgttttgtttttcaagaatcatcctcaaaatcattcaagacaaactctggaacctcgggttctggtcctggctgtgatctcaggcaaatctcctcttccctgggtcttggtctccccagttgtcaaataagcagagtggattttctgatggctaagatccctctggccccgatattctaagatctgaagctacgcattcaggtttaagggctgctaagtctgataaatccagggcaagagagaatgtggagactttaggttgctccgcccaagtaaacaccacagacagaaggtgaggaccaaccagcagtcttgagacgggagctgaggggaggagtcgagggtcaggggagctcagcagagaccctcagagggctatctctggtcagcatcttggggctgtctgggagggacagggctgtgtggcctggtattgggaaaccaaacaggtggcttgtttcttccaaacaaacggcctgttttctttctcaggagcaagagctcccaggaggggtggccatggcagcgagggctcaatccagaggaagggagaataaaacattggcaggggaggctgcaccacctgtccaggctggggaggagctcaactctatgaagccgcttgaaagactgagaggttgagaaacctggggcccaaaacagtcttggtcccgaatgtggccaggtctcctgggttaaagtaaagggccctagaagggagtcaggagggctgggttccagtcccagttctgctgctgaactgttgtgtgtccttgggtaagtcccatcccctctctgagttttgtttgtcaaatgagaatgatgtctctgatgacctgaaggtcccctccacctgagacattctaggaccttccttttccctccaagcaaagggagacttgaagcatggagaaggatattctcacagctttcgctgcaagaggaggattcctcccagcttcagagcagaaacaaaagtgaaagcaaaagtcagcagcccccataccacatcccaagtcagaagacacctgagcttctgaaactttcccagcaccgagggagacaatgcttctcttttgcatgactcccaccttaatttggggctgggggaagagaatccacactaaagctcctcacactctggcctcttccagcccaagaagcctgaggggtttacagccaggcctgcagagggagggaggaacgttgaccagaaacacaacctattaaaacgggagccccagaagctccagctggcctctgcctccagctttcccatccctcacgcagacagagaaactcccaggcctcgtgacatctggagccagcgagccggagagtcgcagctggaggggcttgggtcctgccaataccccagacactcactcactacttctctctggcaggggaccaggctggcagtttgggcctcatgtagaaccccagaatcttacccttgaccaacagtcatgagtgaaggccacacattactctctgcttcctgtatgggcctctcctccagctcccccattcattcccactgcccccaccaacccacaggccagcctctctctcctaggagtcttctctaggatcctcgccaacttccaggcagccaggattatcttcttaacatatggatgggatcagacgacttccctgcttagagaacttgaatgaaagggacgtctttctccatgttgttcatctttgttgagcacctagaacagcgcctggcccacagaaggtgctcggccaacatatgttgaatgattccaagaaagcccccacctgtccagtccagctcactccggaccttccattccctttacttttccacaccctccactgcctgagcaccttccccagcccagcacaccccaggcactctcctgtcgctgtgcctttgcctgtgctgttcgatctgcccagacacccttcctcccctgttccctggggggactccagttccctgatgaatattctaatactcttttcttagcaggacctcctgagttatttcctttcttctgttctcgtctaagccctgtgacataacttactatagaatacttcatgtgctaggcataaataccccacctcgcccttggagatcatcatcccattttacagatgaagaagctgaggctcagagaggtcaggtcacacagccagcaagtggtgtggcctgactgtatcgccaattctgcaacacttttcatgagtatccctgactccctcactaggctgggggctccctgaggcttctgggctctgggtcactggggcaggccccagacaccccatcagagagctgtcagctccgaagccgtgaggagcaggttcaccactagcctcctctctctttctttggccttttctcccagtctgggggtacctctcaattggtggagtgagatatttggaggggcaggggctctgtcccaataggtcaggatcctcttgtgacaggtttccggggtgtgaaagctgttcacggtcccagggccaacagttccctagacaagctgttctccgggtaacccattcaaaaggaaagccagaagccggccggtcctagaggggaaagccttccacccgctgacttacctcccggttcgggtccctgccccgcccacctcgtccccgcccaccccactccggcagcgcccgggttcccagcagccagacctcccctgctgttgggaaggacccgcagtcccatgcaccgtcacaggcacctcggagcgctgcgcaggacaccccacgggctgctccctggggaaaccgtgggggaggggccaggtctctcgcccccaccgctggttgggaaagagaccattatcctgtaatgcagaccaggcgcgccgggccaagcgcctcccgtttgtgcgctgatttgagatctgatttgtactctgctctcccctaggcccggtaacgtaacttaccgctgagtgcttgctgggtgctgggcatgaatgccccgccgcaccctgggacgttgtcatgtcagtttcacagatgaagaaaccgacgcgctcagggaaggactcgagtttcaatccactttgctcatgcccgattctttacccccgtgtttgcttgtagagcgacacacacacatacacacacacgaatctaaatccctaaaaggccccgacttccatacagtaagggatgcgcgagcaaagcgccaaggtggtttcctgggacctactgggaagttctgctcctaaccacgcgctgaaagcgcttctggcgaagccaagggttcgaagcccgccgggcggatagcacctgttcccgccaacagggggcccccaaggccagctgccttccccagccgaggccagctggccaggcgcggtgcccgggaggcgggagcgtcccgcgccggcggggcgcggccgcagagggtgcggggtgcggagtcctcccggtggtcgaccccaggcgggaagcgctcggcggacagacggacggacaggagacccaaacgggcctcggcccccttacacggccctgtggggaaccgacagcgcgccgcgggaagcagcgggcgcaaggcgcggcggctgagactcacccgggaggcggcgggtccggctccgtctcggctgggcggtccgggactgcgggcttcgcgacccccgcgccccacccgggcggcctcctcggtgggcgccgcgatcgcggggctggggttcgggggattcttagccgagggaacgcagtggtggagagggcgcactgccctctcagggaccgggttggggacgcaggaagcgcggcctgggagcgccggcgtgcgggagggagggaccgcgggaggcggagggcggtgccggccaggagcggcctccagcccggagaagcaccgcccaccggccgaccctccctcccggccctcggcaccacccccgggcccgaggcgagggatcgcagctgagcgaggcgggcacccactccccagcgtatgccgctggagcgcgctgagcgtgtgccgggggctgggcctaagttctccccaacccttgccagccgagttggataagagggggtcgggagaaaatagagccctgatcccccctcctccctagggcccagagaatcggtgtgcatgcgtgtgtgcgcgcacgcgcgtgtgtgtgacgggtggtggtcggggaatgtctcaagctagaagtcccaggttttaggggtttaagtggagctgggagacccgctttcctcccacaccaggcgcagacgccgaggcacagctccgccagccgccccgcctttacctggcgggatactcacctctcctccttcctggggaggccaccgcctccctctcccccttctgccctgggctggttcccagcgaggtgagtgaccggcacaagtagggaaggaggaagcgagtttttaaaaactgagtcagctcacgccctcggccagggtccccacccgatgcgtggtccccagggcgccctcgggatcgcacgcccgagtcccggcccaggtggggcccattccgggttcttgcgcgcgggcaatggatgggggcgcgctgcaccgggagcctgccctgctgagggctcatccccagctttgccgagaactttcccggcgaggcaccggctggcgttttcccagcctgcgagtggcaggcgggcagccagtctctgctcggatccacggaggcccggagccgccacggagttctggctccggggagtgcaaacccgaagtcggcgcggaagcctctcacccgcggctctgcctccgccccttggagatctgccctcggaactgcgttgctctggcgcccgaactagggtgggctggtttcagccagaccgccaaaaaacgtggatgctaaacacagagggaagagccagctcccattccctctctgagccttagatttttttgaattccgagagaggtcaggccggggtccccttcttgggtgagcgtccagccctttgaagttcaaacactgagaagccgataggcagctggctggcgtcacaggatcgagccgaggactgaaggcgcctcctaccgggaatccaccgcctccagacgaaaataggctgcaatcaagttcacttccaaaggcggaattcatgggtacatatggtgtccacgtgtgtacacctgcagagttgtaacatgcgggcatttctcccctcagcccgccattctggcttcttaacttgcaccctaacagctcgacagaaccttggcgtccacaaaaaggcaagtttgggtctgccttatgatttgggggtgggaaggcatttggggaaacagtctccatgtctatgacagcaactgctattc

SEQ ID NO: 4754 - DNA, 6000 bp, Homo sapiens
tatagaacaagaactcttgagtattacttcttcaggtagtgttgttaagttgttcaacaattctctggaactggtgaaacagaaggggaaatgtcagttgacaaaacagcaaaactcagccgtcagacatcaactgcagaaagaagaggcaaatacacttaccaagcaatggagggaaaacatgcaaaatattaagtcaagtttggaagcaactagcttttggggagaatgatacatttaagatcttggatatgtttaatgtattttttaaagttactataattcttttttgagctccctttagtcttttttggaccaaggccattatataaatacataagtaaactctctttcatctatttaaaaaaaaaaaaaaaagaatagtgtctaaattaaccacttctacttccatctgtctctgaaggatgatttcctacttgtgacatgtccctaacagaagcaatgctcagataaattaactaaagccaagtctttattgaaaagattacttaatagcaatagctgtgtatccccaaagccaatgagactttgttttccaaatcatttattaatttttctaaataccaaaatttaactcttctagaagcattgccattttccatcaccttgaagaaataagtgcagtttctaataatttggatctaaccacactagtcttattattccatacttgttaagaaaaattttgtgatgagctagacaattctgtcatttaccacagctacataaagccagtttctttaactcatgaaacaatgatggtagctgatcataattcttttaaatttaggaatctttctcttagtggtactagtagatctaaaagttctagagaaatgatgatgatgatgatcaggatgataaaaataaaagtggcagggcacagtggctcatgactgtaatcccagtactttgggaggccaaggcaggcagatcacgaggtcaagagatcgagaccatcctggctaacatggtgaaaccccgtctctactaaaaatacaaaaaattagccaggtgtggtggcacgcgcctgtagtcccagctactcaggagcctaaggtaggagaatcgcttgaacccgggaggtggagattgcagtgagccaagatcgtgcgactgcactccagcctgggcgacagagcaagacactgctcaaaaacaaaaacaaaacaaaacaaaaaaagcaacaaaaaaaccccacattatttcattcaataaataggaactatatgctgattacatgccaggcactaggtataaaatgatgaacaagacttaactatttctttaaggaactaccagtctgccaattaaacagtcaaatcaggccaggtacagtgtggctcatgcctataatcccagcactctgagacggtatggtggcatgcaactgtagtcccaactactcgggaggctgaggtgggaggatcatttgcgcctaggaagcagaggttgcagtgagccaagatcacgccactgtacttcagcctgggtgacagagcaagactgtgccagaagaaaaaaaaaaaaatccaggcaaattcaacataatgagataagtactctgacaggaataatgatagaatgctaccctatccacattcgtcaggcagggagtttcaaatggttgcttagaagacatgacatctcagctggatcctaatggaagaggatctttttcctacctggcttcagggtaatagttcccatattctatagttttcaactgactaagcagttatgtttctgtcttttttgctccacagccgttactatcaataacaaaggttaagaaagcattctgggacttgtaagtgtggtaccctcttttgtgttacaaaaatatgaaaatgaaaacaaccagacagactgtctctccaagaagtaaattactcacagtgccttcagtctctgaatagagtcctgaccagaagctgaaagtgcttttatccagttgatagagtcgagatttctcaaatgtttcagaatccatgatctgtcctaactccggtggtacatgagttgttgttttatatatccttctctgaaatattttaaagaaaacactttagtgaaatagttgtttattacaatagtcatttatgatcaaacatcgaatggtttatagcttgccacttatatctgttgaatttgctttatacctacacaaatattgcacttgatcaagtacatgaaacgactgatgcaggaaaataaaagcagaacaagagaacctgaggtgacctgactggtaaaactataatcagggttgtcatcacacttcagtttgtatatgtaaaccaaagctgttaacatcacaactttgttacatgtactactcattctgggtattacatacctcctataatacggaaaacaaattcatgcaaaggagaagcacacatgctaactgtgagtatgaacagatactgaggctgctcattaaatttggtcctaaatgccagaaacttgaggatcaccagatggaaacatatcaggtctgtgagaaaagaccaattttcagccgggcacggtgggtcacgcctgtaatcccagcagtttggaagacaggggcagaaggattccttgagcccaggagttcaagactggcctgagcaatgtggtgaaatcccgtctctacaaaaaatacaaaaattagcagagtgtggtggtatgcacctgtggtcccagctatttggggggctgaggtgggaggatcacttgagcctgggaggcagaggttgcagtaagcccatattgtgccacagcactacaccctgggtgacagagaatctatctccttaaaaaaaaaaaaaaaaaaaaaaaaggagaaagatcaactatctcattatactaaattataaaaggtaagggtaatttcagtccaggaaatgtaatacagagaatggataccaaacaaaataatgggccactacaacatgctttccctatatattgttgtgtgccaataaaagctgaggggagatcgagcacggtggctcatgcctgtaatcccagccctttgggaggtggaggcggcaagatgacttgagtccaggaactccagaccaccccgggcaacatctctacaaaaaaatcaaacaattagccaggcacagtgatccgcacctgtggtcctagcaactcagaaggctgaggtggaggtggaggggtcgtttgagcccacgagttcgaggctgccttgagctatgatgatgctactgtgctccagtctgggtggcagagtgagcccctgtctctaaatacaataaatattctatcctggccaagatggtgaaaccccgtctctactaaaaatactaaaattagctgggcgtggtggcacgtgcctgtaatcctagctactcgggatgctgaggcaggagaatcatttgaacatccctccctctgcgcgctgctggcagtgtcacagacacactcttccccttgcagactctccctcgtccctcctagtttcttgcagtgagccgagataacgccactgtactccagcctggtgacagagctagactctaaaattaaataaataaataaagattaaaaataaataaataaaagttcagatctctaaaccatggttatctcaggtaaattgttaactttcactttttattttaccattttaatatttaaactaaaataatgttgattttatgaaaaacgagaaatatatttcatttaatttcatttatttatttattttgagattgagtttcactcttgtcgcccaggctggagtgcagtggcacaatctcagctcactgcaacctccgcctactgggttcaaatgattctcctgcctcagcctcccaagtagctgggactacaggtgcgcgccaccacacccggctaatttttctatttttagtagagacgggttttcgccacgttggtcaggctggtctcgaactcctgaccccaggtgatccgcccgcctcggcctcccaaagtgctgggattacaggcatgagacaccacgccgggcccgataagttttttgtttgtttgtttgttttttcaagcagaaacaatatatgcactttaaggagaaacaagagtgcaagttcttggaaggactgcaaaatcctatggttaggcatgattacataaatgtcatgaggaagttgggtgtctaaatccttttaaaggcttattccaaagataaaggaggccaagtctgggcccaaggatcccaaggaagctgcagggagggcacaagagcccaagccttcctccaggccctaaagggattgggtcccatgataacgttacagaaaacttccttgacgcaccaagaccctcctcaaagccacagtccgccatcgggccaagttacgagactcagcagggaccacaaagacgagactggcgcggggaccgaagcaatcaagagtctcagggtcgaagccaaggctactccagggctggccgggtatgggggtcaggttggaccctgtctaggctcacctgccgctgtgctaggaaggtctcccaaagatacactgtccaggaaaagagcagcacggccccgaagatacgcttctcggccggcatctcccacaaagcgtccagcgatgcccacatccccatggccacccggttccgccggctccttcagcgtgcaccggtgccacaccgacactcgtcccttcagagcgtccccgcggtgtcacagcaatatccgttctttccgagggcccctacgccgatacccgcccccatccctccctctgcgcgctgctggcagtgtcacagacacactcttccccttgcagactctccctagtccctcctagtttctacaggaaaagccccagccccaccttcctcacttccggcccaaagagggcggggacccaaacgccgagttccgggcccggctgagctgtgttgcatcaacattcttcccccacgtcttgacgctgggttccggcctagggttctggctttcctcctgggctagtgaacgcggcgaagtcctcctctttctaatctccagagccgcagttccatcctctgggtcagcggcttaccctgactgggctgcggtatctgccttccttcccccaacaaggcgacaggtagtcggggctggggccggaactgactgagtgggccgcaactgactgagtgggccgcggctcccgcctgaggaggctaggaaggactgaacagcagccgacttcccaggctctaaaaatcgtgcctctgagttagagctacctcaaaagcaagaccaagcatgagaaatggagtcttttggccagtattggggtgttcggaattcaagcgtatgagagagtggacggtagcgttgagaattttcatttgaagatctcgtcttaaccaccccaagtgtagtcagaggcggcgttttccctgcgagagtgccctggaacaaagcaaggatagcgtgggttagacatacctgaaatgaaagcgtcttactttatctaggtacatatttgcgtcagtaaggcgcaacgccatttctctcttggaattcagaagtgaaatatggtgactgggacgcctgtacattgctttgacttaaaaattgaagtccattattctgaccgaaagttaatctgatgattaattggttaaacatactatcgttgctaattagcataattattatttacaataaagtgagctaaatagctacaactaaaatatatttaaattactgtgatattgtgatgctaaagatgtgttgaaattaatatcttgaatttctcaaccctgcctaaatgcctctgagagtaattagtataattaaaagtcactagagaaagtgaatgactctaataacaggataacaaattcttttcaagtcagatggtttccagttctttgctttcaacaaaattaatggtggcccatgaattgtcagctgatgaaggaacactatttggtttttggcatgcaactcggaaagaaaccaaacgattgatt

SEQ ID NO: 4755 - DNA, 6000 bp, Homo sapiens
ttctctacttcacaaatacctgttgttatcactattatgtctgttgaatttcgtggtgaaagaagcaaacaggataggggctaaaatttgcctaagacagagagctcaagagcacttagaaatcagctggaggccaggcatggtggctcaagcctgtatctcagcactttcggaggctgagttgggaggattacctgaggccaggagtttgaaaccagcctggtcaacatagcaagactctgtctctacaaaaggaaaattttcaaaattagccagttgtggtggcacaggcctgttgttgcggctttctggggaggctgagacagaaggttgccttgagcccagaagttcaaggctacagtgagccactttcgcaccactgcactccagccagggagacagagggaaaccctgtctcaaaaaaagaaaaggaaatcagctgggggcagggatgggtgtgggttgggacagcaactctggtcactcaccattccaaggtggaggcttccagtgggctgtttctttgcttgggtacataacagctcccccaaactgctgtgcccattccacatctggctgccactgccgaacacctctggggagtcaaagacagatcctagacaaagggcctgaacagtgtttggttcctgtgttcccattcactctcaaggggacccaggaaggatgacctgtttttttgttttgttttgttttttgttttttttgagactgggtttcactcttgttgcccatactggagggcaatggtgtgatttcgactcactgaaacctccgcctcccgggttcaagtgattctcctgcttcagcctcccaagtagctgagattacaggcatgcgccaccaaacccggctaattttgtatttttttaaagacgggggtttctccattttggtcaggatggtctcgaactcccgacctcagatgatctgcccgcctaggcctcccaaagtgctgggattacaggtgtgagccaccgcgcccagccaatgtcctggattttttaatgccaagtcactgatctgaagttaatgtagcttcggcaaaacaagctggaactctagaggttccattcctactaacaaattattcctggaataactccacccatcacccctgggcatgcaaggttgggatcctagcttcttcatattttcatcatattgatattatcaaccaggtgaatatgaacgtgagaaaagtgtttgttcaaggtcaacgacagagagacagcgagcattctggctctttggctgagctctactcaggtatgacaggagaggtgcattcaaattactgaagctaaaaagcagagtctcccactccgctgatttcacctcggcacgaacgaactctagaccctctcccctccctcgccagagtgggcgccactgcatcccgtagcccaagaaatcagggatggacaatggggtcacaggcttgggttattattttctgggggagtaaagcgtccccaacctgagaaaccctagccttggagaaagtgtgtcgagagctgccctcgatctcacctgctgggctgaatcggcaatcggactccagccccaggccgcagcacctgggccgcgacgccccggaagccgcacaaagccctcagcgccgccatcttactccggctgcagactgcgggaaggagaaccgggcggaagtaactccagcgcgcctccttcttggcttctcacctattcgcacagtgaagccgccctcttggaagctggcagggtcgtttaccgtcgaactgacaacatccgggtcctgtgactcggcttcacttgcgtttagataacagtgaccgcggtcatctttactgagggcgtttcctcccacagctcctggctggcttttctaggagcgagcaagggaaaattgccgttcctgcgtggggcagatacttcgtgctctctcgccgagcccgcctgcgtatcttggaaacgcgcggcgcttccttccctactcccttccgccttggccgccctcatgctttagtcctgctctcggattgtatctgagccctgcccttatagggtagccccaggctttgccaattactttcccatcactgaatccaaaagacaggagttgggaaagccagctaatttccagatgtcataaattgagattggagaaaggagcctaagtggggctgggcgggtctgagagctcccgccaaaccaaaacaaaaaagaataggatgccaaggccgccggcattggtggtgcggaggggagtgtcggggtgtgtaggagccacctcatcccagatgggggagtggaggtcctctgtgggtgaccctgacatcctccaggcttcccgaacctacagaatcacagacccaggaagcgcccttagagatgcctcacaccccacttccgtcttgcgtcagcctcttttccctaacgtctttctgaccctgctatagccctcctgggtaatggccaacagcacggaaatgtagtagcaccaggagtctgatcacaattctgtatggacaaagattcttccagccttagaggctagttcctgttttctccctctgcctctaagcccaactccagctgggccacccacccgtagagtttgtacaactctccaactctgagcctggaaagaggccttccccagatatcccctagacaggatcccagggacacagcccaccagcagcgcagcagggtgaggcagacagaccaggaagcagagatggtggaattcttcactgcagagaaagaggggaaagccagacttctggcctgggaattgacctaatgggaactgtaccaaagggtggggccagatccttagctgtgggaactgaccaggacctgggctagacaaggcagctgccacagagccagggcagaggtttggtccctctgttgtcctcattccttgctctttccctgggccttctttctattgttgaaacacagcaaatgtggccatggtggtgggggatgggaaggactgcatttatttgccttgatccagcctgggagaagtcaggatagactttgggctgcttggccctggaggcagcttgagctgggactggggtggggggctcctgaggggctgcctaggacactgcagcttttgtgccttctccctgctgccaacacccccacacacactgctgcagccactctaaagccctttgtctttcattgcttagtcaccccctttgtcctcatctcaaataggggagtggaaaggggcagtagagttctctggtgatagctcctcttgcccctgccccttctggtctcccaccctttgtccgactcctctagtcccagccccgttggcttagaaccagggtcaggcaagtggtgggtcaagaggtgggtctggcagtcacaagggggtgggtgatccaggaagtgataggcaccagggcaggtattaccgacctgagcaggaagggagggggaaaggaagtattctgacggatatgatatgcgggggacaggaggtgacaaagcagagtgaataggggaatagaggcaagaggaggtggtccacttctgggaaaggaaagagactgctgactgcactctccttcctggggatttcctggggaaacaagcagccagaggatggggtgagcagaaattgcccctacttctgaacccttccttgccttgagagttcatacccaagacctcttttccgagttccctcctatccaaagccaaaggaataatttgcttcctttccctaacaccacctcttcctccccagccactttccccaccccaggcaatggatttctcccagtaccctaatttccctatatgcacaatgctgtctccaccctctccctgccccagggagaattaaaaagaaaagatgactagatattccaggaaccactgggttctcagagcaaggtggggtggatggtgggagccaggtggggattctcccagattgatactgggtgaatctgggttcctgagagcaagtcttgcctatgctgggggctggctgacttgaggctgggggagggtttagggcagttgggagtgggtaggagcagggccaaaagcctgggggaagctactgggagctgggccagggaaatggggagtcaggaagtggggagggggaaccctggggggaaatggaggcggaatggctgttctgggctttggagggggtgggtagtggtaactcaggaagggggatcctgagggagagaagggacgttagaaaagaggaggtgccaccctggatccgccttctataaaaggaaaagtcgttaacccctcctgccttgtcatctgccgcctctgttatgttcattccaagcaggatcatcctacctttgggcagtcaactccctgatcactgtctccttgcctcccccaatgttctgccttttttactcttcccagctgctcagttctatcctgagccatgtcaagctacctcttttatttgttcttccctcttgatgcctccttacctgttccctaccctcttttctcaggcagctcactcagtcccctcagccctggaaaccagccactagggccaaagggcagcatgagggagccttgagaaaagagaagccatggtaggttagactataagagcaggaattctcccaggaccgtgatcctatctgtgcatgccggccaggccctttccctcactctctgcctctcctggggctctgtcccaccaaaaagggaaagagacagctgagggctgattgtggggtttgggaaaaggctatgtcatcagctggcccagtgcctattatccattcggctgctagagattcccctcccctgggcaagtcccatttttttgggaagcgatgatacacccatctgagtcccaccgacagagctcagctgagtggcttagagatcagccaatcaatcgcagaggctcaccatgcttaaaagagctggcgcggagagaggctggggagaacccacagggagacccacagacacatatgcacgagagagacagaggaggaaagagacagagacaaaggcacagcggaagaaggcagagacagggcaggcacagaagcggcccagacagagtcctacagagggagaggccagagaagctgcagaagacacaggcagggagagacaaagatccaggaaaggagggctcaggaggagagtttggagaagccagacccctgggcacctctcccaagcccaaggactaagttttctccatttcctttaacggtcctcagcccttctgaaaactttgcctctgaccttggcaggagtccaagcccccaggctacagagaggagctttccaaagctagggtgtggaggacttggtgccctagacggcctcagtccctcccagctgcagtaccagtgccatgtcccagacaggctcgcatcccgggaggggcttggcagggcgctggctgtggggagcccaaccctgcctcctgctccccattgtgccgctctcctggctggtgtggctgcttctgctactgctggcctctctcctgccctcagcccggctggccagccccctcccccgggaggaggagatcgtgtttccagagaagctcaacggcagcgtcctgcctggctcgggcgcccctgccaggctgttgtgccgcttgcaggcctttggggagacgctgctactagagctggagcaggactccggtgtgcaggtcgaggggctgacagtgcagtacctgggccaggcgcctgagctgctgggtggagcagagcctggcacctacctgactggcaccatcaatggagatccggagtcggtggcatctctgcactgggatgggggagccctgttaggcgtgttacaatatcggggggctgaactccacctccagcccctggagggaggcacccctaactctgctgggggacctggggctcacatcctacgccggaagagtcctgccagcggtcaaggtcccatgtgcaacgtcaaggctcc

SEQ ID NO: 4756 - DNA, 6000 bp, Homo sapiens
tctctatttaatccaaaccacaaacctaaggtaaatgcttctatcatctctattttacaaacaaggaaacttggccttaaagaaaggttaagtgaattgtcccaagttatcacaggattggcagaagaaggatctgaattcataaattctgaatccgccacactaaaatgcctggtttcttcaatcagaaaactgctattaatcatctactatcttccaggttaattctaatgcttgcagtagcttttccaatctgcactgaggtgcttttacagggcattcatgaagagataaagactacagtctccagcacttaactaatgggtctccaaggcagatccttttctttttcagtgtttccaatgacagcaaaaaatgcttccttgatattttgaatcttgaagggaaacatcctacaggcaaaaatgtaccaattacagacccttattaattgtccatactccaacttctcacttcacgtaacatctgctatgtgagcaacgggaattgattttattatgaccaaggtgcctttcacaactctttggatcagtgcttgtgttttcttgagctacaaagtcaagggaaaacagatgttcatttttaagttctaatttagatttaggctttaaattagaatcaagtttcaattaaacaactaataggcagttatttgcacaacattgttttcaaccagcacggaggtgacaaaaagaataaaatggccaggcgcagtggctcatgcctgtaatcccagcactttgggaagccgaggtgggtagattacctgaggtcaggcgttcgagaccagcctggccaacatggcaaaaccccatctctactaaaaatacaaaaaaattagccgggcatggtggcgtgtgcctgtagtcccagctacttgggaggctgagccaggagaatcacttgaatctgggaggcagagattgcagtgagccgagatcacgccattgcactccagcctgggcaacaagagcgaaactccatctcaaaaaataaaaattaaaattaaaattaaaaaatttaaaaaaaaaagaataaaataaggctaggcactgtagctcatgcctgtaatcctagcactttgggaggccaagttggacagatcacttgaggccaggggttcaaaaccagcctggccaacatggcaaaaccccgactctactaaaaatataaaaaattagctgagagtagtggcacaagcctataatcctggctactcaggaaactgaggcatgagaatcgcttaaacctgggaggtagacgttgcagtgagccgagatcgcaccactgcactccagcctgggcaacagagcaagactgtctctaaataaataaactgagatcctcagctctccaggagtattgaacctagtgaggaatatataatatatgcagtatttataatggaaataggaaatacagggttgtttcttcaaaatggaccttgaaggatgagaaacctaaaggctaacaaagatatcaacagatatatatgggaagattattccaagaagagaataagtctttgagtacatgtcaacagatgagactgtggatatgctggacttaagactattagattaatatgaatggagcttggttatgtggaagtggtaaggggaagaaggtttgtagtaggatataaggctgtcaaggaggtaaaaaccaaacttcgtgaggctctgaatatcaggcaaaataggtggaatgtttaaaaaaatctaagaaaggtagtaaatgtctgtcaaaacacatgctacaatgatgaaaggataaaaaagtttttagagataaagatctgttttactgaaagtctggccttcaactattaacatacagtcaaattttagcctgcttaaaacttacacactggtatctgttttaaaattaatgcttttcctgaaatctaagaaaaaaacttttgagagtagacagaagaaatctttttctcctctccttttgttttaggatttagttaacaatagctctattcaaaccaacttggcccttctgcagtcttctaagagcaaatacaaactttaatacaaatgtcgctgaatatgacttagcattagctttgcttaaaaatcatgtaattttttttatttaactgtccatggcaaaaaacaagcattcagtaagtaatgaataagttgttctatttatttcaattattagttatacaaaaaaacgtagggtttgccacaaggtaagcagaggagaatcagccatgatttggtggtcctctgagaagacaccccttccccagactactagatttctcttcaaatcccacgcttttcctcaactaatttgcaataagagaagtacacttatgttttttgttacacaatcagcaaatagttactacgcctggcaactctgctttatttctgtgccccctgaacacacttcactcaccttgaaaagctttctgataggacagagcacatgatcttggtagcacgtcacacagcaaccttctacccagagcacatgacaaaacagatcagctttcaaatatcaacactgggaacatgtttctctccctgtgtttcactatccggaaaggcgcacaaactgtgcagatcacatggcagttcacatgaaactttaatggtcagctgttcacagcagtatcaattctgcctcagtggctacacctcagattcagtggttgttttgggtctccagaatcatactttctcatatcagtgcagtaattttcttgtaaaatcattctgtcatgaaatttggctgttttgacattattgctttaaatcagtattaaaactcaaataggttatgaataactgttacggtcgcttatgtaatgatccacaagactgagaaacggcccagccactccatcccacaactggcaggtcaatagggtaatttaaggccaggcaaaaagtcagtgatacttgctagaagtgaacaaatgtcagactctcaagtgaaaccctcaatacgtaagtcaatactgattcttaattctctctcaagtgcccttgaaaatgacggagcattgcaacaaacaaactgcaaacaacaaactatgagtaactatatctcgccagtgtgcaaatgattccggtagtgccatctcttgttctgacctgttatgcagggttactgagtggctactcaaaagaagtgactgactactacccacatagagaagagtaaggtttaaatgggaggagtattttacagcacctggggcaaggaggcagggtggaaggaacaggtgtaggaaaaaagaaaaagctctcaagtggccccttgactgatagtaggaaaaagaacatgagacctcagctttcaccctttgttgtattcaaggaagagggtgttgaatcggctttatttcggttttgtggaagtactttgggtttaatttctttctcagtttatatattgtctttcttctgcaaaaatcaagtgctggttttgaccatgcacttaaataggtcagcacatttctaaagtacactatgcgcttctgaagtactttatttgtaagccctcatctagggaaaaaatcaatcagcaagaaactcttgatgatggactacgtgctctcaattaccctgaacatcacagaaggccttcaaagacatcaccttgtatctgagaagcaaaactaacatctgtgaagcaacaattcgcaatacaagaaacactataattaaaagtcaattatgtttcaccatctgcctttatccctggaggttggtcttaaggtagagaggggcaggatatccttggacacaacctcacccaattaaaaatcaagacaaattaagatgttctgtacttctgtcctgtccttacttgattaagcccacccattctgccaaatgcaaacaaagtaaggtatggacaggaagcaggtgaaggaggtagagggaagatcctttcagaaaagcagtggttgcctactttcagtcaatgaatatttactaagccgtgtccaaagtacactttgctgttttcacttctttgtcaaaatattgccccctcgcccccagcaggaactgctggaccagtctgggcagtcacgctaagccacattacaacacgatcagcatactgcctgacgcacaaggcacggggcctctggacgcgtgttctgagcccttcgcaggagactcgtcctacagagccgaagaaaacagaaaatcatgaacacaaagaagagcacgaagccgacctccaactggcaaaatcagaaatctctgccgagaatggctcgagcgcttttctcggtcctctcttcctccgctgcccacccgcaggccggtcgcccgcccttcccgcgccccgcgtccgccgcgcgtacctccctctcggtcaggttcttgtccggccccagcaggtacggggtcaggaagggctcggacggcctgaggctggcgaagaagccgtaggcgcagagcagcgcggtcggcaagaaccagcattcgcgacggacccgagcggtccgcaggagcacagtggccgccgccgccgccgcccgccgagacaccgggccgggcacatccatccggggcgcgaggggaggggacccggcccggccccttccttctcctcctccgccaactggagtgagggtcaggcacttgtaaccgcgagtgacgccttctccctgtaaggccaggacgttctggactcgccgccgcctccggctacagaacccccagctttaccctacagacgcctctagggtcgctgcctgatcgcccagtttaagggagacccgtcctaaggcccaccctctgccaccgcctccactccgggaaccaatcacagcggacgccgggaatacttgcctgctcttccattggtcgtgggtcacacgacgtgaactggggcggtggcagcacgccaggcctctgacgtcccagggctcaagcgcggaggacatgtggaactccactccaaaagcggcggcttgcggcggagctctctctagtgaggcggccagctggcgttcgtggcacacttgctgtcggctccgctcatctgttgggaatgcgtcctgtgggcctagtcctccgctggaagaaacgcgctgttctccccaaccaccgtttatcattcttattcaccgtctccggaatgtccattcagtttccgctcctgagagacttagtgactgaggccaggcaaagatttcaccttggggagggggaacgttaaacctttcctccagcagctttcgtgttttaaattgtattcatccgccatggaaagacatcagaagcccaggatctaagagacagactgaaatgaagaaagtagataatattgtgagaataatgaacaagctggtcactgaacagcagaaccgtaatggagtcccagttaaagggttttaactttatttcgtcactttttgcaagcatgatacaaagaaaacaaacacctaactacgctacggtttatagttaaaaggaaggtggaagatcctgagtcattacagcaatcacaaaacatgatggatttcttcatttaaaaacacaaaagaggtcttggcatagttttcaagggcaaagcatgacaagactctccagtgctttctttcatccccctctgtgtgcctttttctgcctgactcacagcctggctcaatcctaatctttctactgcaaagatgcagcatttaaagcaatttttcctgtgcagtatttgtagaatgacagatcctgccagaagctcttggaaacattttggaactatcttgcttttctgtatgttatgatccatctagcaccgttttcctcctgtggtagcaaatgacacttttttcaagcatcagcagcagaaatgagtctaccagatggaataagatactggtaaagggaaagatttgtttctaagactgcacaaatgaatgcacccaaatctgtgagttgattaatctgtgaagaaatacaactggcagtatttacatatctcaatgagtctcaa

SEQ ID NO: 4757 - DNA, 6000 bp, Homo sapiens
gaggcctggatctcaaatccagggtctagtacagcaccagcacctggcatagagcagacacttagaaagcatcctattttttttttttttttttgagacggagtttcgctctcgttacctaggctggagtgcaatggcacaatctcggctcactgcaacctccgcctcccaggttcaagcgattctcctgcctcagcctcctgagtagctgagattataggcatgcgccaccacacccggctaattttgtatttttagtagagatggggtttctccatattggtcaggctagtctcgaactcctgacctcaggtgatccgccaacctcggcctcccaaagtgctggggttacaggtgtgacccaccacgcccagccagaaagggctcttatctagaggtgaaagaaaagagatcatgattccaaaaataaatacaactcctctgtattaaaaaaaaaaaaaaagacctttggggtcctcgtagacaagacaaggatcaaatcccaaacgactctcttcacctgggtctttgaggtctgtccatcatgacagatcttcaggttttcatctaattctccacccacaaaagcacagcgcggcctcctgccaggcccctgttccctccagccactcactgtcccccttcagggatttacttctgcactttctcccatccaagttccaagcaggcctgacactgcttagcttctgagatctgcatgttcaaggtggtatggccatggacttgacttccacactttctgctgctcaccatgggggtctgtcagccctcctgaagcttcaggtccagcttgggctgctctactctaggaagcctctcccaccacagggcccaccatggtggtccagacccttcagcactgtctcctgggtgtccgagacaacttcctgagggttaaaatgatgtctatatttctttgacctcagccagtgatgagcaaaaaaggcatgcggtaaaacctggggagcaaaaaccccctcacttcccctctctgtgatccccttaagaccttctgtttactttaagagcaaaatgtttgtcccatgaccaggccccagactcattaattctatgaatgaatttttctttatgtttactgaacatgagagccacacggtgcctttaagaaggttgctggcctatgagcaagtcacagaggggatctaggtgggacttggctgaccattctctggatgggaggaggggtggcacggcctgggcctgggatgtcagagcagctctggcttgggcctacagtgctgccaagtgattccattcagctcacttggtacatcatccctcccaggccctggtgacagtgagtgaagccatcaaaaacacgacaacaggaaaatatagtgcttatgggagccccaggagagacccttcccaaatgaaatgaagtaagagagggtattgagagactgaggggatcactggcctgggaaaaagagagggaggagggaagacagattctgggtcaaacgaccggctttagcaaaggcctgggcagacgaccatcggtgtgggcagccaataggtactggctggtaggattcccagcagaaggatgttgggctgccaagcctgacctacaaggcccagggctctgaatgaccccagatctgcagctgccttccagctagctaatgtgccagcatcagcttctctgtcagctcacagcagtgatgggctctgtggtttcgatttttcaaatacaggggaaaagtaatttcaggccaggtgcagtggctcatacctgtaatcgcagcactttgggaggctgcgataggaggactgcttgagcccagaagtttcaaaccagtctgggcaatacagtaagactctgtctccatataagaaaatgaaaattttttaaactgaaaaaaaaaagtgtttttaaaggctgggcacagtggctcacgcctgtaatcccagcactttgggaggctgaggcgggtggatcacctgaggtcaggagttcaagaccagcctaaccaatatggtgaaaccttgtctctactaaaactacaaaaattagccaggcatggtggcgggtgcctgtagtcccagctacttgggaggctgaaacaggagaattgcttgaagccaggaggcggaggttgcagtgaactgagatcgtgccactgcactccagcctgggcgacagagttagactccacctcaaaaaaaaaagtttttaaaaagtaatttcagaaactaaatatgaatgtcctatacacttctccaccattaaacagtaattgcaaaagacagacaatctctggggctccaaaagactgtcactctatcaggccatgttggcctggagggaagctctgcagataggaagcaaatggattcaggggaccacagcgtcgtgatctccttctgaggggtttgacaacctctagctctcctctggagcatggactgtgagagggaagggcaatgaattaaagccagtcaggagcagcaataaggaggagaaacaactgaaagccgtggaggtgtttcccttggaggaaatgtgaaggcacgaagctgtcctcttgaacagaggaagagagattccttgctctgtatcgttcccaccacaatgctctagccctgcagttagcacaccattttgaaaccacctgcttataaattcactcccctccccaaaacctcagctccttgggcgtgtgagtcacttctgagtggccaacaacgatcccacagccaggacacagcaaatactgaactgagagcggaaattacaggaaggcctattgtggctcaagaaagggaagtgctttctaacaatcccagctgcctccaacaggctagaatgtttgggcagaagcatcgccccagggaagggtctgctagcaatggaatgcactcatgccaacagagggaggcaggacaaaacagtctctgagatttcttccaattctaagacccagcctcctggagcagcaaagggagccatgggatccgccactgcactccggcctgggcgacaggggagactccatctcttaaaaaaaaaaaaagaaaggggggctgagggggaaccacaggggagcaatgcaatggcagcacctgcactgtgccagggacacacatccaaacgctacctcgtaaccctcgcaatcccacgaggaggtaggcactagtactcttcccatttcacagtggaggaatctcaggctcagggaggttcaatagcttgccaaagacatataacttgtaagacatggagctgaaatgtgaaccaggaccacgaggctgccctcctggccgtgcagaaggcagctccaaccctttgcagccgaagactctccaaaggaaataatattaactgacttcatggcttgctgacgccaaaacgtgtccaaagtatttttacatctataaacccaaaagcgctaagccagcagatccagttctagggaaaaacagctggtctggggccatctgttctgcgggagtctaagggctgccctctcctagactccaaccaaagaacatgagatgctacgggagggatctgggaaggctctccttaaggaggtaagttttatggagagcagagtataagatcaaacctttgcattagaaagatcactgtggtagcagtttaagaggctgggctgcaggcagtgagacaggaggcgtgaaggcgatgctggactaatgcaagtgagggacacgctggcctcaggctgatcatacttcaaggcccttctgccagaattcccagagagaccaaactttccactctctggaccccgatctactcacactgtcatggatgcgggcctgctgtcaatcctaattttgtggagaatcctacatgtctttctttaatgtaaggagagaaacaatgctgatcgtaaatgccaattactgaactcactccatgccaggccctttacacaatctccagatggccccaacagccctatgaggaaggttactatccttatcccggttttgcagaggaggaaactgaagttcagagaaggtagcttaccaaaggtaatccagctcctaaaggaaggagtcaggatttcagtcgagttctacccgacggcagagactgcactgttaaccactgccgagaagagtggagagggacggctaagggttctgagtcccgggcttctgcgaggatcggtgaccccgcgagcctccccctccacgccttcgggaaaataataagtgataggctagatgtgggaagcccaatcccaaacaaaggaatcaggagggatccagctttcggcagccttcagctatgagaagtgattaaagggcatggacctgagcaccccggacaggaaagacagaaaaagaggtcccaagcgagcagctgactcgggcagaggcggggctcgccagggaggaacactctggggcgggacttacgaggggcggggctctctgagcctctctaagtctaggacctgccagaccctatgagggggcggcccgagggagggcggggccgcatgaggggcggggctacagctgcgctcgcaacccacaggttcatgaggtcacctccccgcgcctggacccaaccctcattccatactctggctccagcagggctgatccgggatctcgatggtgtagtccagctctgccgaggccatggtgaaggcgccggcccagagcacgggtctccagccggaactcccgcttgcgcacccgtgcctcacccgggcgcctcctgggcgccgcccaatcaccacacacctcccccaacacggcccaatccctgcgccgcgctctgtgacctcccgccttagcaaccaccgagtctcttccagagcctctcgcctcaccccactagctcggccctagcaaccatgccccgcccctattactgacccgcagccattggctaattcgcttgatctggatcaggtattggtcagccggggcgccggtcaggaagagtccccaccctctcatgtaggtgagaggcggctgaagagttgctgtattctgggaatgggcagggtcactcgtccgaacagagtcctatcctacgcggcggaagagtgtgccctttgacttgcatcgtctacctacctctgccatcctctaccagccgcaactgcgagggctggaggtataaaaccgtacaaaacggcctagggggcgcgtgccgacccaacctccacccagtggggttgaggcatattctggatggatggatggatggatggatggatgggtggatgggaagcagtcttcagttgatgactttagagaatgccctgttgatagggcccaccgaggagctgggagtgcaactttcttgcatttatctatatttacatactatgtgccagcatatttacatactatgtgccagagactgggtgggctaaataaggttccttaggccctagtgagaatcaagcttttggccctccctctcccatgtcttaacgggagagggagagaaaccatgcatgaagcaactctgattctgcgtgtgagataaatactacagaagagtaaggatttgaggagctcagaatcagagaaggggcatttatggcagtggggttggctcttgagctgggccttgaaagacttttagagatagggagggggaaagactctttgcatgccaggcgcggtggctcaaactcgtaatcccagcactttggaaggccaagacgggagaatggcttgaaggagttcaagaccagcctgggcaacatagtgagaccttcatctctacaaaattaaaattttaaaaattagccaggcatggtagcgcatgcctgaagtcccagctacttggaaagctgaggtgggaggatcacttgagtcaggaggtcaaagctgcagtaagccatgattgtgccactgcactccagcctgggtgacagagtgagaccctgtctcaaaaaacaaaacaaagagcccagtgtggtgtctcacccctgtaatcccagcactttggga

SEQ ID NO: 4758 - DNA, 6000 bp, Homo sapiens
ggctgtgggaaggtcctctgggtgggggctgggaggagacctcaaggggaggcccaggggtttgggctgtgccccctcaaaagcctcctctttgaggaccccagagattggccaggcctgtgggatggacacagaggtctttcccctcagcccacagtgggagagggagacgccagctcacctcagagtaggaaaccaggaaaaagcgccaagcccttcccaggcccctgaaaccagggagcaggccccacacagccagtccaaggagctggaaacttctgacaggctgctgtgggcccaggaagcagggccttgcgcgaacaaggggcctcctctctcctcccggccccgctctgggtgcggagggcctggcacgcacctgtctctggccacctgctcccgaggactccccaagccgtctgggccgctggggcttccattcctgcaacgtcagctggtctcacagtgccacagctggggagcctggggccggtggggccacaggagggccgtgacccccttagacctgaggactctgagctgggacagtcagccagggagagggtggaagagtctggggtgacccaggccgcgggggcagccctgctgcaggctggactgatggaggcctgccgggaacagggtgtgtgctgagccctgcggggaggagatctgggcccagtcagtgctgggcgtctgtgatgccacaaggttgcaggagcccctgcctgcgtctgcaccgaagagcgccgggcacagggaactgggctggcatcctggggctgctggacggggcgtcttccctcgcagccctggaggccacgctcctgactctgggtagagcccttccttgcctggtggggtgggggtggagggtcctcaatccttggcctgcagaggcatcgcctgggtgtcagtctctagccacacagtggctttttcccaggtcttttctggtaaggacaccagttccgtgggagtaaggccacctcaggaccttgccttaacgcaattccacctgcagagacccgacttccagacaaggtcagtttgtagctgctgggttagggcttggaatatcttttagggggcacagttcagtcccgtaacaggagccttgacagccaggatcccagccagacacaggtgggcaggtgggaacctggaggcctcaggggcgggggtgcctccggatgcaggtagcactttgcatcttgggggtgaccaaccaggccacaggcccggcgggtacccagggctggcccagagagctggagccaacgtcaggtgcctgcatgccagcctcagggggcagagaggcaggaccatagtccccaggaagagggcagaagggggtgctctcctcctgggggatcctgaagggaccagagcccatcctcttggcttgacctgcattccctgccggccctgtgcctcctgggggctgtgtgcgtgtggctgcgccgtgcccgtccagccctgacactgtcccctccatggtaggttctcggggccactagaggagaaacatccgtgtggctgaggaagagttggctgttttgtatcccaagttcccacatggaaatgaattcggtgaccccccatctcccgagggcctcctggtttggccctggtctccgggaaccgagtacctgggtgggtggggagctgtacaagctaagaccagggaaggacgcctgggggacggatgccacggcccgtgcacggtcgattggagccgcagggcagggaggatctacagggcaagttccaggtgagaccagagagagctgcagctgccccggctctggaagcccccagccctcccgaggcccagccttcagcccacgtatcctctgaacccgttcaccacggtacggctggggagggtcagcctggggcaggctttgttctgatatgaaatttaatgtcttaggctgaaaaacactaaatttccatttttttgtaggtcagaagtggttgcaaactggatttttagactcttcctgttgggggtctcggacatttgctcttttccacagcggccaattcttcagagccacaaagaactgggcgacgcaggccagaggtgtgggagtccagcccttggttcgaatcccgctctccactgtccatggggttctcagcaagccctctggcctctccaagcacacgcagggttcctcaagcaattccaaactccagagaagacatcccaggtaaaatcggatggcagggacctgggacaccgctgtgacgggcagcccctgggctcgagtccacaactcccacgggagggcagggccccatcctgctcacaccggggtccccagccctcgatcctcacgagtcctcgtccaagaacaaactgtgcacacacgggcggtcagtcctggattcaaggtggcccatcggagctcgaactcaacggcctgacctagggacgcctccagtcccacccctaccttttggaggtgggagaatcaccgtgcaggtcactgacccactgaccacagatcaccactctctcccgcccccgtttcttcctcctgagaccactgctgccttcaaacgcaagtaacccaaacctgctcccaaacccatggcaagactgacccggagcctaacccagccctgccccgagcctgaccctgatgctcgagactagaccccagactggacccggtcccaaagtgggacaacaaagaccacagcggggaccacccaggtcccccagagagaaaacccgcgtcggactccagggagctcatggtaaccccttgtcctggggcagcttcattttactttggcaaggaccgcagtgttcgcttttctcattaaacgaggggctttcaaggatgtgttaaagtacgtgagagacgggcctggtgccggctggtcctgttttcttaaggcggaagttggggaaccgcgtcagcactccggggttcggattcctggaacctggggcagagtctgaaataaagcagcaccggccctgtgtggcgcggacccatgggaagccttgaaaggaaagtctcttcagaaagaaacaatgggttcagtgacttgtacactgaaaagatagatggccagttttaaagttctcctgcgtttaaacacgggcagcagcggggttgacggtacaggcaccaagttctgacataaaagtctttccttaaatcatgtaaaaaaaccgagacgtgcgcactgccaacttacactcatcgacacaaacttacaatatttataaataagtcgcaagcaaacactgagttacatttaccacgaagtcactggacagagaccaaaatcccatgaaagcggattgatgtgaaaccacgttagatctgagacgcagacgtgagaaacgccactgataagagacacggaagatcggagcccagccccgtgagccggtcggggacagcacgggggtcagcgtgcggccgggcccggctcaggctcgctgaggtccaggaacgggcacctccacctggacacggcgcgctgccccggcaacccccaggggtctcccaaacgcagaccgggacgcagcgaccacaagcgtggctgcgggacgggggccttggggcccgggcgtagtgcgcccgctcggcacctgccccaaggcgccgccgggtgaagcaggtgtcccggagggccgggccgcggcggctcaggggatgccctcccttctctggcagcactgcgagggcggcgcggaccagtcgtacacgtaggacaggcgcagctgcacctcgcgcttgcacaggcggccctcgcgcgccagcgtcgcgtgcttctccagcatgtcctccaggctctgcttgtgcgtcaccaggtactggttgctgcagccgcgggaccggtattcggtgtcgaagcgcgggtcgtgctcccgctggacgtccaccggcgccagccaggcgcccagagacacgtcctcgctgtgccaggcgcgcaggtagtcgcggctgaggcgcaggtagtgcaccaggtcggccgagagcacgtagccgccgcccagcgcgtagggcaggtagtagtcgcagagttgccaggcggcctcgcgccagcgcccccccggcttgacgcggccgcggcccgagaagaagccccagtagaggcggcggcggcgcgcgggctcgcgggcgcgcagctcggccagcagcgcgtccagccgcgcgaaggagtcgtcgtccgccttgagcacgaactcgaaggccacgtgctcgtccagccaggccagcatggccagcaccttggccgtgaggttttcgtaggcgtcgcgcagcgcgggcagcagcagcaggtccccgtgccgcgcctgctcccgctccagggcgcgccgctcctcggcgcccaggccggccgtgcccacggcaaagcgcgcccacacgtcgcccggggccccgcgccgcgcaagccacgtgctgcggatcacgctgcggcgctcggcggcgcggggcgcgctggccaccagcactgccaggaaggcggcggcgcgcgcgggcgcggggggaggcgggctgcggcccgacatcgccctggggtccccgggctcggccgcgcagcgcgccaggtagagcagcgccgccccgcacagcgccagcgtgcccaggcctagcgccgcccgccgccgccacgcccgccgcagcagcttcatggcgcccgcgccgggccggcggcccaggccggactcgcgagtgcgcaggcgccgccggctcggggcggtgcgcgtgcgcacggcgctcctgggagcgcgccggggccttccgcagacgccgagccccggggcgctcggaggccggcggccaatcggcggccgtcacgtggcctcgggcacccttgtcattggtcaacctcggagcggccccgcgaccgcttccgcccggaggagagatggtggcgccggcgtcccctccgtgaggtcgcgcccgttcgcaccgcccccgcccgcaagaaagatggcagtggcctgatccgggcccgttggcggcgtcactgacgcttcgctccggtcctcggatcccgagcgcggggaggcagaccggtgagtgaggggcccgggacggccgctgcaggccgcggggccaagtgtacgccggccggacggcgagggcgggtctggaggccgccgccgcctcccgccttgggctggggcatcgtccgtccgctcggccttgagccctggcgagactccgccgccaccggggctcccggggttcccgggggcagggacaggccgacgacgctggcctccccggccgccggcacgtctggtctcctactggccaaaacctacgaatgccaccgggaaacggaggcccaaggggtctggttggactcgcgtttatcggcgaggcgaccttggacaagctgccccgcttccctgcgcctgcgcttccgcttctgaaccgcgtggaccctcatccccagttagtaggatttggagatgtgaagtcggctgtgtggagcccttgatgtctggctcagaggcggtgttatgaaccctgttgagcttttagaatctaaccgtgtgtgttgttaactgccagaaatagcctcgttccaccagagctgaagcccagggatggcaaagaaatagcgtctctgcctaagctgtttcccacgtccgttttgcaagggtgtgttgattccttgctgggaactgagctgctaggggatggcgaagtcgaaaccccattccggtgggaccggcccgctccgctgtgctgcgaacctggcacaccgtgatgaatagatactctgaagccaggagaggaagcgccacttgatggactcctgatatttatagttacttttgggttactttttattccccctttttcgagacagggtcttatctttttgtttttgttttttaaagagacgcagtctcactgtgttgcccaggctggtctcacgatcctcctgcctcaagtaaaccgtgtaactcatcaagatatgtagaatcaagaactagctttattttct

SEQ ID NO: 4759 - DNA, 6000 bp, Homo sapiens
atagggtatgattgaaggagagggtatatggaagggaacagtgggaattaagaaaaatataaaatttacaaggctcctaatacttgcttagtaatttcacatgtggcaacataggggcaaatttcagagagtctcaggtgtcaggctgaagtctggactcataatcaacaaggagcctagtaagttcttcattatggtaaaaacacgatgaaaagtgatattttagaaaaaccggccaggtgtggtggctcacgactgtaatctcagcactttgggaggctgaagtgagctgatcacctgaagtcgggagttcgagaccagcctgaccaacatggagaaaccctgtctatagtaaaaatacagaattagctgggtgtggtggcacatgcctgtaatcccagctacctgggaggctgaggcaggagaatcgcttgaacctgggaggcggaggttgcagtgagccgaaatcgcgctattgcactccagcctgggaaacaagagtgaaactccatctcaaaaaaagaaaaaagaaaaaccactcttcaggttgtatgcaggatgtaaataatttagtggaaagcaactcatgagatttgcgttgttccagaaacaatctgtactctggcattatgaatggagaggagaaaaataaatattatgaagaaaataccttgcttgagtgataattttatatgaagtataaatgaggagtgagttaaaataactcatgggttttaaacatggatgtctgggaaaatggttgaccaaagtgggaactatgggaggccagagtggtttaggacagaagttattaatttggtaatggccaagctgagtttatggtgacagccctatgagggtgtcctaaaggtcactgaactagatcagggctagagttctaagtgcaaagtcacagatatgaaagtaaatgagctcaacagagccagtacacacaagctcagaaggccagtgactgtgcctgtagtgagtgggaggaagagaaattaatgaatggaatggagaaggatttgactggagaagtaggcagatagccaagtttgtattatagagtctagaagagaaagtttaatataatccatcaaaagctaccaagaggccaaggaggaggaggtcacttgtaactctcaagaaagtagttttaactgagtgcttggagaaaagctagatttttgtggagttaaagagtgagtacattatgaggaaagggaggtgagtacagaccaaccatctaaaaaatctggtaatgaaaaagagaagcaacggctggaaaggggaataggaccaaagagcagcctgcatatagttgagcacagatgaaagaagccagtaagaatggaagtgaaagattgacaataagggcagttaattctttttgaagtatacagtaggctgggcgcagtggctcacgcctgtaatcccagcactttgggagctgaggtgggcggatcacctgaggtcaggagtttgagaccagcctggccaacatggcaaaactgtgtctctactaaaaatacaaaaattagccaggcatggtggcgggtgcctgtaatctcagctacttgggaggcaggcaggagaactgtttgaaccctggaggtagaggttacagcgagctgagattgcaccactgcattccagcctggtggatataaaaataataataaataaacaaacaaataaataaaatatagagtagactctctttagattgtaaattccttgaggacaggaatcttgtcttattcatatttatgtccctttctatagcacctagcacagtgactagtatagtataatgcacataatagataaaaaatagaaacaattgaattgaattggcctccctggtatggtcagggatagctgaaaggcacagaaggactccttacagtgatggggaaggatggatctttctctaagcccaaaggaaaggaagacagaggttgttgtaaagaggtggcagtctttctggagggggacagagaagtggtaggaggaatgacaccagcctactgtgtggggatgtcggtattttagcagagtccagatctgaacgatgccgtgtccagtttgcgaagtcctattcccctcctcctgtcgtgtgcctttgttcaggtggggatgtatttcatgtagaaggtaagagtgcagccactggctttgggggagtctgtgaaataatattttttaacttcccacactaaaccgaagtaattcttaccagtatctctagttagtgtttccagcctggtcaattatcagccactgaaggaagagatttaggctcatccctataatcccagcactttgggatggtgacgtgggaggatcgcttgagcccaggagttccagaccaggctgagcaacatagtttaagtccaggctgagcaacagaccttgtctctacaaaaaaattaaaaataaataaataagaactcctctacaagacgttaaaaaaattaaaaataaaaattagttgggtgtggtagcacaggcctgcagtcccagctattgggggggatggggtggaaggatcccttaagcccaagaattggaggctgcagtgagccatgatctggccactgtactgttgccactgggcaacacagtgagactgtctcaaaaaataacaagtaaaatgaaagaagagggatcacatttagaaaaatcttcttattcagtcttaaagaagtttaggagatgctgaggcagacttttgtgatgagtcattactttttctgaactaagaggacttcaggatctcctagagcagatagatgatggggttgggggaatacttctccaagcttccaaaatgtctgaacaatcaaagctagttccagcctggccacgtttcaagtcatggcgaatgccagagggcaaagtgggtgggtcttacaacctggtagagtcaagaggcaaagttcagaggcagaacggatggcggttctctgatgtatggcagggcggtgggagagaagggaagagaaagccgtattataggaaaagaatttttaaattgggatgctaaataaccattgatcatagagagattcagcaggaggtgaaaggactgtggaggagaggggtacacacacatctttcccaggagctatcacagagcaatcccagctcagaatatctggggagtttccatagagtgtggggggcatgaaggggtttctcgggtctcctgactccttttattttctttctttctctgcttttttaggtggaagaaggctgctatgactctttggatgggagtctggcaagaggaaattggaagataaaataaataataagtgaaataatctggttaccatctactccttcatgagtctgttctaaagtcacaactaaagagagcgccaggatttagaggcagcaagcgtagattggaaggggaggtgggtgacaattgaattagagggcattatggactgaataaacctgcagtttggagaagactggagaagggcacccacagacaacaggtttattcacagtccatattggtaattctcttgttttattttattaagtatggtgttgaaacagtgtgcttggggaaacgaggttgaggttttagaatctttttttctttttataagaataagcacattgttaaaacataaggtaaaatatcaaaaactacttagaatagacttaaaatattcacacctacccacccctacccacacctctgtccaacaatgtgccttttgcagttggtaattatggcagggacaaactcacttaaatttttttttaattcgctatcctcgggaccctaattagaattgggctgcccccttgcggtctctccgacgtcctatcttcaaccagctcacagtccttgggccctgctctcctctccattgtactctcaaaatgcaaggcgcaacgacaatagtaacgtcccagttacttctgagactctctaaactctggacttgcctccctcccctccttcaaagtctttcgaatcttctccagcggacaaatgaagggactgaagctggacaaaaccataacctaggagatcagggacctaccccattctgttccccgtgcttggaatcagataatttaggacgccgggcccgagaagcctggataaaaaagtcaggaaaaactgagtttcgttttgacctctagcgtcgtggcgggctggcatctgagctggtaacgtgcgtggtaggttatgtaagaaaagggatggaggagccgccccagcgggagccagaaaggacgcggtgttctcggttgcaatccccaccctcctcacccagcagggcaggaggcacccaacttggaggagaaaggggtgggggaggtgaaacagagaccggagagtcacgagggctgggccgccgagagcaggagaatataccgtgtcacacacctccattctctcacacacgttgcagacacaaatcactgacggtttccacgtgctgcgctcgtgagcggaggtgttcaaagagggggcagatgagttacttcccgagacggaaccgggggtcccacgtccgccgccttcagtagcacaaccaatctctgaacactcaaaccgcgcatctctggcgcatcaccatcctatttaaggccacgggctccgcccttttcctcccctcccttcttttccactctttttccatcctcctccttttctcatcaccgggtcctctccagcagccgcatgtaggggaggagcacggaatgcttcccttacagccaatcatcacctggctgcctctctactggctgagcccctttgtactgtagcaaatgggctatggacttcagtaactagagtcacgtgttaccggcgacacaaccaatgagggcgcgagatctgtgtaagcagggggaggcacgtgccgggccgcacgtgtctgggagggggggaaggggcggggcccactgagagaggcggaggtgggtagatagacccggagagacggcgaaggagctggaaaccgagccagggctgagccggctgacaacaggtaaggagattcggaggacaaagcgagctgttagggagtatttgggagtggatttgggggctgaatgcagatcttggtattgggagggtttgcatcacgtggcaggtgcgagcccagagagaccggcgcagggatcctgatcttgaaagattgggagagggcaggaggccagtctctatgggggcggttcccgtaggatcaccaggtgggttcgcgtgcccagattgactgcttgtgggtggcatggcctcaggtggagaggcttgctgcggactcaggctggcgaatagccctggcgaacaacgggcggaggggaaggtgtctttcaagtcggtatttactctgaactgagggaagaaaagaacggaggccgcgtcagaccgagagctgctctgcggcggccagagagggaatcccaagctcttaatgggcgggggtgggggtagaaatgtctttttctattgtgtttgagaccggtaatattggggagggggagaacaagtattatcccacgcagtacaccccaatctcccagttcatttcctaatccttaaactctggtttcaaactccctcgctttgctcttcagttgcaggttccgatctttgggtactccaggagctgttctatagcccctgcttctggacctatggattctccatctagcgtttcttcctattcctcctactctctctcttcgtcttttcccacctccccagtgaacagtgactttggcttcccctctgatagtgagagggaggacaagggggcccatgggcccaggccagacactgttgggcagaggggaggttcacggcccagcccgggtcctatccgctgcaggcatcgatcgaaggtttccggtaaccagcatacaccatctcatccgaaacagcggggttcggcttctcctatggcaggatctggggcgaaaagatcaagagatggtgaactggagaccagt

SEQ ID NO: 4760 - DNA, 6000 bp, Homo sapiens
cgacttccctaaattgatagatttaactgtgtgtattttaaaacttctatatgagcaaaacacaccataaagtcaagaaacaaatggcaaacttggacaaaaacaaataagaggccgggtgcagtggctcatgcctgtaatcccagcattttggaaggcagaggggggcagatcacttgaggtcaggagttcaagaccagcctggccaacatggtgaaaccctgtctctactaaaaatacaaaaattacctgggcgtggtggcacgtacctgcaatccccgctacttgggaggctgaggcaggagtgagccgaaatcgtgccactgcactccagcctgggtgacagcaaggctcatctcaaaaaaataaataaataaataaataaataaaaataaaaaaaatttaaaaaagacataggatagataaaggattactaattctaatatttaaaaaaaaaagtaaaccacccaatagaaaaatagaaaaaagtaacaaataaaagggcaataaacatgtaaagatgttcaacctacctagaaattagaaggtaaattaattgaatatatcatttcacagcttcacactggcaaaaattaaaagctgattatcttctagtgctaatgaatgtgtgctggcagtgtagattactacatcttttgaaaaacaaaaaaatgttgaaaagtagatttttaaatctgttaaattataaaatatgtatattctttgtcccagcaatctcacatacagaattcatcctagcacaaaatgacatcaacatgagttaaacggacacataaggatgtttcctataattgtttataataccaagaaagaaaagaaacactcaaaaaaattatatatatatgtatatatacacacgcacacacacgacagatgggggacaaactgaatgtccgttactagaataatggcttaataatttatgatacatgcatactttggaatattatacagctattattaatagaatgagtaagtcacatctatatgtactgacctggaaagatgtgtataacattcaaggcaaaaaaagcaagccgcattgtaatatgtggactacaatgccatatttgttttttaaaaaataaaaataaaaagctgtattactgaatttttttttttaggaattcctaattagtgaatttcccaagtagtcaatgagtacacctcagttttgaatacatctattgctctattagaagtctcaccatcaaaatactgtactctcaaatcaaggtatattaaagccactatcagacaatactatcctttggaatcttctacaatgaaaatgataataactacttttaaggacaaaatgtttaataggttttttatgccaaaataaaaatgcttttttaacattgtgattttgcacgtatggaaaacagctagatttttctttcctatagtaaaaataagctatctaattcagttgtttcattgggtaacataattatgttcattacatgaatctaaacaaggggcagacgttacattaaaccaattcctttgtatcagaaattcaattttctctgaatgatattcattcttagcaataaatgcaattaaacactgatattacaattttaaaactctattcaaatacctaaatctcagcgtaatgtcaatataaagtcttaagcagccggacataattaaaggagcacttgatttggaatcatacatacctgggttgcaatcctggctctgccacttaaatgcgatgtggtcttgggcaagttatataacctctctaagcctgttcctgcatctgcaaaaatggctttctgttgttctttggtttttttttttttgagactgagtctcactctattgcccaggctggagtgcagtggtgtgatcttggcttactgcaatctctgcctcccaggttcaagcggttctcatgccttagcctcctgagtaggtgggattacaggcgcccgccaccccgcccgactaatttttgtatttttagtagagatagggtttcaccatgttggcgaggctggtctcgaactcctgacctcaaatgatccgccggcctcggcctcccaaagtgctgggattacaggcgtgagccaccgtgtctggtcaaaaatggctttaaatggtgttcttactttaaacacgagtatctacgatgaaaagtgcctagtacagaatatggttgtcaaaatatggtttcctctgctaggcatggtaacacccacctgtactcccaggtatacccatctgtagtcccaggaggattttgatgcatatttactactttttatgaaattttctttcttgtatcacaagaaagcactttatattttaactgtggcattatacatcttcagataactttcttttaaaaatcattcagattgtgtctatggaagcaattttcaagtatatggggaaagaaatgttaggaaaggaggaaaatcaaaaatttaagtcattctaacccactgtaacgtgtctaagaaatcaactccagacaattccaaatagtaacaaaacaaaaaataagtacaaattttaattttaatataactttccacttcaagaggagtctttttttctgtagagctggatcattaataacgccagaatatgaccctgaatgtcgctaaatggatccaaaagaaaagaaaaaccagactggataaccttcaatatttaaagtggacatttttttccaccacacaagatacatattaataaaggaattcgtaaataaactgagtatctcttcaaattttactctagaattgagggctggaagtaactctagttttcctccaactttagttgcacttcactcagatttacttgatggtttttctttcaaggctctttaaaatgtcaaggcttttgcaaagccttgtaccaaaatagctactatacataatattacaattattttctggtacatttttcctaaaaattaatcatccactcacagtaacatctatttcttagtctaaattacactgctgagggttttttgtttttgtttttgctggcttctcaaaaggtatttaaaatgattttgaggtgagagtatgcaaaaaacacttcacattacttttccatattcaaattacatcctcttgagctgatttttaagtgccatgtacatttttaaatcaaaatttatcactgtcattcttttaactctcgctctccatgctgagctcttccaaatgccaaagtgccctattaatccgaaagtacctattatctgtgcttttttctggcctgtctttcacaacttcacaccaactttttgtactttagaccccctcatccattaaagcacctgttaaccctttaaggtatttaaccatatggttagctttccgcataatcctacttttcctttaacaaacacaaacttcactacataattccccttcagcgttccctcctcttcgaaattcacatcaacactgccgtgaagcaacatacataggcatccctattctcaagccccaattcatcagtttagcgccactaaagaagaatttaaatctccggaccctcatttccgtactccgatgaagctttgcactcgcgttcccgcactacccggccagcctccctcagctggcaattacaaggtcctttgctgcccggagcacaagagtgcaactcgctacagtgttcacatgttgctctccgtcatcccagcatctcctcccatttctgcgcacctatcccttcatgagcccccaaaagaattcgtatccagatgcccatagctcaaattagaatacccctcatctgacattgccagggcttcctgtacgacttccaagagaacacgcgatgctaagcgcttctgtctccggagaccagcaacacacgctccccactgagttcggtcttctctctcgctctctctccgcggaatgcctacttcggggctaccctttggctagggaagcccaaccttgcaacctctgccccgtgacctcgcgagcccagcacgccgctcaagcttaattcaacccattcttggagctcgtgctctcgctgccccttgttcccggttctctttgaaaccgctttcagcccccgagccagaccccaggttagatgaacgcccacttgctccggcggcagcgcctcctcggccccttccacagcactcagcccggggcagttcagttcctcacctagcttcgagcgggactcctccagtttctggatctggttttccaagaagagcatcgccaccgcgaaggccaccaccgccagcagctgcaacttgggcggcatcataatcctgaggagccccatgaaacccgctgctcgggatcaagacataccgcggggggcggggagcgggaccccggaggcgagagagacgccgggaggagcccgccgagccgggagcgaggcaaagagagagcgacagcgagagaaccaccgcagcgaccccccttctcgcctctccagtccccctcccccaggcgctatcaccaacgccgctggtgtccgcttctcctcagccgactaaacggccgccccctccaaaagcccgcgcagcaaacagcgcgaagcggctgccgggctctcgcctccctctactgcctcagtccccgacccccgcgcccgcctgcttgcccgcctccctctcttccttccttccctccctcctttgctcgcggccgcgcgcccctccaccggcgctgcggctgcgccgccctcatccccgcccccgcccatccccctccgccaccacgcgcacgcatccgcgtacgctgctcggcaaccagaagccccgcccctccccccgttcgggtccgcttattggacggaagagcccctgcgcttcgctcttggttcggtttacggttggtttcctctgccacagagctcaatcaagacgacattcaattgggtaaacttggagaagaaggcggggctaaaactggcgaaggcgtggcttcttggctgcttgacgaagtgtcgtgaataaaagaaaggagaccgcagaagtaaagaagtggggagtttaggcaagtgcctgatttgggtaatcgaaagcacccagtgattgtatttgatgacttttaagctttcatatgccgttatttaatacctgtcacttccaaatgagagatgtaagggcaacggccgttagcgttctgttttggatcaggctctggagtggacgcccctagcttaggggtccttctaggcagccagaaacctgcggaaaatggtagcgatggcggctgggccgagtgggtgtctggtgccggcgtttgggctacggttgttgttggcgactgtgcttcaagcggtgagtgtagatcaccttcgcagctgccacagggagagtaggagtgattgcagctgagaaagacgcaacattcggtcctggttgaaaagggtggggaggactgcgcttccttaatgactgctgcggccagaatgcaacgtggcttaatttctcggttgatccttctccttccccgccttgggtttctagcagcagttttctcttgatttcagattgtcttgggtacgtagcttctcttatacggctcttgctaaaaacaatctgtaaaccacaccaggtgggaggggggaataataaagcttggcaagaagtggaggttgtttttaaatggacagaaatgcaagagactcatgacgagacttccaactcttagaggcaagtcttcaagtcgttggtccaggcgaacagtttgtgtttacctctctcgcgcgcgtgctctctcattttcactacttctgttagtctcttaacttccgttctcctctgctattcatatacggctggctgcgcttgagtgcgatttgtgcttttaaacaatgttgttggagtaaaaggagttatctataccaaagtataattcatttttgaagttagttttttaaatgatgttcgttgtcttctttaaggcagcgttttttatttcatttttctctattggcagaatagatggg

SEQ ID NO: 4761 - DNA, 6000 bp, Homo sapiens
aggatggtcttgaactcctggctttaagcgatcctcctgccttggcctcccaaagtgctgagcatataggcgtgagccactgtgccacgcttcttttttttttaaataaattagttgagtttggccctttgtaaatatgtaccaatggaatatatgagctattattaaaaccagatactgttacttctcctttgctatgactaactttttatttctgcagtatatgttgctctttggtttaggggactaacaactttttaaaaaaataaaatgttatctgtgtcttgcagggctgttacagggggttacgagcaaaatggcacctggccgggagggaggtgggggctgaaccagccccaattcaaccaggaaggggcatcttagtgttcacaccaaaaccaccttcaactggttgtgagctaggggtgctgctatggccagtgggggaggcctttaattctaagtcttacgttctgagtgtgcctctttctaattcaaaggtacaatataaatagactgtgtgacctgcatgaaaacattcctgtttgcaatggcacatctcacagaaagttaccatttttcaaaccacctataatgagaatggatgtcaaaatgggattctaacattttgtaagaccctaaatttatcaaataaagagtcaaatatgtgcaatgaactcttcctgagacaggaagaaggggcactttttagaaagatattcaacagaagggttttctagttgactgactatcaaggtagagaaaaccctataactccattcattaaaatatgactattaataccttactaaatatccttctacatccttacccacgtttttatacacatgcttttaacacgtgttttaaataacaaaaatgagattccactaaatcaactattttaacctgtcccactcactcccctctttattatactttttgtgtcaagttgatttatttattgaataaataaaatccagacttttctgtttaagtgcctgaatttgttcttacacaaagcaagtgctctcaagaagctcattcttgaagatggttgagaaatatcaatgaccaatatcaaaagaacattaacccatgaaatgtacatgaatatggccacgcgtggtggctcacgcttgtaatcccagtactttgggaggctgaggtgggtggatcacctgaggtcaggagttcaagaccagcctgaccaacatggtgaaaccccatctctactaaaaatacaaaacttagccaggcatggtggtgtatgcatgtagtcccagctacttgggaggctgaggtaggagaacagcttgaactcagaggcgggggtggaggtcgcagtgatccaagaccgtaccactgcattccagcctgggcgacagagtgagactctgtctcaaacaatgacaagaacaacaaaaatttacatgaatatgcatatcagctgaaggcaagcacattacaaatgtaagtacaatttagtagaaggggtgagggagcctgggtgtcaatggggaagccttggtgagctcctagaagtaggatgaaggctgtgagacagtctcagtcctggtgatacagtcaggatgatgtaacagggttcagtgagggagtgcaaggtgacagaacaatatggagtatcttatactaattcctgcaaacttctcaactatgtacaagaaaacaaatacttacgaaacagaagaaaatggccaggtatagtggctcatacctgtaatcccagcactctgggagaccgaagcagtatcacctgaggtcaggagttcgagaccagcctggccaacatggtgaaaccctatctctactaaaaatacaaaaattagccgggcatggtggtgggcgcctgtaatcccatctactcgggaggctggggcagaagaaccgcttgaacctagggtggggtggaggttgcagtgagctgagatcgagccattgcactccaacctgggcactaagagtgagactccatctcaaatttaaaaaaaagaaaaaaaaagaaatagaacaaaacacagcagtggatacagtgctttttggttcattcaaagcagtcccatcagagtagcatattaaactatacaaacggctccaaatggcaaaatctagacagtagaaaatcccaggtcctaattatgttgtcaaataacttacaaaaaaaaaaaaaagatgaaggaagaagctacagattaaaagagatttaacagatttatcaaacaaataaaaaaggacttttggaacctaattcaaataaagttaaaatacatatgacatttacaagaaaactggaaaatctggacagtagatatttgatatcaagaaattcctaattttttagatgtggtaatagtattgggttatgctttttaaaagtccttatccattagagatgcatatagaattatgggtgaaataatatgatgtacagaatttctttcaaaataacatgggaagggcggccaggtatggtagatcatgactgtaatcccagaactttgggaggctgacatgggaggatcgctggtgtcaaggagttcgagaacagcctgggcaacatagggagactgtctttactttaaaacacacacacacacacacacacacacacacacacacacacacaaacacacacacacatacaataaaaaataataatatgagaaaggagaagtggataacgaaagcacagacaaaagaagactgggcttgagctaaatcactgtggaagctgtgtgatgaggacaaggggtttcaacagattattctgtttttgcatatagttgaaatccttcataataaaagttaaacaaaaaagtgctacaaatcctaacgctgacactaaattctacagcatgaagaatttatggaagagtgagactctgtcaaaaaaaagaaaaggttgtggaaaattacctaatgatacaaaaagtataataaagggggtgagtgggacaggttaaaatagatgatttagtggaatctcatttttgttacttaaaaaaagcatgtatcatgtatataaaagcatgggtaaggatgtagaaagatacttagtaaggtgttaacagtcatcttttaatgaatggagttataggcttttctctaccttctttattacgtttaagaatttaatgataaaaagtcacgcatgttgtttcaccccagcagtgttggctttactaaaaacacatactctaagaatcccatacatgaaaggtggaacttaatcaagaacatgtcagagagaagctgcttgagcaagaaaatatctgaaaagcaagctctcctagaagagaagcaaggcctccttaacagtttataagcacacacctgttaggggcacatactgcctgccagtgcctttcactctaagtctctctgtaagctgtaaaagcaaacagtttaatggcaaatacatactctatccaggttaaggtgccacagatttataaacgtgtaaaaacaccagaccttgttttggggttaaggtgagaaaagggcttgctaaacagtctctttcctagaaggaagttctcttacccactcactccctgggacagaaggtcaaagagcatctctggttggaatcataatgcttcggcctgaagtgaccaggccactcactactttagttgcccaagcagtatcaaaggagctcacctcatagtctttccttggaagaatctcatcctcctcctcctgtgtttctccaaggatggtctagaaaaacagatccgcagagggagccttttttagtggttaggagtggaaggaggcagaagtatttactgaaatcagtggctagcttctaaatcatctggagccattatcaaataggaaccagccctcaaaaaaaacctttcaggggtgagggaccatgtgggtgaggatctacagccatcagctgagctcttcatttccactgatagtctccaaataaccaccctcctcttcaggacacctcaaagatgtccaacgccagctgaaaaggggggtaaaaatgcaggttccatttgacagtgtgacgtatctgaaatcagaaaggacttgtcaactctgggaacacaactcaagttttcccaggatgctttgcagggggaagctggactgtcagtgacccagaaagggtgagggatagagtgagaaaggactggagaagctaaaacagcagcatgataagcacaaagtcctgtgaggaagctcattctgaaaacgcttgtttcattccaaactcttttcagatggaaataaaaggaaacatgggtgggatttactggagctggcctggattctccctcagattccaggaggggttatgagaaaagaccccagacttaggcacgtgaagcagggtagacgcttcgagagccctggctgcggtccccaggccccacccgctgccacctgcgggcccagattggcccggccccacccccggcaacgcctctctcagtcccttagcaaccgccccctccccaggccgactccgccggcttcttaccagctcctcgggggtgcgggtctcacgctcaccgcagcagcagcaccacctgcagcagcagcacagagaccccctgcaccccgccatcttcctcctttactgccactctggacccctctaccaaccccctcccagccaggatctgcgcctcacgtgactggccccgggacggtcacgtggccctctcgagctctgggactgagaccaggagtggctgcagacgggtggggcgaggactcgcgtcacatgacgataaaggcacggcctccaacgagacctgtgggcacggccatgttgggggcggggcttccggtcacccgcgccggtggtttccgccctgtaggcccgcctctccagcaacctgacacctgcgccgcgccccttcactgcgttccccgcccctgcagcggccacagtggtgcggccggcggccgagcgttctgagtcacccgggactggagggtgagtgacggcgaggccggggtcgccgggagggagatcctggagccggcaaacaacctcccgggggcaaggacgtgcttgtgggcggggagcgctggaggccggcctgcctctcttcttggggggggctgccgcctcccttgcgcacccttcgcgggattagtgtaactcccaatggctaccacttccagcgaccgccaaccctcaagcgaagactgactttggctccctgcctggacggaggggcccctgagccaggggtgacgatcccgcccctctgaccggcccaggcccgtgtcctcgcccccatcggtgactcagtgacctggtgactggattctcggccacctgggcgccgagacggcttccggctcctgccttttaaacctgcctccccggcgatcacctggagaagagcgctgggcccggggcactgcggtccctggcgcccactgcgtcccgctgcgcacgggggtccgccgggacctttctgggagtcgtaggcttagtatcccagtgcttggcgcagactagttgttcagtaagtggcagaggcttattttgagagagtggcagcacctggccctttggcgctcagtgaatgttggctatcaccgtgtgccaaactctggggataccccaggcaggacaccggtcctgtctcagggaactggggaaagagaaaggagacaggccttttcacccacagttacaacccagggtgctatgggagtccagctgataacggataaatcgtgggagttggcttacaaatatggcacatgcgtggcatatactaggaatgcaataagtctttgaaaatcagagggtttacaggtggttcagcttcctcctactctaggttctgttccagcaagcaattaacgaggtgcgcccttaaacgctggaggaaagccaactggctgctcttgctgttactcctcccccccgcccccgttcctcactccccacagccatccccactgagaatctggagtttgaggtcagaatga

SEQ ID NO: 4762 - DNA, 6000 bp, Homo sapiens
tatattctcccaaaaactcacccagatagttttacatgtttggtaaacgtctggttcactcattcaatagatactttttagtgcctattatgcccttaaaaaagtattgttgttctaggctcagggtttattttctagctaacattttttgagtgcttatttggtgctagataccattccttttacatgtattagcatatttattcttcacaataatatatagtggggagcaggtgattactgttaaagtatagaaactggtacagagaggctcaataccttgtggccaaaacgatcttttaaaaaacacagatcgagttaacctgcttataactattcagtggcgtattactggtctctgcaaaagacccatatccttaacaaggacctaaaagcccacaatgatttggttgctgttgctactgacttctctaaagtagacttgtaccacttttctctctctgtatcctatctttcaggacctcaaaggtatctttctctcttcttccttagtatcttggcacgttgttgttcttttttacccattgtctcgtaccactcattccattatgcctagtgaaagtctgataattctgtagatcttaactctacttctggatgtctttcaatttccagataaaatgaagtcctcctactgagcccactcatagtcttatgaacttaccttcattacccctagtaaatattttgacatgtatttgtgtaataatttgattaattaatacttgattgtatgagggcacagactatacacacacacacacacacaaacatatatatatatatttttttgaggcagggtctcgctcttgtcaccgaggctggagtacagtggtgtgatcacagctcaccatagcctcaacctcctgggctcaagtgatcctcccacctcagcctcccaagtagctggaaccacaagtgtgtgctaccatgcctggctaactttatttttggtagagatggggtcttgctatgttgtccaggctggtgtgaaacgcctgtgcttgagtgatcctcccaccttggcctcccaaactgttgggattacaggtgtgagccactgcacctagctgatattttcactcaccattgtatccctagcaacttggatagtgctgacacatatcaagcacgcaagaatgacttaaatttctaaatggattatctattttagtcataagatacatgaattggcattaaagttttcaagaacctctatcaatataatgtgaggctagtcaattatccaaaaagtattctcctaaaacctaaaaagtaagaaattagtaaaattttcaataagtaaccaaggacaaaactagattgttctataaaattttaaaaactaactttaagacaaaaattagtaggatgtagttactgggaaattaaacaagttgggaaatacaaacagggtggaagatgatagttaccctacacatctcaccaacactgtctaggattacagacaaatgattttacctctttccttaatcaaaacaaattgtttagggagaatgttttaaaggaatagtcccagccgggcgcggtggctcacacctataatcccagcactttggaggctgaggctggcagatcacttgagatcaggagtttgggaccagtctggccaacatagtgaaaccccgtctctactaaaaatacaaaaattagctgggtgtggtggcacatgcctgtaatccagctactcgggaagctgaggcgggagaatcacttgaactcgggagatgaaggttgctgtgggccaaggtcgcgccactgcactccagcctgggtaacagagtgacagagggagactctgtctcaaaaaaaaaaaaaaaaaaaaaaaaaaaggaacagtccctttaagagtgactaaagatgtaaagaataaagctaaaccaagccagctacataactatagaggtataaatgtaaaattaacattcattgattatttactatgtgtcagggatgatctatgagcattttttaatagactactttacactgaatatgagcatttattaactcatgctttttcaaatcaactctatgatgtagttacaattattatctctattttacaagtgagaagatcacataagttttaagtaggcagagtcaagatttgaacccaggctaaggttaagagctggtgctcttaactataagaggacagtagttaaaatagatatcttccctaatatgtgtgtaaatactgaagatttttttattaatacaaattgttttcttatctagactatttcactagccctctagttagtttccttgactctaattttgctctccttaaatccattttccacactgcatccagtgatctgcttaaatcttaaatggacttgtacaaaattaaggaaaacctactcagcacggcaaacaaggctatgattcatgcttaatgaccccagccttctggcctctccgatgtccttttctgctactcccaccctagactttatatgtcttaaagtctaatacaaactcagtacttgtagtgtccactacacactaaccatccccacttacactatgtattttaagaactatggatctttttgttcgcttttctgaaatgccccttgttcctggcattttcgtctcaattaagcatctttctggattaaattttattttctccaggaatcctcttctgaaacccttagaagtgaccctcctctactggtacttagccatcctttattgaaattacctgtttatgagccagtaacctttattaagctctttgagaagagggattctttctttctcttttacctacatcccgcacaacccagctccccctccgtctcccccacctccatgcacaattcctggcacgtgttaactgttcagtaaatgttgaacttttgaactttactggaaatcaagaaacactgagttttagcctcagttttgctcactatgtgattttagatattttattctctgtgcttatcgtgtgtatctatatacaacttaatcctaaagttccatcgtataaaaaattctacaactttttattttgctctgtatgtgacagtacctggtatttaaaaacaattctctacatcaacttaaaaaattaacatttgatgattataattaacttctaaaaaactgaaagatgaaacacatcaatgccttttctttcccccctgtactgctacctgaaaacatcggaatttgctgtggaacgaacaagatttcttctaagaaattaccccctaccaccatgactacataaaataaggtaattcccagcaagaatattatgcagatactaaaaagaaaacatgctaggcatggtggctcacgcctgtaatcccagcactttgggaggccgaggcgggtggatcgcctgaggtcgggagttcgagaccagcctggccaacatggtgaaaccccgtctctactaaaaatacaaaaattagctgggcatggtggcgcacgtctgtaatctcagctactcggaaggctgaggcaggagaatcgcttgaacccgggaggcggaggttgcaatgagccgagatagcgccactgcactccaactctagcttgagcaacaaagcgagactccgtctcaaaaaaaaaaaaaaaaaacaatgacacgagggaaatgcttacaatgctcaatgaaaaaatgaaaagaaaggttataaagttttaatatacgatttgatcttttgaaaataatggatatataacttaaacggaaatgtatcattaaatatagcaacagcgtcttccaaaaaatttcaaaatcgggcttaatgccaattacacgatcataatccaaaaacccttaactgaagcaaagacagtgatttgtaacatctgaactgtgtgaaaggggtgggggtgattcaaacaagtgtcatcaccttgtccaatgatgaaggagaacgtgtatcagttctgcattgtgaaattctcagtatgagagcgtgtagtggctaagaaaagcagtgggcgaattaggaaacaaagagaaaagccagcgacatcaccagttctggcctccttcccaccggaggaaaggggagaaggcgggtagtcatcaattccaggtccagcctaagttctgggtccccggccccagcgagagcctcgcctcgcctcgcgcgcctgcgcggagcgggctggcttcctgaacggccctcgcctcttcaccaccagggccgtccaccagaagtttctaaacgggtgagaggcgacaacgcagtgcagctgggttaaaggaaggaggctggtttatcctccgcacttacttggtactcgatctccagcgaggccttcaggggcatgggctggtagaagcactccttctggccggcgggaagggtaaaggtgaagtcgctatcgagggaaggtgtgaagccggccgccccaggcagcagcaccggaggcagagcggccagaaggagcacggggaagggcagccagatcttgtcgcccatccctgctggggcgatcccgggctgaaagaggcgtcaggtactgttgtctccgctccgcgtttcctctctggactcctcgtggttgacagggaaatctggagtctgaagaaactccaggtggcggccgcggcggcggcgaacactccctccgaaagagaagcgcagttctccaaagggtagggactctgggcggggctagcagtcctattccgcaaccgcctcagtctcggccccctcaggccaggcgtgagcgccgcccgcctctccccctgacggcctccggttcccatggcttcccccaccaatgggcatcatggcggtaattgtgggaaatgtagtcccgggcgggctccgctagtgggctcgggcgcgctcgccgaccacgatccccggcaagccccgcgccttcggcggcgcctcacgcagtctgcgccggggcggggcagtgaccgggtaggcgcgtcccaacggctcccgcggcggttcgaattctgtgctgccggggttcgctggttctccgagttgtgtccgaggcttccacgcgcaggggcccgggaaagggtcagaggcttcctaacgcagactcgagtgcgaagcgcgcagtcgccgggtgggtctctccccagcgacgatttgggtggtgagcgactgcgccttggcgtggggaaaccggcttacctgggggagttctgttcctttccctcccggcaccttggatgcgctgggactggtcctcgtggttgctgagcatgctgctctgaacggttgtattttatttgatgaaaaataggaggccgggcgcagtggcttacgcctgttacctcagcactttgggatgtcgaggcggaaggattgcttgagcccaggagttcgaggccagccttggcaatatggcgagccactgtctctataaaattaaaaaaaaaaaaaaaaagaggaaactgtcacttccgtcccccacccccgcccccgcttctttcagacggatgtaagattagctgtgtcaagcgatcttgagacaggagactactacataaagttatgacttctttccaaaatgaggaatctttttcgactacagcccattgtatcacatacatagggtataaaagaacacttgtccttcgtttgatgggtgtgcgtgtgcaaacctacaaacacattgttaattagggccgaaagatgatgttgttaaggtcggtgagtaggatgatgtgcttttctaggtatgcatagtcagtgaagatagccttttttgggtaactactgtaaattgaagttaaggacattcatttgacagtaaatgtcccactaggaaaatgaaaacattttagtatcaaatatattcattgctactgcagaagagttagggagttctttcttttttttttgagaccgagtctcactctgtcgcccaggctggagtgcagtggcgcgatctcggctcactgcaacctccgcctcccaggttcaagcaattctctgcctcagcctc

SEQ ID NO: 4763 - DNA, 6000 bp, Homo sapiens
ctgtggcaaagcagtcgtcctgtctttgcgcttaaatccacctggtgtgccgcccctacccttgcttacaggactgtactgaatgcccatggcatgaatggaatgtttgcagaaggggaaaataagcaagcgctggagagacatgcatagaacagcaggtaaaactgccagatgactatgcccttcacccactcatggaaggccaatatgaagccgtgttcagagtcgtctgcccagagctacagaggaatacagctgagtggcagggctgagtaagaaagtgactacagagtcacagctcagaaacaatcctaaccaaaaaaccatcttacacctctgcatttagctgcctcaaatcctttctaaatgaagagggatttaaattttattttaaaatatttcaacatagtacttttccaaatatttgttatattcgttatctcatgacccacacattaactctagcaagcaggtatgccaatgtcattatccccacttaaacatgacatgcctgaggggctgcgaaagttaaatgacttgcctagagtcaatcagctgaccaactgttctggcccaagaactgtgctctcctgaattctcccaatcccacccaggcccaacaagtccagctggacaattttagtgttccaaagaaaagctaggaatgaagctggagatataaatataaaaatattccttcccaaagacacctgagatctgaaaacacctcttcctaacaaaaatttaacaaattaaatatcaatgttgctaagtgccaagttgatataccacacttatatctggacagaacaactacagtctctactagttacaaagacttgtgagaaatgttggttttatgttttattataaacatttatactatctcagctttttaaaatatggtagagtttaatttttacagttaagatattgtcttggggtcaggagtggtagctcacacctgtaatcctaacactttgggaggccaagacgggaggattgctcgagctcaagagtttgagaccagcctgggcaacataatgagactgtgtctgtatttaaaaaaaaaaaaaaggccagcatggtggctcacacctgtaatcccagcattttgggaggctgaggtgggcagatcacgaggtcaggagatcgagaccatcttggctaacacggtgaaaccccgtctctactaaaaataataataataatacaaaaaattagccgggtgtggtggtggttgcctgtagtcccagctactcgggaggctgaagcaggagaatggcgtgaacccaggaggcggagcttgcagtgagccaagatcgcgccactgcactccagcctgggcgacagagcgaaactctgtctccaaaaaaaaaaaaaatagttgccgtgggcagtactagtgatttgttaattatatatccaacacctatttcttgagttgccttctagtctagtctggactggcttataggaacgtttttcaaacttttttgacaatggcctacagaagaaatatattttactttgtaaagcatagacatgtgtctgtcattgaaacaaaaatttcacaaaataataatcacccctcttttgagtgattcacttggatatcttctatgcttttatactttgccaccttatttttaaaaatacaaattatggcccactaaatggattccatgacttacaaatgggtcacaacccaaaagctgaaaaatactggcttatatgaacaatacacagatcgtgccctcaaggaatttatacattagttgggagtctcatacagttcacagacctcttacagttggaaaggcctggaggtcaattagttccactacctactcgatatttgattctacagcatccctgaaaaaaggtgagaaatgtgaaaaaggcttgtttgctatttcaaggacaagaagttacctcttatttggaacctaacacaagatgggtcaaatagagacccgtttttaacaggtctctatttaaaacagtacagaagcaaatacaaatgaatcaagtatcaaaatacacacttgatttcttttttctaaaagataacttggacctttgttcctaaacccatcttagtcctttttaggaggagggtgaaaaggggaaggtaaatcagggggacagaggtctagaaagccttctctctgatgacctgaagaaggggtcttagcaagttacatcacaagcagccttcgtgattgaggagcctaataaatgacacccacaatgacggctaggagagtggaagtcaggaaaggctcccctgaggaggtttgaaatgagctgagtcttgaaagactgactggcatcagacaggtgaagaaaagacgggagagtgtagtcaaagactctcaaggagaaatgagccagtacatttggcggacagtagacaggtccctgaagaggagcaataagagatgaagccaaaaagaaagactgaaagcaacctgtggtgagcaagacagaatttggattttattctgtaggtaatgtggtgttactgaaggttcctcagtgtgtagagtggtatttcagaattgttcatctgcacatagacctgaaacttggctttagaaagacctaaagacccagagttcagataacagattctcaagctgtgttttagtacagagaaaaatgttctgtaagggactttataaattcagaattctaacacgagcagtgttggttacctaaaaattagaaaaactggaatatagagtttagatagcaatggaatccaatttatttttcatcattttacttttgttaatgaagtgtgagctttgtctgtagctgccatgaagtgactgatttcctttataaaacctacagtctttattcagaagcaagtcttcaatgttgctatgggcctaataaattattataaaccattttgcaaaaattaaattttgcctaaacaacacttttaataataaggttgtctaaagttaatatacaaacagggctctctgagggtgttaactatctagtaattcaggctctgctggatacagtgacagagctctatgaacctcaactagaactcaggtcggcctcaggtgaatataaacactgtatgtgagtcaccttgcaattacagctgccacctggaagcaaatttaagcagtaagaactacaaaaccaaatccctgtaagatcctgcattgaccttcctcttacttcttcctgtctgaggatccataaacctcaggattctttactaatttctcatcagcatcattttttattgtatttccaaatttaaaaacaactgtctccaaaggcctcaaaattactttcagttattactataataaatatcagcgatgtatgatgtattaattagaaactaaggtgttttttttcccctccccacaggaaaactacttcagagaaagactttaaatttctgagaaaatctttatacatattgagtatagatgctatcaaccacatacatgaaaataattgtttggggataatgcacaccatttgccaatgattaagattcagcccagtctttgttgctgcatttctacattcacataaattggtaagtcatgatgacacagaaggctcacatgccacgtaaaaatttcaagcctggatctgaatgggtgcctgaatccttctcagaatgcatattttggaggcaactgtttggtttatgttactgctccctaaactgggcagtgactcaagaggcagctggaagagagaaggaggtgctgggcaagtgctaaaaaagagtgaagcctcaacagcagagtccctccccttctctacacaccacacagcctttttgtgacttcttgtccccataagatatgctcctctagactaactccccttcccagggtggagcagagtctcaccggctcattatctcacagctcccgggatggccccgggtacagcaactgtgtggcacttggctgtggaaattcaagtttttccaccctaaaacaagtaggttgtgaaacccgatttcggtcctggttaccattgagaggggcctaccacagccctgtgcctggaagttcctgcctgtcgaagctcctagccccctgccccatcctcaccttctgcacctgatggagaaggtgcagtccctccgcgcaccttacatgcccatgccacactggtggactcacgcacgcacgccaactctgccatcccatgcacgcccggcttcggagggcggctacgaacttactgctcgtcgagccagccgagccagggcgcaaggggaaaggcccgagcggggccggggataggatcggataggagtcggggtcgtggatggggtcggggcggaccccgccggcccgctggcctccctcccctgacccccgggacagcccccgatgcacgtgctgggtgacaggccccctataggttccatacctgccaccggaagtgagtgaggagggcagtataggcatttcctgtgacgcgagcgcctggactccattaggcagcagctgggggaagaatcaacacaccagggagcagagcggagcggatccgaggacagaggcggcagctgcctccgctgccgcccgccgccgccgccgccgcagccactgccggggctcagcccagcggcgggccccgcgcccccgcagccgccccgcggcgccccccggcgcgacccccgggccgcgcaccccgagctgcctccgggaggggggggggaaagggcccggatcctccttctccccctcctcctcctccccctcctctcaccctcaccctcaccctcctaccctgaccccctccccgcctccccggcccccctcaccccgaccctctccccggcccccgcctcccctcccccgcctcgccccaccggcttcccaccacggcctctctcggcgaggaaactctggcctccgcttcctcctcctccgactcggacaccggcggagcctccccgcccccgcggaagaaaccccgagcctcggcggcggagggagtaggagagcccggggcttcggcaggcagagcaggcctctcccctccgtcctcgtcgtcctcgtcctcctcctcctcctcctcctccgtggtggtagtggtgggacttcccccggctgctgcccctcccgccgccgctgctgtcccccaccgaagtagcggccacagcctggtcagcggcagcatcatgcaggccaatggggcaggaggaggaggaggaggtggcggcggcggcggtggaggaggagggggcggcgggggccagggacagaccccggaactcgcctgcttgtcggcccagaacggggagtcgtccccctcgtcgtcgtcgtccgcgggggacctggcccacgccaatgggctcctgccttccgccccctccgccgccagcaacaatagcaacagcctgaatgtcaataacggggttcccggcggggcggccgccgcatcctcagccaccgtcgcagctgcctccgccaccaccgccgcctcctcttccttggccaccccagaactgggcagcagcctcaagaagaagaagcggctctcccagtcagatgaggatgtcattaggctaataggacagcacttgaatggcttagggctcaagtaagtatcccttaccgccagctggtgatggacagaccgagggacggaggctccaggggggtaggggaaggggcggaggggggaggggggcttgaaagagctcggtcaaagagaatgagtgctgggcacgcaggacccagtacacaggaggacgcggctcagggcgaccggggaggaggagcggacctgaaaggaaataggggaaaatcaatcagtctgacaaattgtgagacgagacaggcgttgaggggttaggaagggttaggagaaacccaaagaatgacttctccccacgcaccttcagagcttaattgtctgtcaataaagacagatgcgggagtgtgtttctgtatgtgttgggggaggggtggattagagctggtg

SEQ ID NO: 4764 - DNA, 6000 bp, Homo sapiens; identical to SEQ ID NO: 1550

SEQ ID NO: 4765 - DNA, 6000 bp, Homo sapiens
caatctattttcatataatagctagcataaacataaatcacatcattacttcccttcttaaaactctccatggttggccaggcgtggtggctcacgcctataatcccagcacttcgggaggtggaggcaagtggatcatgaggtcaggagttggagactagcctgaccaacgtggtgaaaccctgtctctactaaaaatacaaaaattagctgggtgtggtggcgcgtgcctgtaatcccagctactcaggaggctgaggcagcagaatcacttgaacccaagagatggacgttgcagtgagctgagattgcaccattgcgctccagcctgggcgacagagcaagactccatctcaaaaaaaaaaaaaaccaaaaacaaataaacaaaccacagctctccatggttttcttcctgtcacattcataataaaatataaataccttagagaggcttacagactcaacatctggtccctacccctctaactttaccttgtatcattctttcctgcaatcattatgctccaaccatgttggtttccttctacattttaatcccatcaagcttgttcttgccttaggacctttgcactacctattccctctacctggaatattctccctccacctggaatattctccctccaaaaccctcacatagctagctctttcttgctcttcaggtatgagcttaagtatcacctcttcggagacgccttcccttatccctaaatctaaagcactgagtcagttactctctactccataacactgttttaatttcctgcataacatttaccagtatctgatattttaatttattgtttatttatgtttatctcatcccattacaaggtaagttccagaggagcagaggccttgtttgtcttttctttttttttgagacggtatttcactgttgttgcccaggctagagtacaatggcacgatctcggctcaccacaaactctgcctcccgggttcaagcgattctcctgcctcaacctcccgagtagctgggattacaggcatgcgccaccacacccggctaattttgtatttttagtagagacggggtttctccatgccggtcaggctggtctcaaaactcctgacctcaggtgatccgcccgccttggcctcccaaagtgctgggattacaggcatgagccaccgcacctggccggccttgtttatctttaaccactgtatccctgtatgtacactggtgcctaccatatagtaagagctcagtaagtatctgttggatgaaatgaataaatataacatatagactcctttagggagttgcttttccatactgctccagccatgcctctgctcccacccctcatacatcataagccatgttaaagttgtaaatcactgagaaagatgaagggaaaagcaaggttaatataatgaaaaagtacaatcataggaaaacgaaaaacaatacagataatatgttagagaattttactcccacatcatatttctctctacctttattgtcagctacctcctttgtccaagccaacgtcatctcttgctcgtattagggcatctcctcctctcttgacccactgcaatccattttcttttcttttcttttcttttttttttttttttgagatggagtcttgctcttgtcacctaggctggagtgcaatagcacgatctcggctcactgcaacctttgcctcccgggttcaagcgagtctcctgcctcagcctcccgagtagctgggattacaggtgcccgccaccacacctggctaatttttgtaattttagtagagacggggttttgccacgttggccaggctggtcttgaagtcctgacctcgtgatccccccaacctcggcctcccaaagtgctgggattacaggcgtgagccactgcgcccggcctgcaatccattttcaacatctcaaaaagagatgtcctttaaacacaatttgaatcatgtcatttccctgctcagaatccttcaataatgtcccattgtaggataaaataaaacaaacattaacattgcctaaaaggccctgtatgaaagatctggtgcctgtctatctctcaaatttgaactgatggactcaatactgtcaatcacactggctttctttctatttctctaattcccttaagtctttcttagttcaaagccttacttagaatgtgcaattttctctgtttggaaatgtcttttctgctactgttggctttgtctaactcctcctactcagacatcaggtctgagctaaaatattactttctcaaagagttttttcctgattttccaatctaaattagctccccttgtgatattctttcataataccgcatacttttccacaaatatatatgagaagttattcattgtagtatctaactccctcactaaactagaagcttcatgggagcaggcacattatctgtttagctctttgctttatcccctgcgccacagtaagcatctaataaatatctttggaatgaatgagtaagcaggtagtgagggggaataacctgtggtatagaagcacaattaaagtgatataatatcttaccttgcacaatattagtcattcattatggaagagcatctgtcttccatctctccccatttgatattctccgatagtttaagatctaagtgattggaagccaagtgactgatcaagacttatatactctggaaagatcctaagatatctttccctcatataagacaagctatgcaatatagaggctacaaaaaaaaatcttaaaggagaacaggatatcaaacctgaatgaacgctgggcccacttctcctgatccacacggggagccagtccagactttccagcccacaggacattgtcacaggcgaagtacaaggctcgattgaggtgactaacagtgatgcagaatctcaggacaacatctgataggtgaacagctcttttggctgactcaagggcatctgctgagttacccaggcgtagaacttgtggagattagaaagggaaagcaaggatttgtaagtggagaggcagataacaagaaacagaaacagagaaagcaagagggcaaaagttgagcaataataatgacaatttttttaaagagcagaaacaggctgggcatggtggctcaagcctgtaatcccaacattttgggaggccgaggtgggtggatcacctgaggtcacgagtttgagaccagcctggccaacatggtgtaaccccatctctactaaaaatacaaaaattagcccggcatggtggtgggcacctgtagtcccagctgctcaggaggctgagacaggagaattgcttgaacctgggaggcagaggttgcagtgagccaagattgcgccactgcactctgacctggacgagagactctgtctcaaaaaaataaaaaataaagagcagaaacagtccatttttcaatttcaaatttaatttttgtgccagtttagttttctcaaacttgacccattctctccagtccgcctaattacttccatacccctgctctcttatctcaactggactcatgcagagggtaagtgcagagccaaatgagaaagaagaacagagagggtacaggaaggagggacaaaggaaggtgagctggggatggaggaaaggttgggggataaaaggaaagacagagttacttacgctttcttccaaggctcaggtggctctccagttgtcgaatctgtttctgtaactcaggactggctccatgcctctgcagcgcatggccaagaagagagcaagcatactgggcggccctagaggagagggcaggcaaggtaaggtggagacctccctaaccttccgctcaaaactatcttccaaaaggcacagacagacttccccctttcccagtttgagaacactccccttcctcctccatgcccatatctcaccatttctccaggccagaggaagggaaaggcataaggagaaaaaagagtctagaaaggggtggggagcactactgaatgttgagcaaattagagatttgacaatgatgaggcctgaaggggccagtgcaggccgcaggggtccatcacaagcacatcagcgtgagcatgtacgtgatcgatgagggggaggcagacagttggagggcattttattcctcagaataggtgaactgagagatttcaaggccctctagctgaatggagaccaaacgccagggcggaggcaggggagttcccgaatggcagcacggtgtggggacacggaaactgggagtgcctcctcagctctgggggcagagtctggggctatccaccgtggggcgaatgctcctcattccatcaccgcccagtgaggacactgtcggtcttatgtggacacagcaaccctgagcggcctccccgctggcccactcatgcctcagtttccccatctcttccgcgaacggaaaggaatcatctcaacagcggctcaaatctgcgcctcacggtccgttcgggcccccgtagccggagttgacccttcttgacccccctgtagcctaaactgacttcgcctcactagagtcttcctctgtccatccctcccccgccccacccccattcctattcgggccgcacctacacagccgctcccgggcttggctctgagcactgaagcggacccaggcgtccatgacagccgcagcccaggctccgcggccctgctcccgccccacttcccgcccctagtcacgcctactgcgcgacccaacggtgcctcgcgagggacaaacagtatcagaaaagaaagcttggccctggaagcggaatttcaggacgcgaaactcgtgtcttttgagcctccatctgtgtattactgtgcgtgtctgcgtcacagcttccccttatcagacgacccctactccctagcacgcctccagcggcaccttcttctttaaatattcatgaccaagggcggggcctgcaggggccggggcggggcgagaaagcgccgcagtgatctccacgtcttggaggccgccggcataggtgtgcgcctggcagaacctcacaaatacacatgcacgcaggccccgactgaatccagggctgtaggggctaaagaggtctaggtcagtagaggcctgaagcccaggctggtctgtccaaggaaaaaggagcgtgattggtaccagatcttcgttccctgcagaaccttgacagttgaacaagtgacctcctccagaacagatggagagtctccagaagcagaggctttagtgaacgaaattcgcaataatcagctccagatcctgaaaaggagggcgaagaatcagtggccaaagctaaccgcttcatacccacacttcatcctcctcagtttctctccaggccaccatgtctgcaggcaacggcaccccttggggtcagcagcgggggaggaggtctgggctggatcaggagtggaggtggagggctcagagctgcccaccttctcggcagcagccaaggtccgagtgggagtgaccattgtgctgtttgtttcttcggctggagggaacctggcagtcctgtggtcagtgacacggcgggaacccagccagctccgcccctctccggtcaggagactcttcatccatttagcagccgccgacttactagtcacttttgtggttatgcccctagatgccacctggaatatcactgttcaatggctggctgtggacatcgcatgtcggacactgatgttcctgaaactaatggccacgtattctgcagctttcctgcctgtggtcattggattggaccgccaggcagcagtactcaacccgcttggatcccgttcaggtgtaaggaaacttctgggggcagcctggggacttagtttcctgcttgccttcccccaggtgagtgacctaggactcaggaccgggcaggacagggatttgggtccatagcatgagttaaagggtgcgcttgggggccattagccattaattctcagggagtaagcctctgcttgct

SEQ ID NO: 4766 - DNA, 6000 bp, Homo sapiens
aaactggcagacacctaataaggaaacagcatgtgcatataccagttagcaaccaatgaaatacaagctatgtatttctttccagcaaaaggattagtaaaatttacgcagcagcaacaatccatcaagaagagatgcctgcagtctaatattaaatatactttatcatacaactttgaaggtagcacacttttggacctcagttccaactgcatttactgttaagatgaaattgaaagaattttaacaattgagatagatttcatatctgagtagctgttgcaggctttgtaaaacagttaaagaattattttatgtctctggagcaccacatatttccttatattgcacaaaggaagcataagctcattagtatgagctataccacatgccatttcattctcagatatgctttcctttaataagtcatccagtaccaatttcggaaaaccatatggcatggtgaaaagagccgaggtttcaggaatcggccctggtttgaagctcagacttgccacttattctgcacaacctttgacaagttacttaatctaattcctcagttgtaaaataaggacaatactcttacatcaatcctaactactattcatttattttctactgcctgtataattgcagagtgtcaatcttcactattaggagaattatatatttatatctacaatagcattactactatgtagtactatctaatagacagacatatttaatgagcatccacaatgtgccaggcactgtattaagacttaacaaattatgaaacatctggtatggagcaggcactcaactggtagctatcaagaatcatatctttattctaagtatttcatgttatatatacaaaaataatgatttcaagtaaatatttcatgccctatgtatcccaaatgactggcaagtttatataacatgtatctcctctgatttaggacacaataaatagtgcttccaccatatgaaataccagctaaattcataattagaaggtccctcaatggtactatttaggccaggcaccgtggctcatgcatgtaatcccgacactttgggaggtcaagacataaggacccattcagcccaggagtttgagaccagcctaggcaacacagcaagaccctgtttcaattattttaaattaaaaaataaataaatagaagttaagtgatcagcaaggacaaacagtaatcaaggagctgggaataaaaccaggtctgtatggttctagagaccacactccattaaaaaatgaccaggctggctctaattagcttttttattaacatgatttatgtctcttgttttttcgaccgagataaattatgcaattgcacttctgtagataaaacatagaataatttaaaaataactatttacaaacaggtattctactttcttgcaacaaataattagttctcaaaaagtgtctgagatttcttttttttttttctttttttgagatgcagtcttgctctgtcccccaggctggagtgcagtggcacaatcttggctcactgcaacctccaccgcccgggttccagcggttctcctgactcagcctcctgagtagctgggatcacaagcgtgcgccatgttcggctaatttttgtatttttagtagagatggggtttcaccatgttggtcaggctgatcttgaactcctgaccacccaggatccactcgcctcggcctcccaaactgctggaattacaggcgtgagccaccgcgcccagcctaaaacgagatttctatctcgtttttcaaacgctatgtgagtttgaaaattcatctaatttcttacaatacacagtgctttttcctggagcacaaagcacagaggagagccaatagaaatcagtgacataattaaatatgtttcttttttttttttttgatgcagagtttccctcttgtcgcccaggctggagtgcggtggcgcgggctcactgcaacctctgtctcccgggttcaggcgcttctcctgcctcagcctcctgagtagctgggattacaggcgcccgccaccacgactggctaaatttttttgtatttttagtagagacagggtttcaccatgttggccaggctggtcttgaactcctgacctgaggtgatccacccgcctcagcttcccaaagtgctgggattacaggagtgagccaccgcgcccggcatttttttatttttatttttttgagacacggtctcattctcagactggcgtgcactggcgacatttcggctcactgcgacctgcgcctcccaggctcaagcaagcctcccaccgagtagctgggactacaggtgctcgtctccatgcctggctagtttttttgtttttcttttttccagagacggggtcttgccatgttgtccaggctggtctcaatctcctgagctgaggtgatccacccacctcggcctcccaaagtgctgggattacaagcgtgagccatcgcacccggccgaatatgtttaatgcaagtttattaataggaggcagcatagtgtagccagttttaagctgaattcctgctccactatttcttgggtatgtgaccttaggcaagtcacttaacctttcagagcctcaatttccttaattttaaaaccctactttacagggttgttgtgagaattagggataatggtatgataaatctcccatcactctggctaacagtggagtctatataaatttcaagtccaggacctatagggagccagatgatttggagttctttgtgagaaaagctttaataaataagtaaaaatagtttatagatataacaccaattgttagaaaatagtggacattattaaagtacctacaacttccaggaaggtatcctttcaaattatttgattattttcccaacattctggtttataccacaaaattgccgagaaaatcccaaaaaaggaaacaaaccctagaacaatagaaagtaagtctcaacccaattccaggccaaatcaatattaatgagcttcttcatacaatcctcttaatgatgagaagtttacaagaggtggagaaaaataacgtggttagaagcagtattcattgatttaagtctgaagttaaaacttctcacttctttctcgattgttacataaatctctggaaaaatttagtacagtcccttctcccacacttttttttgaaaattgataatctccatgcagtttaaaatccagccgtaacaaaatctgagaagtgccggcacttagaacttttcatttcaaagacctgaaaatactcgccaatatggaacatcctaagcttcactggaactgtctccgtagccactccagttttagagagcaaggaggtccagccacaatggttaagcaaatagcatagaggagatgaaggaaaaacgaagaggaaaccaccagcaacatcaacaaaagctctcataaaacaacgtgggggagggcatatactcaaatcatacatgggaaaggtgtggtgggaatcatcaagcaatttagaatgttgagtaaacagagttcttaggctgaaaaaccaacgtgaagagggttaggtatgtaattaaaagaaaggggggaagcatagagaggagggccattcctctctgtaagctgcgaaccccctcctgtccacagtctcatttcttcacccactccacgaattccccgttttctgcactgagtggtcagtttctggtaggcagacacctaattgcctcttctctaacccagtccctcttggcagcgtcttggacacagtaactcaacataggcagacagcattcctgagcgtctcgctactccctgagctgccttcgtgacgctttttataccacagtggaatcgtctacttgtctgactccccgaagactgcgctcctggccccgagaggcgcttagtaaacaagggttatcaatcaatcatttgtggactcgcgtatctgcgcctccctttctacaatccccccttacgctcccttaggtgaggaccccgcattaatcatccatatcctcccctatcctcctccgagtgctcgactcccctgcagcccggcaagctcccagaggaaagggatcgcgtctttctcatctttgtgtcccccagcctatcacagggtagtgcaggacaaacttccggtaatgacagcagaaatggggtgcaggcaggattagggaggaaaacaggagctacacagatgggagacagcgattgaagggccgatttaacagccaggttgccagagccgacatacgtgtggggagccgagaaatgggctgcaagggaagggtcgcagcccgctccggacgggccctaccttagggtaggtgtgcaaggggtaggtcaactgacaggcccggtggcaagacgccgtatcacccaagaccgagtcaaatgcttcagccgaagcggtccccgaacctccggccaaggccatggtcagcagcagcagcggcgggagccccagttgggtcctcacccagaggctccccttcggcgccgccatcttgttcccctctgtcacagcagctcagcttgttgctgttttctcggaagggtttcctcctcctcctggggccagcccccttctccgccccaccgaccgttgcttccgcctccgctgtcacttcagctccgccctcacccgccagaaactgccgcctcctgcctcacctctgggactacgaacttcttctcctaggctggcgtgaggaggggaattcaaccatcgcaagcgttagcgcgaagcggggcctcctgacttcttcccttcgcggggcaggctggggcatgtagttctccgtaggcgggaggcgcacggtgctgtcgggaaagttggtctcggaaaactacagccgccctcagcgcgccttccgcccgcatttcttcgcagtgcattctggggaatgtggttcgctgtggcccagaggcgcgagggccggcggagtttcttcagaggaactaccgccctgggaggaagcgtctgtttagtttcaacacagacgactgggcttgggagcctacgaggttgcagtctggagggcgccaacagcagctaccagggctgcttttcctggtgggtctcacgtcagaccgttgttgggtgcccctacccgggctcctgagtgctgggaacgaggaggatggggtttctccttgttcggggatccagagattacagccgtgggtagggtcctctgaccaccgagcagtttgttctaggggatgctgcgtattgtgagaccctctgctgagttctggaggtggttgtcggttgctgattaccagggcaacccttgggattatggctgtggtgaggtggttgttaagagggcgtcactgagcctaatgtaatcctaaccctttcacagcccaatcttatttggaagagggcttaggtgcacgctctagcggggattccaatattgggccaattcccccaatgttggaatcctcgctagagcgtgcacttctggaagctaggaacctcctaactcaggacgtagactgatgattgattacagtttcaattcttcggaagatctttcttttaaagagaaaatcttacttcctgtcaattccactcgaggccccataattcatgaattcttccagagaactcaattgtgttactttggggaaaaaatatcatggcagtctttagtggggttttagaatctgccctctttcttgaccagaacacgctgcaagcacgtcaaggtagtcggagtcccctaacaatggataaattcgtcattcgaacgcctagaatccagaatagccctcagaagaaagattctggaggaaaggtttacaagcaggccacgattgaatctctgaaggtgagaggggatctggggctagaggaaatgtgcaaaggactgatagcaaggtggtgctagaggttctgttgtggaaagacctatgaattatttcttgttatgcctcctcctcaaagtgtacctgaccactcctcctttgtttcg

SEQ ID NO: 4767 - DNA, 6000 bp, Homo sapiens
gctgggactacaggcgcccgccaccacgcctggctaattttttgtatttttagtagagacggggtttcaccttgttagccaggttggtctcgatctgctgacctcatgatccacccgcctcggcctcccaaagtgctgggattacaggcgtgagccaccgcgcccggccctaccactaactttcaagtcttgtgtgcccatccctcattgaatgctccgcaccccaaaccttaacttgtcaatagtcctcatacacttcttcactgttttatcgtgtcaccctaaaaaagatgcttagctttgcctggttttcaacttgatacaaatggaaaaatactttaagaatccctctgcaacttgtttaaaaaaaaaattttttttttttgagacagggtcacactctgtcacccaggctggagtgcaatggcacaatctcagctcactataacctccacctcctgagctcagatgatcctcctgccttagcctcctgagtagctggggttacaggcacacaccaccatgcatggctaattattaaacattttttttttttgagatggagtcttgctctgtcacccagactggagtacagtggcatgatcttggctcattgcaacctctgcctgctgggttcaagcaattctccttgccctcctgcctcagcctcccaagtagctgggactacaggcgcatgccaccatgcccagctaattttttgtatttttcgtagagatggggtctcaccatgctcgccaggctggtctcaaactcctgaccttgtgatcttctcatgtgggcctcccaaagtgctgggattacaggcgtgaaccaccgcgcctggcccatttttaaactttttatagagacagggtttccccatattgcctacgctggtctcgaactcctgagctgacgtgatcagcctgcctcggcctcccaaagtgctaggattacaggtgtaaaccacctcgcctggccttaaattttttttttttttgatacagagactcactctgtcacccaggctggagtgcaatggtgtgatctctgctcactgcaacctccgccggggctcaagtgattctcctgcctcagcctcctgagtagctgggattacaggcacacaccgccacgcccagctaatttttttgcatttttagtacagtcggggtttcaccgtgttggccaggctggtcttgaactcctgacctcaggtgatccacctgcctcagcctcccaaagtgctgggattacaggcgttagccaccgcacccagcaaaatttttcaaatatactttattgaggttgaatttacatacaataaatgcattcattttatgtatataaattgatgagtttgacaaatgaacatacccccttcaccaccacgtcaatcaaagtaaagaatattttcatcacctggaaatctcccctctcccagcccaggcaacatgatgtactcttttacagttctgcctgttctagaatttcatataaatggggtggaagcacatggtacatattctcttgtgaacggcattttggctttcttcactcagcatggtttttttgtttttggtgagacagagtctcgctctgtcacccaggctggagtgcagtggtttgatctcagcttactacaacctctgccacctgggttcaagggattctcctacctcagcgtcccgagtagttaggatttttttcttgtatttttagtagagattgggtttcaccatgttggctggtctggtctcgaactcctgacctcaagtgttatctgcccaactcggcctccctaagtgctgggattaccggcatgagctaccatgcccggcccactcagcatgtttttgagattcatgtttgcaatttttttcattcagaagtattttgaggacttgtcttcatatatttatcttcagtttttcattttttacactattccagaatatgaatataccactacctattttttagaaacaaggtcttgctcttgcccatgctggagtgcatcagtgcaatcatagctcactgcagtctgtaactcctgggctcacatgatcttctggcctcagcctcccaaagtgctaggactacaggtatgagccactgcactcagcctatataataattgaaaagtggacatttgaattaagtttcttcttcaaatattatgaacaatgcccctataaataatcttgcacatgtttcttggtacacatgagcaaaacttaatttctctatggtaggagagaaactgttggaccatggattaggtacatgtgcaatcttaccagacaatgaccagttattttccaaagtggttttactaatttatactttcactagcaatggttgagaatttagaaaaaatttttaagcaaaaggaatattgctctgaactagaccaagggacccctgaatagccaaagtattgattggttcatgatgtgctagaaactaaccctatgtctttctcatgaggcaggcaggactgttaaggtttcaagccaggacatcctcctagagccttttcatgtactatgtcagcaaagaacaaagaggggaaggttaatagcacttgttaatgaaagtacagtgctctaggagttgagggagtcatgagctctagctctacaactaacctgtttttcattcagcaacaaattacagagtacctgctatgtgtaggccctggcactaacctgtttttcattcaacaagaaattactgagtacctactatgtgtaggtcctggctttatagtcgtgaacaaaactggcatggtgcctgcattcttgaagcttacggtctagcggaagagagaggcatgttttaaacaaatggacaaacataaaaattatggtaaatgctatgaaggaaaaatcagggtaccatgtgaaaataaagagagggggaacctactttaaaataggtaataagcattccttttttggaagtaacatttaagctaagatcaaaagaatgaatgagctagccaattgaagaccattccagatcacaggagcaaaaagggtggaaaattcagccagtggagctgggtcccagtgatctggggagagccacacaaaagggggttggtaagggaagcaggtgtcttttacttagaagcgaaagactaaagaagcagaatgagagtggcagtgggatagcaataattctgattcacaaatgttgggtttgagatgtctactacaaatctaagtggaaatgtcaggtaatcagttggcaatatatgtaaggaactcaggaaagagttctaggatagagataaaatttcatctgtagctaaagccaaggaaaggaagacagtcacctaaggagaaagtacagacaaagataaaagaccactgggttattcacttcctatacgtcttctggtaaactgcctccttttcttgggcttcttggtaacatgaatggtggaattagatgatttatggagctcctcttaagtctaaaattatgtaaaggtaacccttctcattgctcttgggttaaccttaatgatctcaaccccatcctaatcaaacaaaaaacactgggtagtttaagatgagctgggaaatattttactacaaacagttgggaacttcgacccaagcccttcattctgcagatacaaaaacagaagttccaggatgagccacatgcttgccacagcactgagcaggtaagccaagttccaaagcgcacagtgcctgctcaacttagtaagtacaaggacaagtgcacgcaaagaaacatgagaattaaagtcatcactaaaggcagaggaaatctcattcttgaccctaaaagatctggagaagtatgtttaacttgtgccctaaggacctaccttgggggcattgtgtcccacagggacatgaggtccccttcgagatttcattgcaaagcgcatgatttgcctcttcacaaaaataaatagcagtacaaacacctgtccaaaaagatgtaaaaatcctttaataaaaagtcagttttgttttgttttttttttaaaaaagcatgccttcattccaaatccccagattccggctctcaggaatgtttcagggtaaaacttggggcaaagcaaggccgttatgatgggggtggatctaagaagccagcagcagggaggcgtggggtctgtgctctagcgttaaagggagggttctagactaacgagggcgggtcggcccgactaagtgacttaaactcccacctactcctggaataaggagtcaaagcccggataggcgcaggtgagtgggtggagaatgcagacggggtacagctcaaaaggagggtctctactgggtaagatgcgacagcaggaatggggtggggtaatctcctcaccaggctcccgtaggccatcaccagcacgacattcaccccggagagccagttactgccggacgccatggcctccctacctcgcgcagaattgttcgggtttaccccgctgtcctggctggtcagcccaggctccgccgaagcgacggcgcctgggtcccctggagctccccggccatttccttacgggggaagaccaagccagacccggcctgaaaacatggcggacaggcaggagagctgggaaaggagaacgacgccttccagcttccccctgacacgtgactcaggcaggcaatggcacccaggagcgtcgagcgctcagacgcggaactacgacagtaagaggaagcggcggccatccgtgcgtcacgtggtggaggcagggccgccgtgaaggaggcggggtggactcgcggagccggaaagaggtgtctcgtggcgaggcggcacgcgcacgcttgcgtgcgcgccccttttagcgtcacgcgctgagggacgcaggaaggcaagtgggcgggggaaggcgcgagagcgagcgcgagagggaaaaggagggagggggtggggaagagggaatcttatatcacgtgacaggggcggcgcggcccggggtgtcagtgtggaggagactgaggtaaagttgggagcgcagcggcgttggcggcggcggcggcggcagcggcagcgcggcggggccgggtattgtccgcggcccctttaaatccgcgatcccccttttaccctccctcttttctcccctgcccccgccgtatcccctccctcggtaggcccccccacaccgtgtgttcccccactgtacacccccccccgagtcatgcgagccctggcgccccccacctcgagtcggcccccggaggttttgtttatggttgggttcgcggcctagtgggccgcgccagagccggggcctcgatttgggagcgtggccggggcggggcttggagcagccgtaggaagggggggccatgcggctagagcctgagaggggagagcgagaaagagcgcgagcgagcgaggcctgggccttgcctgaggtagggctctctcttcaccccggccggtgcctgcggaggagagggcctcctccctttccacccactgcgggcctcctctgatccggatccggcctggtttgggggtggcgtgggggagggagggcgatggggtggagctcccccaaactcccccatgtggccctcagtttggtgtgcgaaggattaatttgttccggctgggaggtagggaggagattggccccgtgggctctcgatgtggcgctgaggggggtgagcctcccatcctccacccgtgggcttgcgtcccctctccgtttccaggctctttgtcagctcctcttattaccctcccttctttctcaccaacccagttcttggaatatgtttttgctgctgtctttagcttcctgtttatactgtagtttgggtaccccaaacaattgtgttatttgggaagctggacatggaggcccccatagggtgtatttacgcttaagggacgtcactagagcactggggtatttgttcactcttctcataatggtacaggaatgcccagtttcttcaaacccttaaccttgtggacagc

SEQ ID NO: 4768 - DNA, 6000 bp, Homo sapiens; identical to SEQ ID NO: 2674

SEQ ID NO: 4769 - DNA, 6000 bp, Homo sapiens
aaaattagccgggtgtggtggtgtgcgcctgtaattccagctactcaggaggctgcggcaggacaatcgcttgaacctgggaggcagagtttgcagtgagccgagattgtgccactgcactccagcctagatgatggagtgacactgtcttaaaaaaaaaaaaaattagccaggcatactagctcatgcctggaggctgaagcaagaggacagcttgagcccaggagtttgaggctgcaggcagctatgatggcaccatcgcactccagcctgggtgacaagaccccatctcttttttttaaagaagtgatttttccctattctgatggtgctaaatcaattacttatttaattctaatgatcttatataaaatgttgacctgaaatagtcagctgtcccagcaaagcatcatctggggtaaaaaaaaaaaaaaaccatgtagatcagctttctgtcaagtacaacttccactgctataattatgcaatcatcaaccatcactgcaagacaacaaaaaccccaaagctgatgttactgaaattgctaaatacaataattactagggtctcaaaatcatgaccaccaattcctttaggaaagcaacagaaatctttgtaattataagggaaaaaggctgattagttatcccagatggtggtctctacagcagaaggtttttggtcactggccagaatggcagcatacacagaaatctttctcatattgctgttttctcacactcatactatgaaagcacaatatcaacaaaagaacttgaaagaaagaaagaaagaaagaaagaaagaaagggcattctcctttgaaatttagccttcttggcactgattcctggcaagaggctttaccctggtgaaataatctctaggaggaaagcatagtctaaaaaatctatcaacatagcccctctctatggaaaaagtaaggaacgcatttttcccataagtgtagattcctttaggaaaggaaaggaagctcaagaccagcctgggcaaatagcaagactaagcacccatgctgagtgctgtgctacatgctttaattatactatccctcaaatcaaaccatgaggtagataataacccttcctcaaagataataggtaatttgctcaaggttttatagtcattaagtggaaatacccagttgacttttatcaagtcttaaaacggttgtgccaattctcccttatgaaaaagaatccaatttaaactctggttccaaaacaaaacaaataaataaacccaacagacctcagtcaccaaaaggatgaccatttctgtcaattagcagattgttttttctgcctcctaatagtccttaaaatgaactgagggactcacataaaatgcccttttctaaaaaaaaaaatcttaaatctataaagaaaatagtacctgttgacaaccacagaacgctgaagcaaaagcaagtataaaacaggtacaggcttctcaaccacttcgcagatgtctgccaataatatcctgataaaatccaggaagcaggatttggcttgactcccagcctcttctccatggccctccagacaggcagaaccagtacactagaaggacagaaagagaagaaattacatgccgagtaattaataattaattcctggaaatgtggaatgctagaaaatatgacagattaggggaaagaaaaatttcaagtttgtctttaacggctcaaccctgcctataaattttaaacctgggctttgaggtagcctataattatcagaataacaacacagcaagggatatcaaatgaatccactgaaaactgaaactttatattcctttttttttttttaatctaacagtaaatcacctatgtggtagaatggaaagagtaccagcccgcagacaagaagatctctgagttttagttgcagttctgctactaacagctttgtgactttgaccaaacacactttcttacttttgaggagaagaggttgcaccctcagaggtaaagtaacctgagggttatgtctggcccagtattttttaaatttctgaatgcaaatgtctttaggcagggcatgcactctccagtctgctactgtctccgcccaccactattatcatgaaaatctattcaatttacacctcaatgctacccaccccaatccctgcattcaacagatacttacgtcaggcactatgctggctactccagaatctaggggctggattatttaggtctcttccagcagaaaaactcatttaccataaatttctcccctcatataaaactttgctatattgtctaaattagtacgtaaatattggcaacattatgagggttgactgagttctgaagaagcaattcaaaaacttctgtccaactatgtacctgtcatctacatccagcaaacgacacaggctgccaacccctaactcctatccacggccagcatacagggagatcagcattgcctgggctggataccaatactgactaataccaagaaacagccacagacatacacacagctgcaaaactaaggtgcagcccacccaagaaaaggcttttgcagaaccacatgcatctgaaggacttcatcgttctcattcacttccatccattcctatttctagttgttttgtagttgtatttcagggagcagggggcagaaaggaggtgtgtgggccagagacatgttcaagagattatgaaatggagcctaagttagaaagtacatccagcaatttctctagcctcccaagagggaacgagtgagtatgcatgtgtgcatgtatgggtgtgtatgaatcttacccaacacatttctgcctaccacaaaaggatttaaaactcaaggtgactcaacagctgtcatcaatagcctgacaggtgggtgggagaagcagaaaagaaatgaatagcttttgaaaaatggagtaataaacaccactggactaacaagctgattagaagtgccatgtctaataaatcttgcgtctaagagaaaggcagagttaatttcatttgaactcctaaccagtcattcctctgaaacctataattgcctaagggcacaaatcactgctagggtccagttaaaggcttgctgaccaaacgcaagaacaacaacacatcaccaagatccgaatagtttgttactgaatcaaagggtaacaacccagggagagaacacacacccccacaatacttgacaaatgaaaatctagagaagctcacaatagttctggcatttagggcgttacaagtacacccaaaataaaagcactctctgttgcagcagctgttcagacagagcagggggtaatgtttacttaatacttcaggttgatgggggatgtatcacagttcagtctgtcaactacatacgtggaactccatttatgtacacagcgataagatatgtttgaacaacgatggagcacgtctgaaacaatctattcagttggtatgagtaatcgagaataaagctcttttttaaaaagtctcagatatttgggaaagttacagaacagactgccatgaatagctttgcttatatttgcagacactgttttccaaatagctggaaaaatgaacagattgttctgggaggtcgtctttccaatttgttcctagttttcagtctgttaatcacaggagagagcacaaggagagtcagctaatgctcttcactaactgcaactactgtcagttggacacaaccactatgagaccagaagccaaagagttcctggaatcccgccagaggttatcaattttgacttccttcatttcacctttgtgctcactgcagccactacaggaccctctgtggggcataattttcaaaatcgtggatgaggcaggtttcacattataatggacacatcgtgctcaaccccatcccctcttcattctgcaccaactttctatctcggtggagagaccaaacatcagagacagcaactaaagactaggctgcagaggtcgaaggtggaagaaggacggcagcgccccgaaccccggctgtctgcctggctctcaggggatggagggagctgcatgactaggcccaggcccgagagaagcggggttcagcctgggacccaagctgcgcacctgcaaggacagaagcagctggctgccctggccgagccaggggcgccacctccggacccaacatccggccagcgcagccgctgacatcgcccgtcccgcttgcccctcccctgagcccatggtcctcggcctggcagccagccgcccccggccacctaccggggctcagggccacatagcggggccccggctctcggcggcctccgcctcctcctggtccatgggctcggggacccccaaccttcgctcccctcacccggaggaggaggaggaagaggaagaaggtagtgcgggctccccacccggacagctacctctcgcctcagcctccctggacagcgacggcggccggaaacaccgcctcctcccacctccccgggaccgacccggaaacacactctccatgctaaccaagccctcccgcccctcccccgggaagggcaatgccggccgcgagaccaagggggaggaggggcagtgctgggcgggtaaaactacgcacaagcgaaggaatctgggcccccagcctctcgccgcccgctctccagaggcagtctgcaccttgcctccttcgctcgagccccagcccccagactcgggcaatacccacaagcaagatggcggcaacggcggcaccccctactgcttagcaccctgacttgccattggccagagcccggagtgaagcagccgcggattcgtcaagagcggtgcgggggtgggggtggagctgcagcagcctggagccaggagtgggcaacgcggcgtgagcagcggcccgaggctcccggagcatcgcgctgggagaagacttcgccgctcggggccgcagcctggtgagctcagcccccttcgggccctcccctgcatcccagccggggcctctccgagccggcgctgatcgatgccgacacaccccggggaccctatcgcgactccatcgcgccatatcgcgacaccatcgtgccctgtcgagactccattttgtcacagcccttttcaatatatatcttttttttttttaatttgccctgtcatctttgggggctgtctcccatgtcgtgattttgacgtgatctctccgtgacatcaccgcgccatcgtgaagtgtgatctcatcgccgccctgtcgtgacttcatcaatgtcgtgttgtgacctggctgcggcgggacaggtggtgaccgccaggaaccctcctccccttctcatctccccatctcagcagccctgcttcgattatccggcttttggattctccgttgtcctgggaactatccgggaccccctcttgcttctccagcccctgccggcatccacaggctggtagcgggacggggagggcgagaagagggagcgcaaggggttaattctgctgctgccgccgccgctgctgctgctgctgcagcctctacccgagggagggaaaggagaggaggcaaggagcctgcgggggcgactgagagccctggctggaggggtggggtccccaaaggggcctccaagccttccctgttgagcgtcttgtattctcacttctgaagcgtatctctgcctctgaagaagggaggggaaaggaagcctggggtgtccttttctcccatgtcagcctgagtccggataatcgaacttcacccatgtatgtctccatttctccctgtctgtcctcaccactcactccctctgtgtccctgtggagggagataaaacccagcctccggtgccagggggacagctgagcagtggggccagctcccgcccacccccaggagactggtgaggagagctgtccggctgagcagcagcatgcatggtccttctttcccgctttctggaggtgaccttggaccagggtcccttctttatccctaaggatttgcagatcca

SEQ ID NO: 4770 - DNA, 6000 bp, Homo sapiens
tgccagaaggcctttgacctgtccactctccccacccgtgcctgtactgggaggttcctgggggacagggagtgtgaagggggctggcagctatagctttcacctgtatccctgcaggatccatagcttagagagcaccagggtctagcagacttctgcgtgtcccagggcctgtggcgccaggtatcctctgggtccccagcaatgcccctggcccgctggctgcagcccagcctgggagctggccctcactggctgtgggcaccagccactggcactgcacttagtctccttctgtggtccctacttgctctgccccgtagctgaggggacagtcaggtctcaaagtgaacaaggcacatggggctccaaggaagggtgccaagtgcaggctgccccagccccttgctgtgcccccagctgtcccagcagctaacccccacgtcccctcattggcacaggtaggtgagggagaggcctgggtggaagataggcacagtgaccaggccttgggctgtatctcctgaaaggcagagggcagatgcctggcccatctgacccacagacagctggacagacagaccccttccctccctgccacccaggagactttgggcagtcatgtcctggacaaatgacaggagggtggttcctgggcagagaggtggggtgggagccaggcaggaatgatgtcctgagtggtcccccgcgggtagggaagaggacctggctctcaccttggatggctcggcggatgtggggacaggggccccacagctcctgcagagtcacagggtcccctgagaagccctcacgcagccccaccaactcctccatcaggcccctggagaagcagatggagggaaggacccgggtgagctgctgcacgtcctcgcgctgcctctgggcccttccagtgctctccccacccaaatgaagaggaaggattgtgcgtgtgtgtgtgtgttatcacactaggtctgtgtgtgccctcatccctgaggttccgtcactgagggtgtgtgcctgtgtgtgtcattttgtgggatgagggtgggattcctaggtgtccccctgtgtccagcagcagactgtggacaccgctcccaccctcctgggtcgcttggtgcttccactactgggagcagtctctgcccagggctgtgactctctcactgcagagtcccatggatggctccgactctccctgccaatctcggagcaccctcctttctccccgacagctcaggtcacagaggcaggaaaaccccaggaccagaaggcctctgcaaagccaaagtgaggtgctggctactgcccctaccatcccctatgccctgcctgcctggcccttccaggttcatactccagtccacgcccagagacccctcacctgtcagtcctcctgctgcggctgaactggccctcctctcacagagcctcctttgctcccagctccagtgcacctggacaggtatatgctctaccaatcatcactctctccctgccaccccccttccccgccggccggggtttaccatggagattaaaaacgtccttgacaaaccaaccagaactgtggaggccagagctgtgcagggcagaactgccaagagagaaggggagcaggagcctccccacccatcacagctgcacagagggtggtgcccagctgtactcaggctcctgggtgctgctggacgagggctgggaagggggagctcatgcacacagcaggacagagaggggtcatctgccaaggctgagactcagggtccaggggtctcagagctggacatggaaggtttgaaaaagcacagagggagaggggaggaggctgggaagggaaggagaaggcaggggggcaatggtgagtggggccagcatgaccacagcctccctgtgtgtcaggtagagagtcagccttctcccagattaattaccctgagtgcccacggaaatcccacgaggcaggcagcgtgatcccgttgtagagaaatggtgtctcagggagctggggctgcctgtctaagatcacggaggccgaggcagagccaggattcccagcccaggtttgcctggctccaaagcccgcaggctgtgccacacggtcccatcctgatgacccatcttgtccagggctggcgaggaggccgacacctggggcaaggcagtgaattggggtcaggaactcggacttgatcctgtgtccagaccctccaggctcaggaaatgcttctcaaagcacacgtccaagggccagcggctctggtggggacttctgggtaattccacagagtttgtcccaccccaacagaggatggcagcacaggtgtgaggggacatggcgaggaacaagcacctgccgtgtgcctgcgacgtgtcaggagcgtcacatctgcagctcaagtcctccttcccacaccctgtgaatggggagagcctcgccattttgtagatggtcagagaggtgagtcactcatccaaggtcacacagcagaggctgaacccagccccacactgtgcagctcttcccctgcccaaagctcctccagctcctgaggctgaaccagggcaatggtttgggcacagaacagaagagttgtgtctgatgccacttttgggcaagaggttggggacaattgcctccactcccacccagacaaagccaccctctgaagcttatgatagcccttggatgattgttaaaatctgggaccctgggccaccctttgcccctagatgccaggcaagtcaaatcaaaatcaaagatgtgtgttgtgggaggtgggatgggagttgccgctctgtatggactcgagcccaccttcaccttggccaccccgacctgttgactctgcacagcaccagaactggctgccctgtcaacatcccgatttccagtgtctggtctggggcagctgctggctactgtcccacagccagcactgcacgtccacatctaccctcaccccccagccctgtgtgcaccaggaggctgagaagagggcagccagggtggctcagcaggatgaccggtttgaagccagcacagctctgctgaccctaactctttcatcaactagagcctcagtttcctcttctgtatgatgaggtgagcctggaagcaggggcctgtctctgccttattcatctctgagtccttcagagcctagaacagtgcccagcacctatttatagcaaggtttcaatgaatacctactgagtgatgagggcttcatcactggcctatgagctggctgtgtggggagctgatgggaagagatgtgaggtcccttccccagatcccaaatcaaaatcctggggtccaaggaaagggtctgtgtttgtgaaaagctctcctgggtgactgggattcaaaggactgcatcatctttgtagctccttctgtctctgtgatctgaaggtagaggcaggggaatgtccttgatgaccttttgaggtccctctgggtcagtgaagccagaggatccagtatttgtgtgggtgatgcctcgggaagggggaaaaaggggaggaggaatggtgggcgggggtgggtaacgggatctgacatccaggggcagtgactcaggccctcagcaccatgacagtgtgtctgcatttagccaccggctcctgtttccctggcgagcggcaggctctgggccccccaccccgccccaccctctctccatctcacctcagtgctggtggcttcccagctgccctagaaacccctcagccaggctgggtgtcacaggccccgacacgggcaggaaactctgccagaggcaacaggccctgttgctccaggcaacagcctggcccgccgctgtgccctgtgccctgctctgcttccactccacataccaccagcaccgctaatacccctgtagaaggagctctccaggatgaagctccagactgggttgtagggggctcagacaaaagagaaactgcccgtcttcaagaaccttcaatctaatggggagacaggtgaaccctcgcccccgtgggaactgccagttggatagggaagaagggacacagcagagagtcacagcacacaggaagactatgtcacactgccaggtgctgtgggaggacaaagacagtcagtgctgggggcatctggactgggtgtgggcccatgtgagcaggagcagtcagagaggcctccctgggggaggaggcattggagctgatctgggacggaagggacggatttggagaggacagcagaggcccttaactgcaacctgggcagagcagagggcctggccgcctctcagaatggcctccaccctggcccagggcaaggtcagtcccagctttgctgagcaagcaggtgggtagggaggggcttctctggctcttccgggccagcctgtctccataggcacatgttcaaaccacctcggcctctgaagggctttgggtccaacacatctaggttcgaatcccagctctgccacttacgcaactgcgagccccgccctttccaagaggcttcgcttccccgtccgtaacatgggaagagcccctccaccctcccagctgtgtggggatcaaacggggccgtgctggacagcttgcagccaggagcccatgcccagaaggcattctagaactcagggctagaataattgtcttccggaattctcttttacctctgactgaaatcccacctaaggcgctcgcaggcatcacctctgacacagagatggagcagacagttgccgggaacacaaccttctagacctttaaggagaaagctgccaactttgtcctcttggggctgctgaatgttctgagagtcagagggagtgcaggcacagaatccaggtccccatgggggctggcaggggacagctgcacattttacaccccctggcagggctcaacctttccttagagatgggctgtgaaggttgtctgccttgagggaaggagctcctgacgtcacagagcggtggtgcttccacctaccctgtccccaaggagcctgcacactgatggaggaggtacagccgtggaggagaaccagagtctggaggggaggcacagtcctcaggagcccccaggctgacgggggaaacaaaacacacaataaaccccaaacttgcaaggttctggggcaggcaccgaggtccgagtggcaaggagacaggatccagccctgtgcagtggtgaggaggcccctggggctgctgtgatcagcctggaatgtcaggctgtgagctcagccctctcggcctgcgtgtcgggctgtcagcagggccggcgcacgggagaagatttccagccccctctgggccatggagaggcctaaatttagctagtagacaaggggctggccccaagcccagggacagtcggccttataaagcggccgcagtcggagcctggcacgctcgcccagaggcctgcgcccacaccctctcctgtccagccctcgcccgcctgggcagggcccggcgccgtccgtggatgagccacagaacctcttccaccttccgagcggagagaagtttccattcctcttcctcttcctcctcctcttccacctcctcctcggcctcccgtgctctcccggcccaggacccgcccatggagaaggccctgagcatgttttccgatgactttggcagcttcatgcggccccactcggagcccctggccttcccaggcaagtgatccgggccctgaggggaggggaggtgcacagggaggggacgtctgctccagggcgccaccgaaggcgctgtggctgccggtcggcctggaacaggtgctgcacagcctgcagccatgtgtggccaccaagacagatgtggccacagggacagatgtggccatgaaaacaggtgggcctctaaggaacagttgtggccctgggggttggacatggttccatggccacccatgctctgtaaccacagccaatcccagctggagccctggagggctggatgggtgagcggtggggggcagccc

SEQ ID NO: 4771 - DNA, 6000 bp, Homo sapiens
tcccctcagcatctccctctccctttggccctgccttgtccaaggccctgggactcccagtccaaatccaacgggcacctgctgatgcccagccagctgttctcctgggcttcggctggacctgtggaccaatggttccccccaggtcccaaccccatggccaaggacccagtcacctccctgcaccagggctcctgagcctttctccccttttggtcaccttggctcagccagacctctcccaaggccctgacaccatggccaagggcactgttcctggatggcgggcatgctcctcatccaccaggacccgcagctccctccatagtccagcccgaggtcctgctacgtcccaagacagagccttggggaagaaggtgatgatggcagctcaccagggtgagcggggctggactgcttgcaggggcatggagagcaagctctgggatgggagcctagaggtaccttagggacaggctctgagtgaccagctgctggaccaatgtggcagggcagtggagagaccttgggtacctggcgggaccttgaagccaggctgagcactggctccccatccccatctggtgtgcagggccaggtcctggccccttcccctctgcctccagggcctcagagagtccgctcctcttggaatgtggccccagctgtggagtgggggtggatctccctcacagcatttgatggtgtgacactgccggccagcccagggtttaaaggtcacagtgctggtccctccctcctatccccatccaggctggaaacacatctgcccctcaagagtgagctcaggaatcacggcctccgggaagccccacccccccattctccgctcacactgcgggcttaggtgaggggccgctcccaccactgtgctgagtctccacaggcctaggggatcatagaggctccacacgagatcacctgaagacaggtgcacgtggtgatggcacacacgcacgtacccgccaggcacagcgcattgcagcagccacgccccgagatgtctcccctgccagctggcaggaggaaggtaggccacctgacaaggccacactgctagaaatgccagcactgggctcagacacatctgtgctccggtcacctgcccacatggcccctcatagatgcaggtgacacacctaggaccctgagagccctgtgttcccgatgggtcatttttgggggtcctgccacgcctgtcttagctccacctcctgcaggagcccctccccggccactcggcctccccacccactctcccgcagcgtgacgggtcctcccactgtgtgcaacgctggaggcggcagtgctttttataggagcgggtatatttaactcccttcctggtcctgggtaggctgggggatggagaggatgccccagccctgctgtgagctctggcccgtaactatgaccacagttaggtggcatgtgggtcacgatggccttggtgtggagccctccgtgactctgtggcagggtgggctgtggccaggtgaagggggcagtgtgtaaagaaaaggagacactccccagccttctgggtgtcaggaaacgaggctgaggatgctaagagaggggacctcccacctgagcacctctttaaatccagttggctccaggcctctggctcacaggtggtggaaacgcagttcttgccctggccctgcccggccccagccaccagcatagacctgcatagacctgtctcctccccaggacccagcccactgggagggttcaggccccttcctgcaagactcgggtccttctctgagtccataccctcctgcccccagtcctggggctgccaggagggagagggtcttccaggacaagccagctgctcacctacctgctctcccagcctgttgcaggcccctgcaacccgtgtcccctcaaatgcctcaggtcacaaaccacccatggtgctgtgctgccctgacccacagggctcctgagtctcaggaagggggacagcaaccccaccggcatgaggcccctcagaggcctcaatcaccttggccacgcagaccggtctcctctccccacagtccaagagaagcctggtgctctgaggagcctttgggatctcataggaacagcctggtggggttggggggcgggtgttggagggccatcaggggctgggggccaacagacaggttgcagggctagagcccaggggtaggacgggttcccacagccaccattccccattcccgctgcccagctcctcaccccaggcccagcgctgccccaggccagagtccctgggaccaggagttgagtagccaagtgtgggagaaccactgcccacttgctggtgtgcggcttcaggagcaaagcacagctgactacaggtcaccccagcctggcaggcggtcgaggaagcagagggcctccatctcacacccctgaatccagctccggttcccaggtgcctaaactccacactccgagggaagaccccaccctatctttcagaccactgagcatcccaagctgcccccacctctcagcacaggcgggcatcacagggccccctgccaaggcctggccacctcctccagccatcatcccccactcccaagacctggaaagtggccgagacgatctatccagcccagggctctgtcttcagatcacttcaggattccccaggtcgtccttcccaccccatgtgctggtcaggaaggcctcagcacagccctcacagacagccctgcacacacaactgaacgcaagtgagacccagtgatggggcaggtgctccttccccacctgctggaaaggaccccaggcctggcgagggagccaccggtccccccgtctgtgttcctctgcaaagctgaccacttcctctcttcccctcacaccctcacaccaccccgatgacagtggcccaaacaccaggagcaccccggggaggacaggccccacctcacaaagcaggtcaacaaggtcagcccgccccctccatcacttgtgtccccccatgacagcctgcagagtcccagggacagactgccgccctccaggcccctccccagacagctgtcactgatcaggtcagggccctcccccagctcagccttccctgcaagctcctgtccacttccagcctctgtccagccccaccccttgctgaacagggagaagggaggacaatagagcggagccccctgaccggactctggccctgccctacaggtctgacatcacctcacaacctgtgggtcccaggacttgttcccagttttgaggctgagggggctgaggcccagagaagtgagagccgaggtccagtgccgtcaggcggcggcctctagaccccgagttcctactgcggcccaccgctgcggactcccaggacagacgcaggtgcccttgtccagcctcctcctcactccagacacactccacacgtctgggtgcacacctccaaatggcccctgactcccaagagtgccacagcccatccaggtcccccgaactcagccctactcaccatcaggaggcgtcggaggcactggagtgaagtgggtcccgggtttatctggaagaaaacaaatccccaagttaggctcctctgagcaggctcctccctgtcccatccctttgcccagcctggaaaggggcacccctgcccacccccccccccccaccgctagccccagggatccaggctgctgaagggtccagccctgaccccatgggctggctgaggtctgagacagaggcccctgcttttctctgcccctccagccaaatagtcatggcctgacccctgtcagatggggccccagccacaggggtgcaggcaggacccccttccctggaagagtccaccgcaggtcctgccctacccccaactgccggctctcagtgtagccggctgcccctccctccccagctcccgcagaaagtgtttctgcagctttgggtgagggccaggcccactgagagcccaaggacggcctccagggaccgaggggtccgcagagtgacccatcccatccccgggaagctgccgggagccccgcggacccgccgcggcctccagcctctatgtgcaggggcctcggggttggggcttggccagtgcgacgccccgcccgcggccacctacagttgttgaggaacagcagcaccgcgaagccgagcgtggcggtggccagcaggatcaggcaggcgttgcagggcaccatgaagcctcgcaccagcagggaggcgccaggcggctgccgggtgtcccgcgccagcggcagcggaggcatggcccggggctccggctctgcgccccactctcagagcgtgggggctcctcacggggtgcccttgggcctcttcagggctgctcgccccatcctgggacccctggggcggcggacagcagctgtgccctcagagttcacccagtcacagccctgggggtgccaggtcccggctccagtcctccaggctcatcgtgggaggagggcagaattctcccggagtagaaatcccaaatgtgggctccgaggtaggcggaggagggactgggagcccgcagccacccctgctgcccacagcctccccgggctggccgccagcgctcggtcttcccggagcccccggagccgcgcaggccggagaggcggtgcgcgcggcaggtgcgcgggggccgggcgccgagggtctgctgtccccgtccccggcagaggcggaagcggcgataggagcgggcaggcaggaggggcggccgcgtcgggagcgagaagaaagcgccgcctgcggaggccgcgccgggtcccgggctccctccagctcccctcgtccccgcggggctggggaggtgagtgaggggcgaagacgccgcggagggagggcgggagcagagacaaaggaagccgcctccagggaccccggcgtccgcggggagttccagaggatcgggcggatgcggacgggagagcgccgcacaaaagggaacgccgggcaggcggggccgggggtgctcggctggggctggggctggggctgggcccggggccgggagcgctggggctggggctgggccgggactggggctggggtggctgaggctggggccgagggtgggcctgaaggtgttgggactgggggtgggactggggctgggcctgggggcgctgaggctgaagctggggccgggggtgggactgggggcgctggggctgggccgggggtgggactgaggctgcgggcgttcaactgggattgagtcgagggcagcggtggggctgggccgggggagcaggggtcgcgccgggcagcgtcgcgtgctggagcggaggcgggtgcggccggggcaggtcgcgggaggaggaagcgcctggggagcaggagctgggccgggcgggtccgcgccccgcacccgcgggggtgaatcggagtcgccgcagggggctcggggggccgcgtgcgaccgcgtgtgcgcgtcgtcgtgcgtgtgcccgcgagtgtctgcgcccgcggccccgccctggcggggcgtaggtgggggagggccccaggtgcggcgcgagctggagggtggagtgaggtgagcggcccagaaatcgcctcgcccactttcccctggggattgacagtggctcctccagtcgccggcgcccccgactcccgcgcggggcggggtcatgcaaatgagccccatgcaaattgcggcggggactccctgcgggtccgtggggctggaacgcccccaagaggccgttccgggaacgtccgggccctgacgtcactgcggcccggggcggggaatgggggtctgggcccatctgggactcctgacgcgtagtccggcgtccccacacccgcccccgtaggtcgcccctctccctggccgctgcccagccgggggatccgggggtaagggaggggcccgtccggtccggtgtgtgcaccatcccctagagtccatgccaggcccgaccaccctggaggccagaatct

SEQ ID NO: 4772 - DNA, 6000 bp, Homo sapiens
tactctccagtttataaagcaccttcatatctcttatgatttaattaatcacaacagtcccttaaggaggtaatcccagtttagagataataaacagtaattagacattttctgatacagattcaagctgccagatgttcacatggggcctacataatctaaagtatttgtcccagtattgctacaaatagcaaaatttagtccttacatcccaaaccaagttaggaggaaaacccatttttttctagactgtgaacttgaattaggaatatgaaaactgctaaacctaaaaacccttgtttggtcagagcttaactaaggatggttagtcactgctttttggcttgctgaactcccagaacccctagtagactaagtatatcaaataaaagtgcacaactccactcatgagcttggaaatacagaacagaccccacctattcacttctgattcaaatgcacaacctcaaacttagtttccttcttcttcaaggatagtagtgtaaaaaactgcccatgggagcaacagtttaggcctaaatttgggatatagtaaaatctgacctcagaaataaggtgtttgcctgcctgtgcatgcagatacccacatttgggggcaaggaaagaaaaggtatctagggaaataaaaagaactagctcaggaatcatgttttcagaactccaatacagggccaggtgagaggactgcttgagaccagcctgggcaacatgacaagaccccatctctaaaaaaattaaaaacaggctgggcatagtggttcacacctgtaatcccagcactttgggaggctgaggtggccagatcacctgaggtcaggagttctcaatcagcccggccaccatggtgaaaccccgtctctactaaaaatacaaaaattacctgggcatggtggcacgcgcctgaaatcccagctactcaggaggctgaggcaggagaatcacctgaaaccaggaggcagaggttgcaggagccaagatcctacccctgcactccagcctgggcgacagagagactccgtctcaaaaataaataaattagccgggcatggtggcgcacgtctgtggtcatggctactcagaaggccgaggtgggaggatcccttgagcccaggggtttgaggctgcagtgagctatgactgtaccactgcaccccagtctgggtgacaagagtgagaccccgtctccaaaaaaagtcctaatacatgtttcatcctctaccatgccattcagtgaagccaccaaagctcatacaagctgggagtgaggggtaggaaaggttcaatttggaatccaggctatttattctcacaattggcaaaggtttcttctaaatatgaagatgctatttaggatgtaaattctagtttttcattaacaaggtttcttaatgctgctcttttaaaaaacatactgaaagccgggtgcagtggctcatgtctgtaatcccagcactttgggaggccaaggcaggaggatcacgaggtcaagagattgagaccatcctggccaacatggtgaaaccccatctctactaaaattacaaaaattagctgggcgtgatggcacacgcctgtagtcccagctactcgggagactgaggcaggagcattgcctgaacccaggaggcagaggttgcagtgagatcgcgccactgtactccagccaggcaagagcgagactccgtcacaaaaaaaaaaaaaaaaaaactgaaaaagttttcccaaaaaaactaaaattacattctgcccgagttagaaaacagaaattaggaccgtagatacaagacccttatatcatttccctattagcaatgctacaacactggtaattctgtgtcactgataattttgtgtcaaaaataacatggcaggttttgaaaaaataaatccaaatatgtttgaatatggattgctacatgtaaaatttccagtcactgagaaaaaccaagatcacaccagataaaaagatttaatcctcaataattttgcgttcctcagccgggcgcggtggctcaggcctgtaatcccagcactttgggaggccgaggagggcggatcaggaggtcagatccagaccatcctggctaacacggtgaaaccctgtctctactaaaaatacaaaaattaggtggcgtgcgcctgtaatttcagctactcaggaggctgaggcaaaagagaatcgcttgaacccgggagcggaggttgcagtgagccggatcacgccactgcactccagcctgggagacagagcaagattccgtctcaaaaaaaaaaaattatgggttcctcatagaataccatagtttattttattttatttatttatttatttattttgagacggagtctcgctctgtcgcccaggctggagtgcagtggcgcgaccttggctcactgcaagcttcgcctctcgggttgacgccattctgcctcagcctctcgagtagctgggactacaggcgcccgccgccacgcccggctaattttttgtattttcagtagagaaggggtttcaccatgttagccaggatggtttggatctcctgacctcctgatccacccgcctcggcctcccgatccacccgcctcggcctcccgatccacccgcctcggcctcccaaagtgctgggattacaggcatgagccaccgcgcccggccagaataccctagtttaaaactgactgcttaattacttgctttttctcatctattgcagcggtggatcttgctgacctttctgaggcaggctccatttctttctttagtttttttttttttttttttttttgagacagggtctcactcgggttgcctcggctggagtgcagtgacacgatcacggctcactgcagcctggacttcctgggctcaaactcccgagcagttgagaccacaggcgttcaccaccatgcccggctaatttttatattttttgtagagacggggtttcgccacgttgcccaggctggtccaactcctggactcatgctacctgtctgcctcggccgtcctcctaaagtgttgggattacaggcgtgagccactgcgcccggcctcaggttctatttctttttagaaataataagactagaaaaattaagggataaataagtctccaattattctgaacccacagcccagaatggctgcccccaagtgaccagagaacagacggacaggaaatgagattagaaacaactagtagctgtgtcgcaaaattgataagagtcctggttctagaaccgcgctgcttggccgcaattcctggctgcaccaatttggtagctgcatgaccttagaaaagatatttaacctctatgcttgtttcctcatctgtaaaaatggcactaatagtacccaacacttacttcataggaatagtgtgtagatgaaatgaattagggccgggcgcggtggctcacgcctgtaatcccaggactttgggaggccggggtgggcggatcactaggtcaggagttcgagatcagcctggccaacagagtgaaacccccgtcgctactaaaaacacaaaaattagccaggcgtggtggcggacacctgtagtcccagctacctgggaggctgaggcaggagaatcgcttgaacccaggaggcggaggttgcagcgagccgagaccacgccactgcactccagcctgggcgacagagcgagattccatctcaaaaaaaaaaaaaaaattaattagtgcatataaagcacttggaatagcaagcagtcaataattatagcagcactctttctctgggaaagagctccctcttccatcacagaatcacatcgtacattctttcattgtccccaaagacacacaccttcctcaaagaaaaggaacacaaggccaggtcttccgaacctccatagaagatgtggtagggattcctaacctgagctggggcaaggcggtctgtttgctccccaaatctgtgaaacgcgggcttcagaacatctgactgactgcaaacataggtcatatttttacaagactttagtccacaaaacattttcgctctcaaaccttcactacattcacagaatgcagaagccgaggcccagagaaaaactagtcatctatctgtccaaagtcaccggacgaattctggggaaaggtcgagggaactagagctcccgactatgcaaaccctagagggtaaactgggggctaagagggccccgtgcgtgttttggcgggctaggtcctgggcttcagggcagagaagagggccgagtggatcgccttgccttacctcctcaggatctccggattcggtaagcatcttttgctcgtcctccagtcccatgtctggctacggttctagattcaacacgagcagcaacagcggcacctaacccagttcaggatcaagaaggacttgtaagggtcactcagcggaaatccggcgatctggccggaagtgcggcacactcatcgtggtcgcgaacacatgctcagattggcatgtactaccagccgcaggcagaggttaggggtagctgatgtttgcacccgaggaggctttgctaagaaacatccccttagtcataccacacccaagtataattgatctaggagtttatctaaaatagtagctcctaagagacttggaaagtgtgctaatttcttcgaaatttctttagaataattcacattcttccccatatcgcttatggagccgtcctaactgctgaccttttcaagatggcggtccgcgggcgacactctcgggctcgcgcacctccccaagatggcggcgcccgaggcctggcgcgcccggagttgctggttctgtgaggtagcggcggcaacgaccatggaggccacgtcccgggaggcggcgccagcgaagagctcggcctcgggccccaacgctccccccgccctgttcgagctgtgcgggcgggcggtgagcgcccatatgggggttctggagagcggggtgtggggtaagtcgcggggtgaggggctacctctggctaagagcaaggggcggcccagcggccggggggcgcggggggcgaggccgggaggcccggggcaaggcccagcctggggcgctgaaagccagctcgtaggatcggagaatgaattttgtgactgacagggctggacagagtaaagacggagacctaaatgggcaggctgacccgcaccgcggcctggctcgggggcgcggggggcgaggccaggaggcccggtctggagcgaagcaggctgggcccgggcgactgaggctggattgcggctgtgggccgcgcgaactgacactcggctgggccgggcaggagagtctcggatgtcgaaccggtgggcagcgatggcccggctgccctagggcaggggccgaggttaggaggcccggcctaaggcaaggccaggccaggcccggggccaccgaacctgactgatggccccggggctccagcatctgcctgacacgccacgggggtcgagattccggaggccaagccgatgggcggaggggaggacagcagattggagagcgagggaatggggcagggggagaggccgaacgaaagggtcggggcgccgcggcctgtctgacggcccagggctgacgggagcgaaccgacaaccggggtctcgggtgccaaactgactaagcgaccgagcgaccgtgcgacccgcaggacagggagcgccggaggccactcggatcggctcgagcggcgaggagggaccggagagcgagtggaggggggcccggagcggcttaaacaagcgagggaggctcgaatgacggacaggcgggaagggccaaggaggccccaagcggggcgacggcccggggatcccggactgccgggctgccgtggcagggggcgcggcgccgccaagaggccttgggctgaatgggagtgaacgggggccccaggcctgaaggcggccgggaccaaagggccgggcctggatggagggcggcctggggcgccgggatga

SEQ ID NO: 4773 - DNA, 6000 bp, Homo sapiens
caagtcattctgcctctctaggcctcaatttccttatctataaaatgagaagaaaactatctatttttgggttatcatgaagattaaatgagataaggtatgtaatgtttacaattaggagtctggtatgtggtaggtgtgcttcaaaaaatgtgatttacaccaggcatggtggttggtgtctgcaatcccagctattcagtaggccaaagttggaggatcgactgaagccaggagttcgagaccaacctgggcaaaacagcaagaccccatctcctaaaaaaatgtacaaattagccaggcagacgggtgtagttgctcacatctgtaatctcagcactttgggaggccgaggcatgcagatcacttgaggtcaggagtttgagaccagtgtggccaacatggcaaaactctacctctactaaaatataaaaaggataaaatataaaaattagccgggtgtggtggtgtgcgcctgtaattccagctactcaggaggctgcggcaggacaatcgcttgaacctgggaggcagagtttgcagtgagccgagattgtgccactgcactccagcctagatgatggagtgacactgtcttaaaaaaaaaaaaaattagccaggcatactagctcatgcctggaggctgaagcaagaggacagcttgagcccaggagtttgaggctgcaggcagctatgatggcaccatcgcactccagcctgggtgacaagaccccatctcttttttttaaagaagtgatttttccctattctgatggtgctaaatcaattacttatttaattctaatgatcttatataaaatgttgacctgaaatagtcagctgtcccagcaaagcatcatctggggtaaaaaaaaaaaaaaaccatgtagatcagctttctgtcaagtacaacttccactgctataattatgcaatcatcaaccatcactgcaagacaacaaaaaccccaaagctgatgttactgaaattgctaaatacaataattactagggtctcaaaatcatgaccaccaattcctttaggaaagcaacagaaatctttgtaattataagggaaaaaggctgattagttatcccagatggtggtctctacagcagaaggtttttggtcactggccagaatggcagcatacacagaaatctttctcatattgctgttttctcacactcatactatgaaagcacaatatcaacaaaagaacttgaaagaaagaaagaaagaaagaaagaaagaaagggcattctcctttgaaatttagccttcttggcactgattcctggcaagaggctttaccctggtgaaataatctctaggaggaaagcatagtctaaaaaatctatcaacatagcccctctctatggaaaaagtaaggaacgcatttttcccataagtgtagattcctttaggaaaggaaaggaagctcaagaccagcctgggcaaatagcaagactaagcacccatgctgagtgctgtgctacatgctttaattatactatccctcaaatcaaaccatgaggtagataataacccttcctcaaagataataggtaatttgctcaaggttttatagtcattaagtggaaatacccagttgacttttatcaagtcttaaaacggttgtgccaattctcccttatgaaaaagaatccaatttaaactctggttccaaaacaaaacaaataaataaacccaacagacctcagtcaccaaaaggatgaccatttctgtcaattagcagattgttttttctgcctcctaatagtccttaaaatgaactgagggactcacataaaatgcccttttctaaaaaaaaaaatcttaaatctataaagaaaatagtacctgttgacaaccacagaacgctgaagcaaaagcaagtataaaacaggtacaggcttctcaaccacttcgcagatgtctgccaataatatcctgataaaatccaggaagcaggatttggcttgactcccagcctcttctccatggccctccagacaggcagaaccagtacactagaaggacagaaagagaagaaattacatgccgagtaattaataattaattcctggaaatgtggaatgctagaaaatatgacagattaggggaaagaaaaatttcaagtttgtctttaacggctcaaccctgcctataaattttaaacctgggctttgaggtagcctataattatcagaataacaacacagcaagggatatcaaatgaatccactgaaaactgaaactttatattcctttttttttttttaatctaacagtaaatcacctatgtggtagaatggaaagagtaccagcccgcagacaagaagatctctgagttttagttgcagttctgctactaacagctttgtgactttgaccaaacacactttcttacttttgaggagaagaggttgcaccctcagaggtaaagtaacctgagggttatgtctggcccagtattttttaaatttctgaatgcaaatgtctttaggcagggcatgcactctccagtctgctactgtctccgcccaccactattatcatgaaaatctattcaatttacacctcaatgctacccaccccaatccctgcattcaacagatacttacgtcaggcactatgctggctactccagaatctaggggctggattatttaggtctcttccagcagaaaaactcatttaccataaatttctcccctcatataaaactttgctatattgtctaaattagtacgtaaatattggcaacattatgagggttgactgagttctgaagaagcaattcaaaaacttctgtccaactatgtacctgtcatctacatccagcaaacgacacaggctgccaacccctaactcctatccacggccagcatacagggagatcagcattgcctgggctggataccaatactgactaataccaagaaacagccacagacatacacacagctgcaaaactaaggtgcagcccacccaagaaaaggcttttgcagaaccacatgcatctgaaggacttcatcgttctcattcacttccatccattcctatttctagttgttttgtagttgtatttcagggagcagggggcagaaaggaggtgtgtgggccagagacatgttcaagagattatgaaatggagcctaagttagaaagtacatccagcaatttctctagcctcccaagagggaacgagtgagtatgcatgtgtgcatgtatgggtgtgtatgaatcttacccaacacatttctgcctaccacaaaaggatttaaaactcaaggtgactcaacagctgtcatcaatagcctgacaggtgggtgggagaagcagaaaagaaatgaatagcttttgaaaaatggagtaataaacaccactggactaacaagctgattagaagtgccatgtctaataaatcttgcgtctaagagaaaggcagagttaatttcatttgaactcctaaccagtcattcctctgaaacctataattgcctaagggcacaaatcactgctagggtccagttaaaggcttgctgaccaaacgcaagaacaacaacacatcaccaagatccgaatagtttgttactgaatcaaagggtaacaacccagggagagaacacacacccccacaatacttgacaaatgaaaatctagagaagctcacaatagttctggcatttagggcgttacaagtacacccaaaataaaagcactctctgttgcagcagctgttcagacagagcagggggtaatgtttacttaatacttcaggttgatgggggatgtatcacagttcagtctgtcaactacatacgtggaactccatttatgtacacagcgataagatatgtttgaacaacgatggagcacgtctgaaacaatctattcagttggtatgagtaatcgagaataaagctcttttttaaaaagtctcagatatttgggaaagttacagaacagactgccatgaatagctttgcttatatttgcagacactgttttccaaatagctggaaaaatgaacagattgttctgggaggtcgtctttccaatttgttcctagttttcagtctgttaatcacaggagagagcacaaggagagtcagctaatgctcttcactaactgcaactactgtcagttggacacaaccactatgagaccagaagccaaagagttcctggaatcccgccagaggttatcaattttgacttccttcatttcacctttgtgctcactgcagccactacaggaccctctgtggggcataattttcaaaatcgtggatgaggcaggtttcacattataatggacacatcgtgctcaaccccatcccctcttcattctgcaccaactttctatctcggtggagagaccaaacatcagagacagcaactaaagactaggctgcagaggtcgaaggtggaagaaggacggcagcgccccgaaccccggctgtctgcctggctctcaggggatggagggagctgcatgactaggcccaggcccgagagaagcggggttcagcctgggacccaagctgcgcacctgcaaggacagaagcagctggctgccctggccgagccaggggcgccacctccggacccaacatccggccagcgcagccgctgacatcgcccgtcccgcttgcccctcccctgagcccatggtcctcggcctggcagccagccgcccccggccacctaccggggctcagggccacatagcggggccccggctctcggcggcctccgcctcctcctggtccatgggctcggggacccccaaccttcgctcccctcacccggaggaggaggaggaagaggaagaaggtagtgcgggctccccacccggacagctacctctcgcctcagcctccctggacagcgacggcggccggaaacaccgcctcctcccacctccccgggaccgacccggaaacacactctccatgctaaccaagccctcccgcccctcccccgggaagggcaatgccggccgcgagaccaagggggaggaggggcagtgctgggcgggtaaaactacgcacaagcgaaggaatctgggcccccagcctctcgccgcccgctctccagaggcagtctgcaccttgcctccttcgctcgagccccagcccccagactcgggcaatacccacaagcaagatggcggcaacggcggcaccccctactgcttagcaccctgacttgccattggccagagcccggagtgaagcagccgcggattcgtcaagagcggtgcgggggtgggggtggagctgcagcagcctggagccaggagtgggcaacgcggcgtgagcagcggcccgaggctcccggagcatcgcgctgggagaagacttcgccgctcggggccgcagcctggtgagctcagcccccttcgggccctcccctgcatcccagccggggcctctccgagccggcgctgatcgatgccgacacaccccggggaccctatcgcgactccatcgcgccatatcgcgacaccatcgtgccctgtcgagactccattttgtcacagcccttttcaatatatatcttttttttttttaatttgccctgtcatctttgggggctgtctcccatgtcgtgattttgacgtgatctctccgtgacatcaccgcgccatcgtgaagtgtgatctcatcgccgccctgtcgtgacttcatcaatgtcgtgttgtgacctggctgcggcgggacaggtggtgaccgccaggaaccctcctccccttctcatctccccatctcagcagccctgcttcgattatccggcttttggattctccgttgtcctgggaactatccgggaccccctcttgcttctccagcccctgccggcatccacaggctggtagcgggacggggagggcgagaagagggagcgcaaggggttaattctgctgctgccgccgccgctgctgctgctgctgcagcctctacccgagggagggaaaggagaggaggc

SEQ ID NO: 4774 - DNA, 6000 bp, Homo sapiens
ataggacttcccttgagtctgttgacaaatacaaagctgtccacacatactacaaaatttcacaaggcatggcaaagaatgactaaggtttcatgagctgtaaaatcaaaatcccctgaactcacacagagtaggaaaatttttgaattctgaataattagaatggggagtcttagtggaatagccagggcattcaataataactccaagatcataatgacttgtaatatgatgacatagcctcaaaatagactattttacacctaccctaataaagcttcaaaacaagccttgtaaagctcaatctgatccttaaataatttaacagcatgccataacaaagtccaacactttaaaataagaaaacaaaatcttgagcttaacaacacaaaattcataatgtttagcatcaaatctcaaattgctagacattacaaccaaccagaaaaccattaacaaaatggcagcaataagtcttaacctaccaataataactttgaatgtaagtagatccaatttcccatttaaaacatatagactggcttagtggattaaaaaaaaaaaaaactacccaacaatatgtttcctagaagggatttgcttcaccttaaaggacacttatagactgaaagtaaagggatgaaaaaagatattccatgcaaatggaaatcacaggacagcataagtagctatacttattttggccaaaatagaccttaggtaacaaaaaaactatgaagagagacaaagaaggtcattatagagtgataaagggattgattcaccttaaggatataacaattgtaaatatatatgcacccaacattggagcaactaaatgtgtaaagcaaacattaatagatttaaaaggagacacagactgcaacacaatagtagtggaagatttcaataacccactttcaacaatagccataccatccagacataaaacaataataaggaaacactggacttgaactacactttagaccaaatagacctagcagaaatatatagaacattccccccaacagcaacgaaatacatattattttcaaatacatatagaaaattctccagaatagattatatgccaggccacaaaagaagtcttaataaatttaagaagattgaaattataacaattatctttttggctacaacagaataaaactagaaagcaataacagaataaattatggaaaattaacaaatatgtggaaattaaaccttatgctctggaataactattgggtcaaagaagaaattaagaagaaaatttaaaaatatcttgaggcggccgggcgcggtggctcacgcctgtaatcccagcactttgggaggccgaggcgggcggatcacgaggtcaggagatcgagaccatcctggctaacacggtgaaaccccgtctctactaaaaatacaaaaaaaaattagctgggcgtggtagcgggcgcctgtagtcccagctacttgggaggctgaggcaggagaatggcgtgaacccgggaggcggagcttgcagtgagccaagacagcgccactgcagtccagcctgggtgaaagagcgagactccgtctcaaaaaaaaaaaataaaataaaaataaaaataaaaatatcttgaggcaaatgaaaatggcaacataacataccaaaatgtgtaggatgcagcaaaacagagttctaagaaggaggtttaaaggaataaattcctgcatccaaaaagaagaaagatctcaaataaacaacctaacactacacctcaaggaaactggaaaaagaagaacaaaataagcccaaagttagcagaaggaaagaataacaaaaatcagagtaacacctagaaaaacaatagataaggtcaactaaactaagagttggttttttggaaagctaaacaaaattgacaaacccttagctatactaagcaaaaaaaaaaaaacaaaaacaaaaaaaaaagagcaagaaagaagactcaaataaataaaataaaaaatgaaacaggaggccgggcgtggtggttcacacctggaatcccagcactttgggaggcagaggcaggcggatcacttgagggcaagagtttgagaccagcctggccaacatggaaaaacctggtctctactaataatacaaaaattagctgggcgtggtggcaggtgtctgtaattccagctactcagaaggctgaggcaggagaatcacttgaacctgggaggcagaagttatagtgagctgagattgtgtcactatgcttcagcctgggcaacagagcaagactccatctaaaaaaaaaaaagaggccgagcacggtggctcacgcctgtaatccaagcactttgggaggccaaggcgggtggatcacctgaggtcaggagttcaagaaccagcctgtccaacatggtgaaaccccaactctactgaaaatacaaaaattagctgggtgaggaggcgggtgtatgtaatcccagctacttggggaggctgaggcaggataatcgcttgaacctgggaggcagagtttgcagtgagccgagatcacactattgcactccagcctgggcaaaagagtgagactcagtttcaccaaaaaaaagaggagcaattacaactgataagacagaaatacaaaggatcacaagagactgctatgaacaactatacgacaagaaattagatgacctagaagaaataaattcctagaaactcgtaacccaataagacttgaattatgaagaaatcagaaatctgaatagaccaataacaagtaagatattgaacaagtattaaatgtctcttcaaaaaaaaaaaaaagaaaaaaaaacccaggaccgtatggctttgcagctgaattctttaccaaacattaaagaagatctaataccaatcctccattccatcatctggagaatagtaagaaatgcgaattcctgaatttatccctgaaccaaagaattagaaactccagacccaatgatttttaaaaagccttccaggtggttctgatgcccacttaagttgagagtccctgataaaggagcatatttcataaccttggagaaagagtaaataatttactcaagtaaataacaattaccataaagaaacatgtcaataaactatatcccattaagaagaaaatctttttatcaaaatatagctttaagagagtaaaaggaaaactacagattggtaaagaaaaaatatgtacatagatatataatcacaatacatgtatccaacaaagaactagtacccacaaaatataaagaacttcaaataaagaaaacatagacaccccccaccccaaaaaaaaaaacccaaaaacctaaacaggcatttcacaaaagaatatatccaaatggtttaactgcatatgaaaacatgttaagttccattcatcaacagggaaatatgaactaaaacaacaattagatacactacactcccatcagagtggcaaaagttaagagttagtaacaccaaatattggcaaggatgcagaaaagatggaaggcaaaactggtgtaaccattatgaaaaactgttctccagtatctattaaatgtaagcaatatttctaacctatcaccaagcaattttatttctatgtttattcacaaaagacatgagtgtttatgttcacaaaaagacgtgtacaaaagtatttaaagcaacattattaaaaatagctaaaatctggaaacaattcaaatgactaccccaagtacaatggataaattgtggtacattttacacaatggaatactacaccacaatgaaaaagagtgaactactgctacatgccacaacatggataaatctcacagaaataatgttgaatgaaagaaagcaagctggggcaacatggtgaaaccccatctctacaaaaaatacaaaaattagccaggtatggtggcacccacctgtaatcccagctactcgggaggttgaggctaaagtgagccaagatcacaccactgcacagagcgagaccctgtctcaaaaaaaaagaaaagaaaaaagaaattacgaaggcaaacaaaaaatagtactggccaagattccagtaatgtgaagttcaaaaatagaactaatagattattagttctcttttaaagagcgttgaatgggaaaaggagccatgaaggagagttctgggtgctgaaaatgttctttatcagggtagtaggttatgcttgggtttcttacaggaagccgactctaaaacaggaaaggagagaaagccaaagtaaactatattaacgtggggagctttataaatgactttactttggggcatgttatcagatactaaggctaatatattggaaagaataaaacaagaaaggagagaaagtcaatagagtggtactatcaagctggtcgccactatggaaaactggatctgacctcgccggaatcctctgatgagcaatgaagatcttgcctcagaattgtccacctgaggggtatgaaaggaacacaaagccctgactcccatcccctaatagtcacggattgcccattgggtcttaattcccccacactttcagttttgagcattcataaatgctaagtagcttctcacaggtgtcccaaccacattgtgaataaagacttagtgcaaaaaagcagcggatatgcagtgagctgagctgaggttctgtaaccaagagcctcaccaagggctggaggaaaacaaatgggctgaggtgtaaggcacggtacaagagatgtctgctactgctatgttttaaggtcaaatgaagaatatatagacacaacataaaaaatcaaatttttttccataggaaaacttcaatattccacagcctgttcaataactgtttaactttcagtgccacctagtggtgacattcacaagcatcatgttacagctctttaacggtttcaagggaaaatcctcataatattgtatgtggttcaacgtcactccattatgagttgaaaatcccgtgcctgatgtagaacactcacctgcagtaacagctgttcatctgttgggacccttatcttaactcaccactttcagaagagcagacaaactcaatttggtacttgtaagtaaactatattgatgtggggagctttgtagataagacctcactgtatatggagaattttagctgcctctgggctacttcccccgtattttatctcaaagttaccgtcattgttaaatgagatctccatattgcatctgtaatctaaaaatcctaatttctctagcctcctggagtcagtgtttacttaaatctccaaattaaagtataccaaatgaattccattaagccaagttaattattataaaaccaaagttaaataatgtttttctcattttatctttgttgtattaaaagtatattcattagcatcaagtctttttcatatgaaaaaaatattcatggtgaaaaaaaactaattggtgaatcaaatatgaatttcacctatacaaagggtttgcatttgtgagttttcttttgtacccattatttcttaaaaattcaatttttctagatttccaaattgatttcaatgtttctatatgacattttatccattataatccattataaatcatagtttgtgttggttttgctgctattcatatttatttaaagttttagatagagcaaaggtagcttgttaacacattaatgcatttctaatcaaatttccatgattgtcctttgtcctgaattggattaccatattgctaatttggttctcttaccaactttgcaaattgtatactatttatgcaggctagggactgagtaaaaagcatagaatggaattaaatgttctttgttgtatagacaatgattatgtcacctacaaataaatgtagtagacttattattttccagtttatgactttaacttcttgcctttgcctaattaattcttaactaatgagactgggacatccagtacagtgctgaatagatatgcagagcacagacattcttgcc

SEQ ID NO: 4775 - DNA, 6000 bp, Homo sapiens
cggtcccgggacggactgaggcgacactgagggcggtgcctgaaagtccgggctccaggaggcggggtgcgaggccgccaagcgtcgcgggaagcagatgaagaatgcgtgagctgggactcctgttcccgggcccggggaggcctgggcagccgacatggaccccgctgccagacagcccgcactcacctcgcgagggtctcactacatggtctccgcgcgcttccggcctagagtcgggaattcccgccccctcccatagctcccccctcccccacaggagccgcgtacccacgaccgactgccaatggcagcaccgagtgggcggggacagaccgggagtgacgtcagttaggagcaatcagagatcgggagcgggagcgggcggagcaggcgacctgaggagagtgagcgagagcaagagcggatattaggaaaaggacctcggggctggggccctggggcgcatctgtggaggactgaggggccggagcgggccagtcaacaaaggctttgattatatggatatttttaaaagagggagaccccgcattgtcaagtcttccggcccacatctgaaaacatcttcctggccttgggccaaagtctcatctgtccctcagaaggctctgacacctcgtcagtgcctcttggcgcccaagggaaagcattcccctcttgggaccaacttccttgactgctttccctcaccagcacccacaacaaggaaaaagacaaggcagaattggaaaggggggaaagcaaagagagggtatgtcttgaaaatcatcccttctcgactacttatggcactcagtgcagcctccgccttctccaggtgggtggggacgtggtgggaccggaatgcggggtgctgaagccgcgcccagggaagagcccccagcgcattccaggatatctgcgtaccgcgcctgcgggcgtctggccggttctcccacctgatttccagcccagctcccgccaccctcgccggtcggtttgctgtttgctgttccttgaatgccccaaggtagttgtttcagctcaggactttcaccgtttcctcaacctggattcttgtggcccacaactctgtgccttgagaatcctcttctagcctcaagggacggtaagacaaaagaaaatttaaaaagggggctcagctgttcttttatgcaaaggtgaaaaaagcttcattgcctaaagaagggacagatgggatcttgcttcctacaggaaaattaattttaaaaaagaaaaaaaaaaggggggacagtgtaatgcttctcacaaggctccagaaacgaagcccagtaattccttaagtaaaagaggaatgtgaagacttcttaaggggccgggcgcggtggttcacgcctgtaatccaagcactttggaaggccgaggatgaatcacctgaggacagaagttcaagaccagcctggtcaacatggtgaaaccccgtctctactaaatatacaaaaattagccgggcgtggtggcgggggcctgtaatcccagctactcgggaggccgaggcaggagaatcgcttgaacccgggagccggaaattgcagtgagccgagatcgcgccattgcgctccagcctgggcaacaacagcgaaacttcgtctcaaaaaaaaaaattattcgtaattggtaacattaacaaggaattatgactgggggggtcaggaaacctggattctggtccaagttctacctttatagttgtcaaatatatatatttgtttatttatacacatacatatgtcatatatgattaataattgtatatatttatggtgtacaacatgatgttttgaaatatatgtacattgggccgggcgcggtggctcacgcctgtaatcccagcactttgggaagccgaggcgggcagatgacgaggtcaggagttggagaccagcctgctcaacatggtgaaaccctgtctctactaaaaatacaaaaattagccaggcgtggtggcgcatgcctatgatcccagctactcaggaggctgaggcaggagaatcgcttgaaccggggaggcggaggttgcagtgagccaagatcacacctctgcactccagcctggacgacacagcgagactccgtctcaaaaaaaaagaaaaaagaaaagaaatatatgtacattgcagaatgggtaaatcaagctaattaacatatgcattacttcacatatttatttgtgatgagaacatttaaaatctcttggcaactttatttcttttctttttccttccttccttcctttcttctttcctcctttctttcttgacagagtcttgctgtgttgcccaggctggaatgcagtggcatgctcttggctcactacaacttctgcctcccaggtttcaagcaattctcccgcctcggcctcccgagtagctgggattacaggcgcccgccaccacgcccggctaatttttgtatttttagtagagacgggatttcaccatgttgaccaggctggtcttgaactcctgacctcaggtgatccacccgcttcagcctcccaaagtgctgggactgcaggtgtgagccaccacacccggcccaatagatctcctcaattttaccttaccttgatgtatgattttaggcaagtcagttttcctcaccagagtttgataaatcaggggcaaggaggaagttaaacaagcagatgactgcagagggtccttccagttctaacatcaacggaagctaactacattccccactcaaatcatctctgcacatacagcccgcaggaagccctttgaaatgtatttaaccacctttctcgctctcagaatgatctcaacaagaacagctttgctttccttggagctctgcatcaatctaggaaggctgctttgtctcttcactacttgagcaggatggagagatatgagcgggaaagacagataagaaatctgagaaagccccacaaggtgggttgatagtgtgaagaacatgggctgaagcatccaaatcttggttcagctacttacagggtaaccttgagaaagttacttaaacttgtcagctcggacgggcgtggtggctcacgcctgtaatcccagcacattgggaggccgaggtggacggatcacgaggtcagatcgagaccaccctggctaacacggtgaaaccctgtctctactaaaaatacaaaaaaattagctgggcgcctgtagtcccagctactagggaggctgaggcaggagaatggcgtgaacccgggaggcggagcttgcagtgagccgagatcgagcctctgcactccagcctgggccacagagcaaaagaaaaacaaacaaacaaacttgtcagctccatctgctgtaagaattatatgagtaacatggaaatgcctgactagaccctgttcccgtttttacccttagcccgttcaaatcttcataaggataattagtagcagtttgagttctgggattcacactccaaactactgttttactcacccagctacccttttctgaaatactactgaaaaccatacctgtatcagtttacctccattgttttacttgaagtgaattcctggaccatcagacattagaccaaggcaaaaaaataaaaataatcaatcaaccctgagttttggtattactactttctagtcatggatctgcctcctcataggtaaaatttgcaaaatattacccgccgtgtgtgcctcagaactgttatggattaaggaagagaacaatttttatgaaaacgttttgtaaattatacaagtgtgggacataatgttcccggtaactgtatgcaaacaataagacaacaaacgcaaaaggctttttaacttgttgcagttttcctgccccgtgtccctccgtgaatgagcagcgtgcagcgagcgtgtgcgcacagctgctgttctccattaacgccacactgctcggcttgcggacggggaaacccgccatcgcgctcctgccgcctgccgagcgaggatcaccgctccactggggtcagcgggctgttgactccccgcctgggtgaaaccggagcttccgagtcacgtggcgcgcgaagacaaacctggctgctcagggtttcccggagctttctcccagcttcccggcgattcatattctggcgcttacccctccctttaggctggcggaacccaatccccgcctgacaaataagtcccgccggccggacgcagtggctcgcgcctgtggtcctagctgctcgcggtgctgaggcgggagaatcacctgagcccgggaggtcgggggctgcatggaaccgtgatcgcaccaccgcactccagcctgggcaacagagcgagaccctgtctccaaaaataagaataaagaaaaaaaaaagaaagaactgcggccccattggcctgactctcctgaacagccaaactgtctccgaccagttacggaagaggcggccttgagagggtagtgtgccattggctcgatgtcctgcccctccgaaacctaagtcttcagcttccaatcaggactcagctttgggaagagcgccacgcggtgggcgaggggatgccctagtaaattcgcaggtctcttgactctttccgcctttgtttacaaccctgccatgatctccctcttgcaaaagcgagggctacagaacaggcattcaggagtcctgtgctccagtcacagccttttctgttcttcagctaggagacaccaaaccctcaggaagatttactatagctaagagaaaactgcagcagaaagggcgcggctacctacttcttaaattccgtttgtggaccctcagactcttagtcccctactcccagatacagcggccctaccgtggctcctggcaaggtggcatccacttttgtagtgtaaggctgggggcggggtttggctggcaggtccaggatacgagatcctggaagaaagaaaaggtgtagtgtttggggaggtcaacgggctatgctggcttgacagggctgggctcttcagaacaggtaatgcttggggggggcctctttgtctaaacctgagggatagggctgaaggtgaaatatcgaggggacaggtgagggggcttgctagtgaggaaggagtgggggggcggggataatggaaaagggagcagaggagcccagaaactgtagggggtagtaagcagccatcattccgtttctgcaaccctccgtcccacacgccttcctgcagaagcatggatctcggaatccctgacctgctggacgcgtggctggagcccccagaggatatcttctcgacaggatccgtcctggagctgggactccactgcccccctccagaggttccggtaactaggctacaggaacagggactgcaaggctggaagtccggtggggaccgtggctgtgtgagtgtgacgagtgggagtgggggtggggttgagacacaactctgtgataagaggcttcagctcccacttggagacaggtctgaaaacagaccacccccaaaatagacgtaagttgtataataactgtctccatgcccaagaagtgaaaggactgaaaatgaagcataagtcagggaggacttccaaaattcttccctgcacatatatataaccttttcctactgtagggccttcaagagagtgagcctgaagatttcttgaagcttttcattgatcccaatgaggtgtactgctcagaagcatctcctggcagtgacagtggcatctctgaggacccctgccatccagacagtccccctgcccccagggcaaccagttctcctatgctctatgaggttgtctatgaggcaggggccctggagaggatgcagggggaaactgggccaaatgtaggccttatctccatccagctaggtcagtgttctttgtgggaagggggaaatggcccttcgggactggccctaaccatggggttaagggggtttacccaacctgtgccactacccaggccctgcggctgtcagggtgttcctaagtctcctt

SEQ ID NO: 4776 - DNA, 6000 bp, Homo sapiens
gcactttgggaggctgaagtgagctgatcacctgaagtcgggagttcgagaccagcctgaccaacatggagaaaccctgtctatagtaaaaatacagaattagctgggtgtggtggcacatgcctgtaatcccagctacctgggaggctgaggcaggagaatcgcttgaacctgggaggcggaggttgcagtgagccgaaatcgcgctattgcactccagcctgggaaacaagagtgaaactccatctcaaaaaaagaaaaaagaaaaaccactcttcaggttgtatgcaggatgtaaataatttagtggaaagcaactcatgagatttgcgttgttccagaaacaatctgtactctggcattatgaatggagaggagaaaaataaatattatgaagaaaataccttgcttgagtgataattttatatgaagtataaatgaggagtgagttaaaataactcatgggttttaaacatggatgtctgggaaaatggttgaccaaagtgggaactatgggaggccagagtggtttaggacagaagttattaatttggtaatggccaagctgagtttatggtgacagccctatgagggtgtcctaaaggtcactgaactagatcagggctagagttctaagtgcaaagtcacagatatgaaagtaaatgagctcaacagagccagtacacacaagctcagaaggccagtgactgtgcctgtagtgagtgggaggaagagaaattaatgaatggaatggagaaggatttgactggagaagtaggcagatagccaagtttgtattatagagtctagaagagaaagtttaatataatccatcaaaagctaccaagaggccaaggaggaggaggtcacttgtaactctcaagaaagtagttttaactgagtgcttggagaaaagctagatttttgtggagttaaagagtgagtacattatgaggaaagggaggtgagtacagaccaaccatctaaaaaatctggtaatgaaaaagagaagcaacggctggaaaggggaataggaccaaagagcagcctgcatatagttgagcacagatgaaagaagccagtaagaatggaagtgaaagattgacaataagggcagttaattctttttgaagtatacagtaggctgggcgcagtggctcacgcctgtaatcccagcactttgggagctgaggtgggcggatcacctgaggtcaggagtttgagaccagcctggccaacatggcaaaactgtgtctctactaaaaatacaaaaattagccaggcatggtggcgggtgcctgtaatctcagctacttgggaggcaggcaggagaactgtttgaaccctggaggtagaggttacagcgagctgagattgcaccactgcattccagcctggtggatataaaaataataataaataaacaaacaaataaataaaatatagagtagactctctttagattgtaaattccttgaggacaggaatcttgtcttattcatatttatgtccctttctatagcacctagcacagtgactagtatagtataatgcacataatagataaaaaatagaaacaattgaattgaattggcctccctggtatggtcagggatagctgaaaggcacagaaggactccttacagtgatggggaaggatggatctttctctaagcccaaaggaaaggaagacagaggttgttgtaaagaggtggcagtctttctggagggggacagagaagtggtaggaggaatgacaccagcctactgtgtggggatgtcggtattttagcagagtccagatctgaacgatgccgtgtccagtttgcgaagtcctattcccctcctcctgtcgtgtgcctttgttcaggtggggatgtatttcatgtagaaggtaagagtgcagccactggctttgggggagtctgtgaaataatattttttaacttcccacactaaaccgaagtaattcttaccagtatctctagttagtgtttccagcctggtcaattatcagccactgaaggaagagatttaggctcatccctataatcccagcactttgggatggtgacgtgggaggatcgcttgagcccaggagttccagaccaggctgagcaacatagtttaagtccaggctgagcaacagaccttgtctctacaaaaaaattaaaaataaataaataagaactcctctacaagacgttaaaaaaattaaaaataaaaattagttgggtgtggtagcacaggcctgcagtcccagctattgggggggatggggtggaaggatcccttaagcccaagaattggaggctgcagtgagccatgatctggccactgtactgttgccactgggcaacacagtgagactgtctcaaaaaataacaagtaaaatgaaagaagagggatcacatttagaaaaatcttcttattcagtcttaaagaagtttaggagatgctgaggcagacttttgtgatgagtcattactttttctgaactaagaggacttcaggatctcctagagcagatagatgatggggttgggggaatacttctccaagcttccaaaatgtctgaacaatcaaagctagttccagcctggccacgtttcaagtcatggcgaatgccagagggcaaagtgggtgggtcttacaacctggtagagtcaagaggcaaagttcagaggcagaacggatggcggttctctgatgtatggcagggcggtgggagagaagggaagagaaagccgtattataggaaaagaatttttaaattgggatgctaaataaccattgatcatagagagattcagcaggaggtgaaaggactgtggaggagaggggtacacacacatctttcccaggagctatcacagagcaatcccagctcagaatatctggggagtttccatagagtgtggggggcatgaaggggtttctcgggtctcctgactccttttattttctttctttctctgcttttttaggtggaagaaggctgctatgactctttggatgggagtctggcaagaggaaattggaagataaaataaataataagtgaaataatctggttaccatctactccttcatgagtctgttctaaagtcacaactaaagagagcgccaggatttagaggcagcaagcgtagattggaaggggaggtgggtgacaattgaattagagggcattatggactgaataaacctgcagtttggagaagactggagaagggcacccacagacaacaggtttattcacagtccatattggtaattctcttgttttattttattaagtatggtgttgaaacagtgtgcttggggaaacgaggttgaggttttagaatctttttttctttttataagaataagcacattgttaaaacataaggtaaaatatcaaaaactacttagaatagacttaaaatattcacacctacccacccctacccacacctctgtccaacaatgtgccttttgcagttggtaattatggcagggacaaactcacttaaatttttttttaattcgctatcctcgggaccctaattagaattgggctgcccccttgcggtctctccgacgtcctatcttcaaccagctcacagtccttgggccctgctctcctctccattgtactctcaaaatgcaaggcgcaacgacaatagtaacgtcccagttacttctgagactctctaaactctggacttgcctccctcccctccttcaaagtctttcgaatcttctccagcggacaaatgaagggactgaagctggacaaaaccataacctaggagatcagggacctaccccattctgttccccgtgcttggaatcagataatttaggacgccgggcccgagaagcctggataaaaaagtcaggaaaaactgagtttcgttttgacctctagcgtcgtggcgggctggcatctgagctggtaacgtgcgtggtaggttatgtaagaaaagggatggaggagccgccccagcgggagccagaaaggacgcggtgttctcggttgcaatccccaccctcctcacccagcagggcaggaggcacccaacttggaggagaaaggggtgggggaggtgaaacagagaccggagagtcacgagggctgggccgccgagagcaggagaatataccgtgtcacacacctccattctctcacacacgttgcagacacaaatcactgacggtttccacgtgctgcgctcgtgagcggaggtgttcaaagagggggcagatgagttacttcccgagacggaaccgggggtcccacgtccgccgccttcagtagcacaaccaatctctgaacactcaaaccgcgcatctctggcgcatcaccatcctatttaaggccacgggctccgcccttttcctcccctcccttcttttccactctttttccatcctcctccttttctcatcaccgggtcctctccagcagccgcatgtaggggaggagcacggaatgcttcccttacagccaatcatcacctggctgcctctctactggctgagcccctttgtactgtagcaaatgggctatggacttcagtaactagagtcacgtgttaccggcgacacaaccaatgagggcgcgagatctgtgtaagcagggggaggcacgtgccgggccgcacgtgtctgggagggggggaaggggcggggcccactgagagaggcggaggtgggtagatagacccggagagacggcgaaggagctggaaaccgagccagggctgagccggctgacaacaggtaaggagattcggaggacaaagcgagctgttagggagtatttgggagtggatttgggggctgaatgcagatcttggtattgggagggtttgcatcacgtggcaggtgcgagcccagagagaccggcgcagggatcctgatcttgaaagattgggagagggcaggaggccagtctctatgggggcggttcccgtaggatcaccaggtgggttcgcgtgcccagattgactgcttgtgggtggcatggcctcaggtggagaggcttgctgcggactcaggctggcgaatagccctggcgaacaacgggcggaggggaaggtgtctttcaagtcggtatttactctgaactgagggaagaaaagaacggaggccgcgtcagaccgagagctgctctgcggcggccagagagggaatcccaagctcttaatgggcgggggtgggggtagaaatgtctttttctattgtgtttgagaccggtaatattggggagggggagaacaagtattatcccacgcagtacaccccaatctcccagttcatttcctaatccttaaactctggtttcaaactccctcgctttgctcttcagttgcaggttccgatctttgggtactccaggagctgttctatagcccctgcttctggacctatggattctccatctagcgtttcttcctattcctcctactctctctcttcgtcttttcccacctccccagtgaacagtgactttggcttcccctctgatagtgagagggaggacaagggggcccatgggcccaggccagacactgttgggcagaggggaggttcacggcccagcccgggtcctatccgctgcaggcatcgatcgaaggtttccggtaaccagcatacaccatctcatccgaaacagcggggttcggcttctcctatggcaggatctggggcgaaaagatcaagagatggtgaactggagaccagtctaaacacccaaggttgtaccacagagggagacctgctgtttgcccagaaggtaagagaaagcaggtgaaaggagattctcctggagtgccttagcacccagctggttgataaggaccctgtgaggacagtattgactcccagatttggaggtgaaggaagagccactgctggtgtgggcagttttttgtcttcttacagcctttgtcctattttcctacagtgtaaagaactccaaggatttatacctcctctcacagacctact

SEQ ID NO: 4777 - DNA, 6000 bp, Homo sapiens
ctgggcgtggtggcacgtacctgcaatccccgctacttgggaggctgaggcaggagtgagccgaaatcgtgccactgcactccagcctgggtgacagcaaggctcatctcaaaaaaataaataaataaataaataaataaaaataaaaaaaatttaaaaaagacataggatagataaaggattactaattctaatatttaaaaaaaaaagtaaaccacccaatagaaaaatagaaaaaagtaacaaataaaagggcaataaacatgtaaagatgttcaacctacctagaaattagaaggtaaattaattgaatatatcatttcacagcttcacactggcaaaaattaaaagctgattatcttctagtgctaatgaatgtgtgctggcagtgtagattactacatcttttgaaaaacaaaaaaatgttgaaaagtagatttttaaatctgttaaattataaaatatgtatattctttgtcccagcaatctcacatacagaattcatcctagcacaaaatgacatcaacatgagttaaacggacacataaggatgtttcctataattgtttataataccaagaaagaaaagaaacactcaaaaaaattatatatatatgtatatatacacacgcacacacacgacagatgggggacaaactgaatgtccgttactagaataatggcttaataatttatgatacatgcatactttggaatattatacagctattattaatagaatgagtaagtcacatctatatgtactgacctggaaagatgtgtataacattcaaggcaaaaaaagcaagccgcattgtaatatgtggactacaatgccatatttgttttttaaaaaataaaaataaaaagctgtattactgaatttttttttttaggaattcctaattagtgaatttcccaagtagtcaatgagtacacctcagttttgaatacatctattgctctattagaagtctcaccatcaaaatactgtactctcaaatcaaggtatattaaagccactatcagacaatactatcctttggaatcttctacaatgaaaatgataataactacttttaaggacaaaatgtttaataggttttttatgccaaaataaaaatgcttttttaacattgtgattttgcacgtatggaaaacagctagatttttctttcctatagtaaaaataagctatctaattcagttgtttcattgggtaacataattatgttcattacatgaatctaaacaaggggcagacgttacattaaaccaattcctttgtatcagaaattcaattttctctgaatgatattcattcttagcaataaatgcaattaaacactgatattacaattttaaaactctattcaaatacctaaatctcagcgtaatgtcaatataaagtcttaagcagccggacataattaaaggagcacttgatttggaatcatacatacctgggttgcaatcctggctctgccacttaaatgcgatgtggtcttgggcaagttatataacctctctaagcctgttcctgcatctgcaaaaatggctttctgttgttctttggtttttttttttttgagactgagtctcactctattgcccaggctggagtgcagtggtgtgatcttggcttactgcaatctctgcctcccaggttcaagcggttctcatgccttagcctcctgagtaggtgggattacaggcgcccgccaccccgcccgactaatttttgtatttttagtagagatagggtttcaccatgttggcgaggctggtctcgaactcctgacctcaaatgatccgccggcctcggcctcccaaagtgctgggattacaggcgtgagccaccgtgtctggtcaaaaatggctttaaatggtgttcttactttaaacacgagtatctacgatgaaaagtgcctagtacagaatatggttgtcaaaatatggtttcctctgctaggcatggtaacacccacctgtactcccaggtatacccatctgtagtcccaggaggattttgatgcatatttactactttttatgaaattttctttcttgtatcacaagaaagcactttatattttaactgtggcattatacatcttcagataactttcttttaaaaatcattcagattgtgtctatggaagcaattttcaagtatatggggaaagaaatgttaggaaaggaggaaaatcaaaaatttaagtcattctaacccactgtaacgtgtctaagaaatcaactccagacaattccaaatagtaacaaaacaaaaaataagtacaaattttaattttaatataactttccacttcaagaggagtctttttttctgtagagctggatcattaataacgccagaatatgaccctgaatgtcgctaaatggatccaaaagaaaagaaaaaccagactggataaccttcaatatttaaagtggacatttttttccaccacacaagatacatattaataaaggaattcgtaaataaactgagtatctcttcaaattttactctagaattgagggctggaagtaactctagttttcctccaactttagttgcacttcactcagatttacttgatggtttttctttcaaggctctttaaaatgtcaaggcttttgcaaagccttgtaccaaaatagctactatacataatattacaattattttctggtacatttttcctaaaaattaatcatccactcacagtaacatctatttcttagtctaaattacactgctgagggttttttgtttttgtttttgctggcttctcaaaaggtatttaaaatgattttgaggtgagagtatgcaaaaaacacttcacattacttttccatattcaaattacatcctcttgagctgatttttaagtgccatgtacatttttaaatcaaaatttatcactgtcattcttttaactctcgctctccatgctgagctcttccaaatgccaaagtgccctattaatccgaaagtacctattatctgtgcttttttctggcctgtctttcacaacttcacaccaactttttgtactttagaccccctcatccattaaagcacctgttaaccctttaaggtatttaaccatatggttagctttccgcataatcctacttttcctttaacaaacacaaacttcactacataattccccttcagcgttccctcctcttcgaaattcacatcaacactgccgtgaagcaacatacataggcatccctattctcaagccccaattcatcagtttagcgccactaaagaagaatttaaatctccggaccctcatttccgtactccgatgaagctttgcactcgcgttcccgcactacccggccagcctccctcagctggcaattacaaggtcctttgctgcccggagcacaagagtgcaactcgctacagtgttcacatgttgctctccgtcatcccagcatctcctcccatttctgcgcacctatcccttcatgagcccccaaaagaattcgtatccagatgcccatagctcaaattagaatacccctcatctgacattgccagggcttcctgtacgacttccaagagaacacgcgatgctaagcgcttctgtctccggagaccagcaacacacgctccccactgagttcggtcttctctctcgctctctctccgcggaatgcctacttcggggctaccctttggctagggaagcccaaccttgcaacctctgccccgtgacctcgcgagcccagcacgccgctcaagcttaattcaacccattcttggagctcgtgctctcgctgccccttgttcccggttctctttgaaaccgctttcagcccccgagccagaccccaggttagatgaacgcccacttgctccggcggcagcgcctcctcggccccttccacagcactcagcccggggcagttcagttcctcacctagcttcgagcgggactcctccagtttctggatctggttttccaagaagagcatcgccaccgcgaaggccaccaccgccagcagctgcaacttgggcggcatcataatcctgaggagccccatgaaacccgctgctcgggatcaagacataccgcggggggcggggagcgggaccccggaggcgagagagacgccgggaggagcccgccgagccgggagcgaggcaaagagagagcgacagcgagagaaccaccgcagcgaccccccttctcgcctctccagtccccctcccccaggcgctatcaccaacgccgctggtgtccgcttctcctcagccgactaaacggccgccccctccaaaagcccgcgcagcaaacagcgcgaagcggctgccgggctctcgcctccctctactgcctcagtccccgacccccgcgcccgcctgcttgcccgcctccctctcttccttccttccctccctcctttgctcgcggccgcgcgcccctccaccggcgctgcggctgcgccgccctcatccccgcccccgcccatccccctccgccaccacgcgcacgcatccgcgtacgctgctcggcaaccagaagccccgcccctccccccgttcgggtccgcttattggacggaagagcccctgcgcttcgctcttggttcggtttacggttggtttcctctgccacagagctcaatcaagacgacattcaattgggtaaacttggagaagaaggcggggctaaaactggcgaaggcgtggcttcttggctgcttgacgaagtgtcgtgaataaaagaaaggagaccgcagaagtaaagaagtggggagtttaggcaagtgcctgatttgggtaatcgaaagcacccagtgattgtatttgatgacttttaagctttcatatgccgttatttaatacctgtcacttccaaatgagagatgtaagggcaacggccgttagcgttctgttttggatcaggctctggagtggacgcccctagcttaggggtccttctaggcagccagaaacctgcggaaaatggtagcgatggcggctgggccgagtgggtgtctggtgccggcgtttgggctacggttgttgttggcgactgtgcttcaagcggtgagtgtagatcaccttcgcagctgccacagggagagtaggagtgattgcagctgagaaagacgcaacattcggtcctggttgaaaagggtggggaggactgcgcttccttaatgactgctgcggccagaatgcaacgtggcttaatttctcggttgatccttctccttccccgccttgggtttctagcagcagttttctcttgatttcagattgtcttgggtacgtagcttctcttatacggctcttgctaaaaacaatctgtaaaccacaccaggtgggaggggggaataataaagcttggcaagaagtggaggttgtttttaaatggacagaaatgcaagagactcatgacgagacttccaactcttagaggcaagtcttcaagtcgttggtccaggcgaacagtttgtgtttacctctctcgcgcgcgtgctctctcattttcactacttctgttagtctcttaacttccgttctcctctgctattcatatacggctggctgcgcttgagtgcgatttgtgcttttaaacaatgttgttggagtaaaaggagttatctataccaaagtataattcatttttgaagttagttttttaaatgatgttcgttgtcttctttaaggcagcgttttttatttcatttttctctattggcagaatagatgggtgacctttgaatgggaaaagtgtacttttaacttatttcttctcatatccatgttctgctgtgtgaatagtaaaattttaggcacagtgctgaaagcttttacgtttttttatcctagcttaattcttcgggtagtctctaataaggagacctggtttaatttacttatccaaggttgagggtgttaagggactacaccggagtcctctatgaacacctgtacttacctttctcaaagagcttgaaagc

SEQ ID NO: 4778 - DNA, 6000 bp, Homo sapiens
gatgccagagataatcatacttgtttagaggtatcgtaattttatttgtggtgtggtttcttgttttgttttgttaatgtgggatgggcctgtaaggtggcctaagacactaccaatttatgagtttggctaagggactggaaaggagaagagtgcctttgcagaaagcaggagctggaacaaacacttatgtttaatattgctcctttacaggtcgccagcaaaagaagagataacactgcatttccctttaccaactagcgctgggagcactggacacttaaatcctcatctgtcctcctttcctgtaaataaaagcccttctatccattttgcctgcctccttccttgggctttggggtgagaatcttggcgctaacccccaagggttactgccagttcaccaggggattatttatactctggggatcagcaggcagggaggttcaggttactaggaggaggtgggggtgttccctcccttggtgttccccataaccctgccaatgccttttgactcttctactttcacagggaacttagccacagccctgtttccagatgtggccaggtccccctagtgcctacctgcagtccttatgtgatttgaagggggaaaggactttgagtggtagtggagaagcaggcagacaacatgaagggcaaagacctctttttgacagtcttattaatagggcaccaggctgatgcagctgacgcttggcatggctttggtaggaggtgggggaggggttagaagtatggatagccgtggctgggtgcggtggctcatgcctgtaatcccagcactttgggaggccgaggtgggcggatcacgaggtcaggagatcgagaccatcctggctaacacagtgaaaccccgtctctactaaaaatacaaaaaattagctgggcatggtggcgggcgcctgtagtcccagctactcaggaggctgaggcaggagaaaggcgtgaacctgggaggcagagcttgcagtgagccgagatcgtgccactgcactccagcctgggcgatagagcgagactctgcctcaaaaaaaaaaaaaaaaaaaaaaggagtgtggagagctgtgtaccttgcaggcaaggagtagttggaatgagaatgaacagatctgaaatcctgagatccaacaaggaaccagacttaaggaaagttaagttctcagcacccattgtaatttatttgtgaatgaatgggaaaagggtatcagtccaaggggagatcaggtggttcctcctcatcagagtcaaactcaacattttcatcttttacccatcgacctcgtccatctgggatccatccagagctggaaacatcagagaaaatagcatcgatcaggaaagaggcttattaagaagttagtggtgagctcacaccagtaatcccagcactctgggaggccgaggcaggtggatcacttgaggtcaggagttcgagaccagcctgaccaacatagtgaaaccctgtctctaccaaaaaaaaaaaaaaaaaaaaaaaaaaagttagcagtgagaaaaaattgagagccatgtaagttgggtggctaaaacaaaacgaaaccaaagatggaaaacaacaatgggagtccgggtgcggtggctcacacctgtaatcccaacactttaggaaactgaggcaggtggatcacctgaggtcaggagttcgaggccagcctgaccaacatggagaaaccccgtctctactaaaaatacaaaattagccgggcgtgatggcacatgcctgtaatcccagctactcgggagcctgaggcaggagaatcgcttgaacccaggaggtggaggttacagtgagccgagagcgtgccattgcactccagctggggcaacaagagtgaaactccatctcaaaaaaaaaaaaaggaaaaacaatagctttgaaacaagggtgtcagagagaaaagaaaatctgaggaaactgattaggcatactcaccttcgaagggtgagataatggtccagggctcgtcttcttgtggggctcatgggtgcaggggctgagacagttgctgactcctcggcctgtgggccagccgcaggttcaggttccctactgatcttcccactttggagtttgacctctgagggtggcataggggaaagggagacagagggaccaggggcttctggtctaggtagagaagaatagtctgtaaaagcagtaagggaaagggccaactctcctatgactcccaacctcttaaaacagtgcttcttaaactatatttctcaagatattaataagttctgcatacaaaggatttcagaatcatgaatttgggaaaggctagcttaaaattttacaagttttttttaatcttaagactttgtatagtttttaaaactgttattcttcaagtagaattacaaagtgccatttcccaaactttatttaaaaatcacaaaattctccttttctttttctttcttttcttttttttttgagatggagtctcactctgtcacccaggctggagtgaagtggtgtgaccgtggctcactgcaacctctgtctcccggattcaagcaattctcctgcctcagcctcttgagtagctgggattacaggcacacaccacacacccagctaattttttacatttttggtagagacaggatttcaccatgttggccaggctggtcttgaactcctgacctcaagtgatccacccacctcagcctccaaaagtgctgggattacaggcgtgagtcaccgcgcccagccaaaattctccttttcttgaaacactaagtaacatctccagaacactagtattcctcagaatacacactggaaaactcttttagagccatctgtctccttctgagccttcctacctctggctttcccgtcccatacctgtacttccggcggcagcaactgttatagtggggagctctgtgcagagcactctgggtgataagtcgtgtctgagttagcagaggagcctggtaaggagatgggagacagagtcagagccttcagccctccgcccttccagcctggtgtgtgcagcagggtcttgcctagaacacactctccactctctgattacctcagctttggtttcttcccttctcaattcattctgatgttttggattctgctttctttcctttcccggctgcttcttgccatagaaaagctgcaagcctgaggagaaagggaaacagaattaaaagcatagcaccaagagtggtgtgcagagatttcgagggtttattccccatcccgtcttccccctaacttactggacagatgtttcttgcctgcacggtgggcagtcagcatggccagggtgtccagtaccggtcgatgggggcagatggcacaagcaaagctgagcaggggtagagaagaggataagtggtccaggggaagagggttgggcccgtccctgccataggtcccaccctgtcctagcagtctttgcaaaacccaactccctggtgacccaatctccacttcttccagtcctcactggccgccaaagaatcctaggtactcctgctgtcctaattaataacaaaagtttgttgaagccaggcgtggtggcatgcgcttgtaaacccagctaatcgcgacgctgaggaggcaggatcacttgagccctagagttcgagggcagcctgggcagcaccgcgagacctccgtctcaaaggaaaaaaaaaaaaaagtctattgagcctctaaccgcagaaccctcaggcttgagccactccttgctcttaccgtccatcccgaagcatcagcgcctcatcctctggaatgtaactggctaggaggtccccgactcttcttttctgcagggagtaggggaagaaatccggacgggatcagcgggataggagagaggggtggaagtgaaattatagaaatgaggagtgaaatggaataaggaccctggggagaacagcgatcatagaccgaaaaaggagtcactacacagctctaagtcgcctggttctctcctgcacccccgagttgttgccagagcaatgaaacaaagctccttcccaaccttcagggagcgactgaagcggctccagatcctctccgctcacgcttactttgagcacattgagttgactccaatcgtctccttccctcttgaaagacatcacgactgtgagtcccagaagtgataaattctctgttccggtttcgccactcctccaggccaccgtagcaagagcgggacagcgccttctcttttttccttctcttcctgtcggcctccgtacttccggggacgcacttccacgcatgcattgcgcgatccggaaatccactctctggtgctcggagggaactgcatttcctatggtgccctgcgactccgcagacgcggagccttttgggaaatgaagtcttttctcaaagaccttgccgctcaactggatccaggcccttgcatcttggcggatctgaggcgtttggagggacaacaacctagatgtggagccgaaatttgagggtgtgacctatcttatgcggagcggacctttgaggatctctgagtggaaggtgtactacaaattcttgcaatcctcacgctcttcgtctgcggcgacagttcacctggggtgggcctgatttgttcctgactctagcaaacaaaccccgggaccggggagagctgggatgttggagcgccctgaggccaggctacttgggggcaaactgaggaaagagtgttgaggattatttctagagttcaaaggtcagaggtcaatgtagcgaggagttgtgggggagtccaaagtcggaggggtgcttaggggagaattagggagggactgaatactcaagggacagatttgtggataagtagcttggagggaggagaaaccgggagggggcagatggcgtagtgctggggaggcggggacacaggggaagagagagggggaaaggaatcccctgaatattcattcccagacttcaggcctgtcagtcgcagtctcggtcgtacctcccctagttgcaaccttagctgttggcagggtgaagagatggcttccccgtctagacagcccccgccaggggggtcaggactgcttcaagggagccgggctcgttcatatggaagcctggtgcaatcggcctgctccccagtgagggaaagacgcctggagcatcagttggagcccggagacaccctggctggactagcactcaaatatggggtgacggtgagttttccaggattggggtgaagacaacagtcaggagggatttagtcctgagaagaatgtagtggcccttctaggtaacctcccctgaaatgttcctaatgtgttgcactctgttctgcctttatctttgttttcccatcacagtgttgcacaagtcctgccctactattccaacggagaggaacagctcctattttattatgccagacactgtgctgagggcttcacatacgttagctcatttcaccctcacatctgtatcaagtatacatttatcgttcccttttggcagatgaagaaactgagacttggattggttaaccagtttggctaaggtcaaataatgagcgtcagatttgggattcaaacaggtctgtctgactctattaaccacacagaaaattttatgttgagagtgattaaacgtttacagcaactaatggagagctgatttttagttctcagttcctaaagtgcccacctctccttgctcttggttcctcctcaatgctctgccttctttccagtaaggtggcctcctttgtgcaaaacaggtactctacaccaagtatttcaggtcatgcatgggggaaattggatagatgtaaaaatgtacagcattgaagttgatggggttactccccctatccctgcccctgttttcttgttccatctcactcaaacaaatgttgaatttagccaacatttttatgcttgctgtatttaaagcactgtgataacttttctgggagatagaaa

SEQ ID NO: 4779 - DNA, 6000 bp, Homo sapiens
gtctgtctcatgaagggtgtatacctctcttatgttcctcgctgtgcctgggaaacttttacagcaggaatacctgttaaatatgattttattgcctttgaccaaaaggctttttgacccagagccatcaaattaataagtactttttacttgaaatactaagtggcactaagaaatccagctattacctttaacttgaaaaagaatattctgaattagaaaagcaggaaagattatactatccagtagagattattcaacaaatctacctgagaaggggaacttaaaccgtgccaagaacctaaacttctttcttcaactcaaaattcttcagaccttcctctcttccttagatctcctaattccccacaagtgtttcaagagaacctttgatactgcctgtttcctgctgttctgctccagggatgtgtgagaaagtgctataggaggaagtagctctggccactgcttcccactcaccgtgctgtctctccttctgcatcagctagctgttgtggaaagcttggatcccaacaggcattcccatttggaagttgatttgaaagagtattgaatttataagaacatgatatgcattcttttgtagagagatttacctttgaaacagaaataaatgactcaatatggcttagttcttggtatgggggtggtagtggatggagtctgcttccatgaagaggaaaaatatgtggaccagcatcacagtatgtaatacgtttttgaataatctttctgatggggcaaatatcccaaattattactttgttgctcacgtagtaaaagatcatgctaaaccaaacttgcattagagaccattggtgatagagggcgctattttttcccaaagagaaattacttaatgtctattgccgctttaaaaaatgggctactggggaggctgaggcaggagaatggcgtgaacccgggaggcggagcttgcagtgagcccagatcgcgccactgcactccagcctgggtgacagcgagactccgtctcaaaaaaaaaaaaaaaaaaaaaaaaaaatgggctaatgatttctaactctatatgtcgcagagaaacactgtcaggtaaaaacagtaaaacatgaaaaaataatttgaaatcattatgtatttttaatgtttagtattatttatacaaagattttgtgagttctatccatctgcatatctgagcagtattgagcaagctgacatactcttcattctttgttggctctactcatgccaggattcctacttatgttttatgacctatacaaattacttccctctctcagcctcagattcctcacctgtttaatgtggataacctgtcttatacggtgaagcaaggcaatgcacctgccatgcttagcatgtggaagccagtgtttatgatcaaaagcaaattaaggctgggtgcggtggctcacgcctgtaatcccagcactttgggaggctgaggtgggtggatcacctgaggccaggagttcaagaccagcctggccaacatggtgaaaccccgtctctactaaaaatacaaaaattagctgggtgtggtggtgggtgcctgtaatcccagctacttggtagactgagggaggagaatcacttcaatccaggaggctgaggttgcagtgagccaagactgtgccattgcactccagcctgggcaacaagagcgaagttgcatctcaaaaaaaaaaaaaaagcaaattaattttctcaattccaaatatgtgctaaaagtaaagtttgctgtcaattcatttataacccattactgtgtgatagaaagattactgagttagctctagttcatagtaatttgataggcaaattacttaatctctctgggcttcagatagttctttgtctcatttaaaatgaaggagctggattaaatgatctctgaagtaacttccagttctaagatgccatgatgcaggattttttttacaattaattttcaaacaaagttaaaataagaagtattatatgattgacaatttatatttaattaaatatacttcagattaaaattttatcaagcaatgtttaaaatacagaatggtatggaaactgatacaagtacctgtcattcactataagaaatacaacttgaggccaggcgaggtggctcatgcctgtaatcccagctctttgggaggccgaggtgggcggatcatttgaggtcaggagttcaagaccagcctggccaacacagtgaaaccctatctctactaaaaatacaaaaaaaaaaaaaaaaagaaaaaaagaaaaaaattagctgggcatagtggtgcatgcctgtaatcccaactacatgggtgggggctgaggcaggagaattgcttgaaccagggatactgaggttgcagtgagcagagatcatcccactgcattccagcctgggtgacagagtgagaccccgtctcaaaaaaaaaaaaagaaaaagaaataaaacttgattcatttttttaaaatgggtttggaaatgctgtgggtgagatttagttacatttaaaggtgtaaaaacaagattgaaatcactgcctaaaaaaaggaaattactttggatgcccattgtttctggaagaagggtgttttcatgcctatgtggcactgacgttatattaggtggaggccaaagtagagaatgagactctcctttttggaacacttcatataactgaaatggaatgaatattaccttagcaatactatgtgcctaaataaaacatgggttctgaatttgacttgcatctcatttgtaatatgaagcttttcttatcaatccaggcatgccagaaccacctcttgacacagaattgacctgcattcaaattccagttcctttcctttctacatgtgtgaccttgggcaagttatttaaacccccctgtgcctcggtttctgtgtaaaacagggctaaccttagagttgtgtgcatattaaataacacctgtaagactctaagaacaatgcctgacacatagtgaaagggaatgatcattatctattattattcagttccataaataattattggctgtctactctgtagtagtctctgtactagaccctgaaatacctttgggatttcagcctttttgtttgtgttttgtctacaaacaatgtgttatagacttagatatgaaattctgataaattcagcagtccagttagactcaaactaatctagaaaaaaggccgtttggagtcagaggacattttaaattcgggagagaatatgagatgtaaatgaaatagttacttaaggtcttgcctttaagttattgagttactgtgccaggttttagagagtacatttacgatgcatattaaaaccactttgacattcaaagagtcaaacatgcctgattagactttcatgtcctgtatttataaaaaggttagtggtgcatttcttcagtgcaaattatttttggttcttactaatatttatgaatataataaaatctgtacagcataatgtatgtgattaatttgtccatatcatcagtttgcttttatttaaggagatatcccagaagttgctacatcttgaccagtaatttcagcagttagagaataggcaatatctagttaagggcaattgtactttagcactatgggacaaaatgagaaatgcaatcacggcaataatgtattctcttgtagaaatctgtcatggaaatggtataagaagacatgccttttacaagcagtttcgttgttacgctttatggtaattccaagcctggcctatacaacaaacaatcaataatgtttggtctgcaagtcgccttgggtagatatgtccacagggcactaaaagtaggtttaaggtgatgaattcaacagagaatctgaccctttggtctaaggaatctcagatttgactggctttgacactggcttgactggttactttccgagattttggagttagccatgtatataacagctgtcctgcagctctacctatggtgttttcacagatactgaatacttggtcacgaactcctcctatagctcctttatttgcatatcttgcaccgttcagaaactgaacacataggacacaacccttccattacccgatatctgccaagatggagataattaggcaacttttctccaaaactgttgatgtaaaggagaaaagtgactaggccccttcttagcaataggcaaattgagctccagcatttactaagatgggaaccataatacgctggccggaaataactcggaagctcattttgtccatacccagttgtagacagtcaagaatataaaaatgttctggattctcttgtccttagtactcctttctgccttccccatttctacaaggctgatggcttttaaatgttaaaaccctccctaaaggcaccccataagccctattacacaagtcacatacgaacaaaaagcgcctaagatagtcctccatttgggcgcagtcttgccttctgagaaaggggactctgagaattaatgagggcccagatctgggatatctgggacaagacttgggccttcctggtaaaacacgaaaacaaaacaataaacacggcccctcccccctctccaaaaacaaaaacaaaaacttcaaggccatgccgccgcggccatcagtagctccggctcagaatttgaccgttaaaaaaaggaaactaggctgagctagggcacctcagatcccggcagtctggggccggggcgaagttgccggcgtcgcgcggccgggggcgcgggcagggccgggcgcgactctcccggggactttcacctgctcggctggcagcgcgggcagcgcgggggcggacccggcggcgggcggggcctctgagcccggcgggaggagccggcctgggcccgccccacaggaggagccgctcgctggcggctgatccagcgtctccgtgacaggcaccctgctccgccgccaccgccaccgccaccgccaccgtcgccttttcttcttcgtcccgggcggtgcgttccactgctctggggccggcgccgcgcccagtcccgcttcgggccgcaagccccaccgctcccctccccgggcaggggcgccgcgcagcccgctcccgccgccacctcctcccctgccgccctcctagccggcaggaattgcgcgaccacagcgccgctcgcgtcgcccgcatcagctcagcccgctgccgctcggccctcggcaccgctccgggtccggccgccgcgcggccagggctccccctgcccagcgctcccaggccccgccacgcgtcgccgcgcccagctccagtctcccctccccggggtctcgccagccccttcctgcagccgccgcctccgaaggagcgggtccgccgcgggtaaccatgcctagcaaaaccaagtacaaccttgtggacgatgggcacgacctgcggatccccttgcacaacgaggacgccttccagcacggcatctgctttgaggccaaggtgagggggctccggggagggtgctacctgtggtggcggttgggggggcatgtttgagcggatgggatgcacagccgtcctggacccagagctggcgggctaggccgatttgggggcctttctcttagggagggtaactctcccttctgagtctataattccgcgggctcctgcccagaactgctcaagagcaactgcaaagtttgagcggtattgcctcacctcccccttcccacctgcagactcccccatccttacccgcctaggactggattgagttacttcccggatccctcctccagaggagaagccggcaagtgagctcagcctgggcacctggtcgtttagaatcggtttaaggaagctctggtgttatttacctgctgggctcccagggagaggtgctttcaggaaggtcttttaaaagaggaatgcctgcttcctaattgaagaaaagaatccagattttttttttttaaactccaggtaaccgggtctaggtgtcaga

SEQ ID NO: 4780 - DNA, 6000 bp, Homo sapiens
tgaagctggagatataaatataaaaatattccttcccaaagacacctgagatctgaaaacacctcttcctaacaaaaatttaacaaattaaatatcaatgttgctaagtgccaagttgatataccacacttatatctggacagaacaactacagtctctactagttacaaagacttgtgagaaatgttggttttatgttttattataaacatttatactatctcagctttttaaaatatggtagagtttaatttttacagttaagatattgtcttggggtcaggagtggtagctcacacctgtaatcctaacactttgggaggccaagacgggaggattgctcgagctcaagagtttgagaccagcctgggcaacataatgagactgtgtctgtatttaaaaaaaaaaaaaaggccagcatggtggctcacacctgtaatcccagcattttgggaggctgaggtgggcagatcacgaggtcaggagatcgagaccatcttggctaacacggtgaaaccccgtctctactaaaaataataataataatacaaaaaattagccgggtgtggtggtggttgcctgtagtcccagctactcgggaggctgaagcaggagaatggcgtgaacccaggaggcggagcttgcagtgagccaagatcgcgccactgcactccagcctgggcgacagagcgaaactctgtctccaaaaaaaaaaaaaatagttgccgtgggcagtactagtgatttgttaattatatatccaacacctatttcttgagttgccttctagtctagtctggactggcttataggaacgtttttcaaacttttttgacaatggcctacagaagaaatatattttactttgtaaagcatagacatgtgtctgtcattgaaacaaaaatttcacaaaataataatcacccctcttttgagtgattcacttggatatcttctatgcttttatactttgccaccttatttttaaaaatacaaattatggcccactaaatggattccatgacttacaaatgggtcacaacccaaaagctgaaaaatactggcttatatgaacaatacacagatcgtgccctcaaggaatttatacattagttgggagtctcatacagttcacagacctcttacagttggaaaggcctggaggtcaattagttccactacctactcgatatttgattctacagcatccctgaaaaaaggtgagaaatgtgaaaaaggcttgtttgctatttcaaggacaagaagttacctcttatttggaacctaacacaagatgggtcaaatagagacccgtttttaacaggtctctatttaaaacagtacagaagcaaatacaaatgaatcaagtatcaaaatacacacttgatttcttttttctaaaagataacttggacctttgttcctaaacccatcttagtcctttttaggaggagggtgaaaaggggaaggtaaatcagggggacagaggtctagaaagccttctctctgatgacctgaagaaggggtcttagcaagttacatcacaagcagccttcgtgattgaggagcctaataaatgacacccacaatgacggctaggagagtggaagtcaggaaaggctcccctgaggaggtttgaaatgagctgagtcttgaaagactgactggcatcagacaggtgaagaaaagacgggagagtgtagtcaaagactctcaaggagaaatgagccagtacatttggcggacagtagacaggtccctgaagaggagcaataagagatgaagccaaaaagaaagactgaaagcaacctgtggtgagcaagacagaatttggattttattctgtaggtaatgtggtgttactgaaggttcctcagtgtgtagagtggtatttcagaattgttcatctgcacatagacctgaaacttggctttagaaagacctaaagacccagagttcagataacagattctcaagctgtgttttagtacagagaaaaatgttctgtaagggactttataaattcagaattctaacacgagcagtgttggttacctaaaaattagaaaaactggaatatagagtttagatagcaatggaatccaatttatttttcatcattttacttttgttaatgaagtgtgagctttgtctgtagctgccatgaagtgactgatttcctttataaaacctacagtctttattcagaagcaagtcttcaatgttgctatgggcctaataaattattataaaccattttgcaaaaattaaattttgcctaaacaacacttttaataataaggttgtctaaagttaatatacaaacagggctctctgagggtgttaactatctagtaattcaggctctgctggatacagtgacagagctctatgaacctcaactagaactcaggtcggcctcaggtgaatataaacactgtatgtgagtcaccttgcaattacagctgccacctggaagcaaatttaagcagtaagaactacaaaaccaaatccctgtaagatcctgcattgaccttcctcttacttcttcctgtctgaggatccataaacctcaggattctttactaatttctcatcagcatcattttttattgtatttccaaatttaaaaacaactgtctccaaaggcctcaaaattactttcagttattactataataaatatcagcgatgtatgatgtattaattagaaactaaggtgttttttttcccctccccacaggaaaactacttcagagaaagactttaaatttctgagaaaatctttatacatattgagtatagatgctatcaaccacatacatgaaaataattgtttggggataatgcacaccatttgccaatgattaagattcagcccagtctttgttgctgcatttctacattcacataaattggtaagtcatgatgacacagaaggctcacatgccacgtaaaaatttcaagcctggatctgaatgggtgcctgaatccttctcagaatgcatattttggaggcaactgtttggtttatgttactgctccctaaactgggcagtgactcaagaggcagctggaagagagaaggaggtgctgggcaagtgctaaaaaagagtgaagcctcaacagcagagtccctccccttctctacacaccacacagcctttttgtgacttcttgtccccataagatatgctcctctagactaactccccttcccagggtggagcagagtctcaccggctcattatctcacagctcccgggatggccccgggtacagcaactgtgtggcacttggctgtggaaattcaagtttttccaccctaaaacaagtaggttgtgaaacccgatttcggtcctggttaccattgagaggggcctaccacagccctgtgcctggaagttcctgcctgtcgaagctcctagccccctgccccatcctcaccttctgcacctgatggagaaggtgcagtccctccgcgcaccttacatgcccatgccacactggtggactcacgcacgcacgccaactctgccatcccatgcacgcccggcttcggagggcggctacgaacttactgctcgtcgagccagccgagccagggcgcaaggggaaaggcccgagcggggccggggataggatcggataggagtcggggtcgtggatggggtcggggcggaccccgccggcccgctggcctccctcccctgacccccgggacagcccccgatgcacgtgctgggtgacaggccccctataggttccatacctgccaccggaagtgagtgaggagggcagtataggcatttcctgtgacgcgagcgcctggactccattaggcagcagctgggggaagaatcaacacaccagggagcagagcggagcggatccgaggacagaggcggcagctgcctccgctgccgcccgccgccgccgccgccgcagccactgccggggctcagcccagcggcgggccccgcgcccccgcagccgccccgcggcgccccccggcgcgacccccgggccgcgcaccccgagctgcctccgggaggggggggggaaagggcccggatcctccttctccccctcctcctcctccccctcctctcaccctcaccctcaccctcctaccctgaccccctccccgcctccccggcccccctcaccccgaccctctccccggcccccgcctcccctcccccgcctcgccccaccggcttcccaccacggcctctctcggcgaggaaactctggcctccgcttcctcctcctccgactcggacaccggcggagcctccccgcccccgcggaagaaaccccgagcctcggcggcggagggagtaggagagcccggggcttcggcaggcagagcaggcctctcccctccgtcctcgtcgtcctcgtcctcctcctcctcctcctcctccgtggtggtagtggtgggacttcccccggctgctgcccctcccgccgccgctgctgtcccccaccgaagtagcggccacagcctggtcagcggcagcatcatgcaggccaatggggcaggaggaggaggaggaggtggcggcggcggcggtggaggaggagggggcggcgggggccagggacagaccccggaactcgcctgcttgtcggcccagaacggggagtcgtccccctcgtcgtcgtcgtccgcgggggacctggcccacgccaatgggctcctgccttccgccccctccgccgccagcaacaatagcaacagcctgaatgtcaataacggggttcccggcggggcggccgccgcatcctcagccaccgtcgcagctgcctccgccaccaccgccgcctcctcttccttggccaccccagaactgggcagcagcctcaagaagaagaagcggctctcccagtcagatgaggatgtcattaggctaataggacagcacttgaatggcttagggctcaagtaagtatcccttaccgccagctggtgatggacagaccgagggacggaggctccaggggggtaggggaaggggcggaggggggaggggggcttgaaagagctcggtcaaagagaatgagtgctgggcacgcaggacccagtacacaggaggacgcggctcagggcgaccggggaggaggagcggacctgaaaggaaataggggaaaatcaatcagtctgacaaattgtgagacgagacaggcgttgaggggttaggaagggttaggagaaacccaaagaatgacttctccccacgcaccttcagagcttaattgtctgtcaataaagacagatgcgggagtgtgtttctgtatgtgttgggggaggggtggattagagctggtggaaataatgaaccttggaggatttgtttttcaagtgtatcttggaggcatctttgtgggacacctccccacccccaaccgtggcagacaacaacccaagcaaactaccaatcaggaaagacaatcacctacaagtgtttatgggaacggaggggctgggatcatttggaaagaggttgttgaataaatctgatgcgaataatgaagatacagtgttgatgtcgtttaaaggcccttgtgtgtgtgtacaagaggcctaaccctaactagtctgaaatctcagtttaataccaagaagatgatcgcctctgaaaaggggacatctgatctggtgaaccatttgttttcaaatacaatttaggtggccttgtatacctaacatagggtgaaggtagacagcgaccttggacaaaaaccaccgttttgtatacacacaaagaaaaactaagggggtggaaggtaggattggtgggagtgcctgatgaaggaggtgcaagagacggagtcagaatgaaatgaaggggggaggacgtgcagcagcagtcagtttcctacattcagagtgtagattaagctctcaggctagccgatgtgtacttttgcatttatggatttcttggggagtggggaggagaacagaactttttaaaagtggcacaagtattt

SEQ ID NO: 4781 - DNA, 6000 bp, Homo sapiens
ctatgtcttccaatttttagcccagtgcctagcacataggaggtggtcaatacatatttgttgaatgaatcaagacaagaaggaaaggaaggagggcttcagaatggtgcattaaaaaaataagaacgtgaattatttcccccaataaatatgtattgagtacttattctaaaagtaatctgcctacaacattcatataaaatgttgtcttttaaatgcggcataatttctagatttatatatatttgcatagaatgttctggaataaactagaaattgaagcattatataaaagatactctggaacataagataattacaggtctggggacctttatttgcaattccaaaatctaaaagcttctgaaaatcaaaaagttttggaggaaaatttgacctgaactgatgttagctagtttatttacacactttatttacatagttagttagatataactaaatatagacttcactgagaaatattaatatttttggaggcactggtccaggccccaaaaatgctgttacataatatgttcttaactttctaaaatctgaaaaattccaaatacattcaaagttctgaataagatattgtgtatttgtataaaactccctttcaaaaactagaaagaagctatgagaataatgatttgatcaataatggaagtagaattcagttgtcaccaatctaagtaacatgtttttaaatacatttgctatgaagaaaacaattaggattagaatatagtcataagcttttgatttttctgttgttattattattagttaattaatttttgagacagggtcttgctctgttgctcaggctggagtgcagatcacagttcaccacagccttcatctcccaggctcaggtgatcctcctgccttagcctcttgaatagctggaaccataggcatgtgctaccatgccccattaattttttaaaaattatttatagagacagggtctccctgggttgtccaagacagtcttgaacttctgggctcaagctattctgcttcagcgtcccaagtgcggcgattgcaggcatgagcaaccacgcccggatggtttttcttctattattcacaaagggaatgaaaacatattttgaatcttttgtttttaaagcttaagattccgaacttaccctttcacttttcacagaacctgtgacatcatcatcattgaggtggcgcttaaacttgggaggcatattttttacttgcaaagtatcttttgcttctcaacaggatagtcaccaccttaaagagaaaataaatttcatcagatttgagactttggggcataagctaatgtacttaaaacagtgtacatgaaaccctgtatgacagggactccctcatttttctgacttcaattcctgccctctcacttgttccactccagtgactggggcctccatgctagacctcaacacctaagaaatagttaaaattatgagaaaatggatgtaattgccctaagagaacatgtgtaggatatgagtgatttaagatttttataaaatgaaagagcagagagtagagggaggacgtctcactgagacattaaatgctttacaatttaaagttggagtcagaagacaggagaacatgcctatttctctcacttttagttggttgcttaagcaatgattcagtttcctcaggtgtaaaatactgattttcaggcttctgcagagttgggacggtcaaattggataatacatgcaaaaatattctgcaaactataatgtcccattggtactccatgaaaaggggtaagtttggtaagtactggtgtgatatcgtgatttacaaaatatactcatttggtcttaatccccatttcctgacatatccttggaatcgctgcagtgatgtgtcttgtgtatgctaataagatgactggtagcttagcccccagatagattccagatggaggctggtcacagaaaaacctaggcatgattagaagactgggactttacagccccaccccctagcttcctggaaggggaggagggctcaaggttgaactgatttctaatagccaatgatgtaatcaatcatgcctactaaggaagactccataaaacccaaaaaggacagggttcagagagcttcccaaaagctgaacaagtagagagttcctggacggtggcacacctggagagggcacagaagctctgtaccccttgccctatgcacctcttccatctggctgttgatctctatcctttataataaaccagtaaacaaagtgtttctcttaattctgtaagccactctagcaaataaactgaacacaaggaagggattgtgggaactctgatttatagccagtcagttggaaacacaggtaaaacaacctggaacttgtgattggcacctgaagtggggggaatcttgtaggattaagccctcaacctgcaggatctgatgctatctctaggtatacagtatcagaattgaattagaggacacccagctggagaatctgctgcagaatttcctccttgcttgtgaggagaaatcttttgggggtctgtgttgagagagaataggagaaactcaatttttttctatcaaaacaactggattaaacaaagctagttttctttgctacagaatgactcacatcctgttatatgctaatatgcattgtgactttccaggaaaatgcttgtgtatgcaacatactaaaatttttttttgcgaaaaagttcttctatgcaaataatgaattttcagtatttttgactagatggtagatgaatacccatcaattcaggatagctcagaaatactgaatgttttactatgtgctaggcacggtgctcagtgatacacatgcattttcttttactctttatgatgcttctttaaagtaggcaccaagaaactaggagaaaactaaagtttagtaacgataacgttagtcactacattcattgaaacagcagagatacaggcctaaattaatcaatggctgtgcattatcagttttaatcatttgttcaattagttgcccatcaggtttacagaattctgttctagaaagactcacttcctgctaacaacccaatagtcctgcttccttttccataagaagaaacacttagacctttaaattaggtatagttagacatcagtttgtttgttaatgatatacacttaaaaaagaataatcccaggatctggcttcacgaaccaaataaaagtaatgttttaagtcagctgcttgtcaaaaccaaaggacacacttttctttgataagaaatgcttccaaatcagaaattattcacttgtaacaaaaaccaaattcttgctgcctgagtaacagctcttgagttcttggttccacaatatttctgtcacatacatctggcccttttattcctcatactttgatgtcagaatacttcattcatgcagaaatgtaacagaatgcatggaaaaacagatgacaaggcaaattactgaagaacttgtgcttttaactattatctgtatttagattttaacccctgcaatgaggctgcctcaacatcccaaagcaaacaacgggcagacttatataatgcctttataagacatacagtaaaactacaatcttaaggatgagcaaacaccatattcaggtctcttaatcccaagaaaccatgtgcaacaaatagcccatcagcaaagcagtaggcagattaattagctaccttgatgaactttgatgttatttgcaactgattattagtaactgatatgtgtatcaaacaactagtagaaataaatcatgctcagaaagtagactaggatatagtctgcctaagatttctcctacaaaaaaagacatgtgaattcagctgtttgtgactaggtatacatgtaaataagagagccatcatgtacttccacattgaggatagaccaccactatacaattcactcaaatgagtcacatcaccgtatgcttcttatacatcagcatatacttaaatgtctatgtgtgcgtttttgtaagtagtacgttatctagtcaatagctttgaatctgggcaaaggctctccttttcccagcctccattctctttctgattcgtcttccttgtctgtcatcagccttcttgcttgatgcagtttcacagaaataaagtgacttggatggacacagaccggagatattatttgcaaaacctgtcaagtgtaacgattcacccccaccttccggtcattataaacacagcagggttggcgctctttcccccgggccctttaaatacacaatttcaggcagctccgttcaccccccacacccaatctgtcacaccaggccacgtcccacgatatatctgctcctaacgctggcccttcctgccccattgtaccccctggaattcctcactacatcccactcttaacaaaccttccccatccatggtactgttctcttcccatcaccccagagtacccctcaattccaattcttctctccctcaactgctcctcgtccgcatacccctgtcctcgtcttccttcctcacggcacccccggccccaaccttttcccactccggggtcccttcctagatccccgaggcccgccgaccagcccgactaggacgtcggggggcggcaaggcaggggcgtcttcttcgtttccttcctcctcacaccagcccctcccgctgcgaacaggccagcgccagtacctgaggctcccggggaactcccggcagctctcccgggctggcggtgctgggcgggcgggggaaggagtaggaagccgaggtaagaagctgggagggggagacagttggtgcggacccggcgtcggccgcagcgccgcagcagcgcctccgctcatcgagccgatcggcgctcggcggcctggcgccaggcggagggggcgggtccagggcacggagataatcgaggaagtcgatccgccgagccctattcacctaaaagagcccgaacccacacgcagtttagatgcatctctccaaatttatgctgtgctttaggggaggaacaaccactggttgtccacgttccggtcgtgatccggcgtgcgtggagggcgattaggggaggagtgggaaacttccgagaaccgctcgggactgggcgccgcgccggagtgcgtggctggggtgatgaggcgttagaaagaaggtggtgcttggtggcacatccgtccctctggctgactacgttgagtggcaagtggagagtggctcgcagctcgaggacctgcttcgggttcgtctggggccttttctgaagaaaggagatctgtttgatcccctgtttacagaattagagctagacttggaaagagatgttaaggccaggctcctccctttagataggaggaatatctggttcagagaggagattgacttaaagttaacacggctagtttagatagatacgggacgagggctcggtgttcttttcccggtatcccttagttgtaacctgaaagccttcaggaaatcgccctcgccaggccattccgccactctgcccattccttcctcactccctccccctccgcccaatttggtatcatgtttagatctccacgcccgcagtagctgtctaccagaaacaattcctaattttgtttttccgttctcttatttgttttattatccgttcctcccacgccccagctggattattttactcattgaatcatattcactacacatcttttaaaattaatacagtatctatgggtcctttgttgatacagtattttaactgtctgaaatactgtgccaggcactttctaaagacataaaaataagagggggtgttcaagaacaagagtagacaagaaaacagcaggaggaaagatctgcggacactaaaggaaaggaaagaatagacaccctcttaccaaaaagttgttcttcttttgtttgatgtttatttttatgtaaaaatgtactaacgaatttgaaagatgccatgactaaggca

SEQ ID NO: 4782 - DNA, 6000 bp, Homo sapiens
tccactaaaaaattgtcactggctgcctaatcataatttacacattttatacattataataaataactcccttgagaagtaccttaaaattacttttttatcaattactatcttttaatttagaagggttagaaagttgtaggagtgtctgtccaaaaggaaagaaatatgagtagaaacaagcaatgtattgaaataagtttattttattaacaatgtttatctttacaaaaccgtatatatatgggataataaaatctgtgtggctaataaatcactgatttccaaaagcactactctacacctagtatacagtaatttgagaaactattacatttaaacatttaaacctacaggtatctctgactttgataattattctttaaaaaaaaaaaaaattccaggaggctgaggtgggaggatggccttgagcccaggacgtggaggctgcagtgagccatgagggtgccactgcacaccagcctgggagacagagcaaaaccctgcctcaccctgccccccgcctcccaccaaaaaaaagaatcctacattgaaatttagatagggctcacaaagattaaaatccctggcctatcctctaaatccatgctagtctaaaacaacactctgttggcccaggtgaatcttgtggatttgggagctctaagtaaacatatcttttaatcataaataacatctgggaaattattcatcttcattcccacaacataataggaagttttctgaagtataattttctttgatgggaagaaaggagataattaatcagtttaagtaaaatcaattacaaagcttgaatattaacattgaaagggcacatgctatggtgaaataactggaaatgtaaaggctacaagaaaaatttatctatttgttctatcccaattttactatttagcagtaattcactgctaaaaaatctgtagaaatacaaataatgaaaatgtatcagaaaaatacttaaatctacaaccctgtagatagacaatcgtaatgtttaaatattgaagtcttttaaaaaaggaatctatttccttaggaaaatcctaacttggaatttgacttttaaaaggaaggctttataagtgtaccatactttatttatttatttatttatttatgacgcagagtttccctctgtcgcccaggctggagtgcagtggcacaatcttggctcactgcaacctccacttcccaagttcaagctattctcctgcctcagcctcccaaggagctgagactacaggcgtacgccaccactcccggctaatttttgtatttttagtaaagaccagggtttcaccatgttggccaggccggtctcaaactcctgacctcaagtgatcacccaccttggcctcccaaagtgctgggattccaggcgtaagccaccgcgcccggccaagagtactgtactttaaaaagtcattttatctaataataaaaataaaattaataataatgataaagtcattttatcgccacacacaaaaaaagatggtaattatgtgacatgatggatatgttaattaacttgattgtatatgaagttatcaagtcctacaccttaaatataacaatttttaattgtcaattataccccaataaaactgggagggaaagtcattttttaaaaaaaaccatcactaattcaaacattaccaatgtggattttgctgcttcctgaatgcaaagccaggattagcactgtagtatagaagagctgaataacagtgtaaaggtctactaagggtaaaggccaataaattagttctttgcaaacattttcaagtttcgatactttcaaaaagtattttcaagtacttagaaaaccacttttaaaggaagtcattccaaaaatgtcctattttaagagtatatattatcatatctaaaatattatttaagataaagaactccctgtatgtatacatacacatttgaaaaactgtaattcaggctttctaatatagtcagtgaacccttcaattcccctagacccaatacacaaattccatttccattagggagttggagtaggagggggaaaagcaggtatatggttttgttatattttaattaactcgtttgtagatatagctgaagtaactgaaccaaaagaaaacactaaaatatagaactatatacaagtacttaaactgtccaactgagataaaggaccaaattataaatgtatccatgcaaaacaatgttaacgtttgttttattaagctaaaattaagttctttctccgcaaataaattctaaaagaaatactgcacactttttttggtaaatagttttaaaaaccagactccagctatgttcaattttaaaatgattaatcaccactctaggtacttatcctacaacaaatgcacagaagcttgtagaatgatgttcattaaaatgctgtaagggcgaacgtctacttaaagaagaaaggttgagtaccctatggtacttcataatgttacctactatgtaataatttaaaagacagaatcaatctatttttactgccatggaaagatctccaaaatgtggagaagtgaaaacaatgtttacaatatgacaccatgcactcaggtgtctctctcatacacacacaaacacacacacaccccagcatttgtacatgtacatatgtacttgtaagaatgcaaacaaaaaggtctggaagaatattcagaaaacagaaaatattatttctaagggtggcggagtgaaattgaatgggagggatcaaagggatttttgcttcatttttattgagtttttataaacaaaatgtattcgtattttacttgagacactaaaaagaattaaaaaattgcatgctaacttttcttaaataatttacaaaccagaactgttggttgtaatgagatttcattttcttctctttacttgaaatcaaaaacaaatgagagcaacaaacactttttaactagcaagtggcaaaactggaaagaaaaaaattttatgatgttgtttgccgtatctccaaatagaaagaaagagtaatgaagagtatacaggaagaaacaaaaaagacctttactaagtacgtccatttttaagaaaccaaactttttagttgactcgggcgtgacctagaatcctcaaaaaaaaaatgttatgcaaaacgaaaaaagtggaatactgttcccccaagtactgaaggttgtttttagaaagcttaactacgaaactgtaaatgccaagtgtgttttccaggggtgggaagaggaacgtgaaaccctacaccacctttaagcggtcaaaacgaactgaagagcagagtggaactgggagagcgcgcgggggtggggagagctcagctatcacttttaggttttggctcagcgccgcaaaaacagtttacacggattctgtctggagcgtgaagtccctgagggtggtcaacgcgtcgcagccgacacctaaaccctctggagattgaaggagagggtgggcaacaacttaggttcttcggctgagcggggaaagcgcgctggaaaagagcaaaagagctaacttttgctctaaacgcggcagctcctggaggttccgcaagtctcccgagtcccaacccatcagcgaccccaacacctttacaagccagtaccttctgcccacggcccggccctccgagaaaaacccagcaagggcggcggctggcagcatgcacagggggcttgactgggggaggcaccggcacggaattcggcaaccaaggccccacccaacaccccagagtctccgggcgcccccaccgagacgccgtcccacctccaacagacccggcagcgtgccccctcccccactctaggcggcgacctcagcgcctccgccccggggcccccgctcacccaggtatcgactccgcagccgggacgggtcctccagcccgagggaccttttcctcacgtcccacaacaggtgtgggtaggagccaccccgagacatggctctgcctgagccgggtgggaggggagaccaccgcgtgggggaggggaggagggggaggggacacccgtttcaacacccgagccgcaccggcaccatccgcgcgccgggcctccagggcgcagcgttagatggcggtggcagcagcggcgcctgggcccctgaagcccggccgcacccgggccggagctcgcctcatactctccttcttagactaaccagaacatccaaagatcagcaacagtctcctccctcagcccccctccaacaggaggaggcggaggcggaggcgatggcgactcctccctctcctcgtcctggataccctccccgccaaccctttctcgcgagatgacgaccaccctggggactgaggctggtgtgtgctgcggctgccctcaccctggaagaatgcattcgggccactctaaccagatccttaagtcgctagggataaaagacgagtagagagagaagctactcaattctgtagtctctcgctcacgagtctccagtgaaaagaagcaagagaattgtgcggcatcatctttaggcactgaaggcccaaaaacccattttaactacgggcctgcttaatcaaagtgaaagggcagtagaaccagcgcagcttcactttcccttctccaacatggcctcgagggcatggggagaaggaggaggtttccgctcgaccccgcccgcgcctcggggcgggccaatcatggcgggcagctcggcctgcgcaagcgcgctgccagcagggcgcagcgcagacttggtgaggtgattattttggcacctgttgccatggctcctccctctctcctgccgggggccggaggcggaccgggggctggcagtcggcagcctccgccccctcaaccttcgcggggcgcgggccgcagcttttcggttcacagcgggcagggaaagccgcgggaagggtactccaggcgagaggcggacgcgagtcgtcgtggcaggaaaagtgactagctccccttcgttgtcagccagggacgagaacacagccacgctcccacccggctgccaacgatccctcggcggcgatgtcggccgccggtgcccgaggcctgcgggccacctaccaccggctcctcgataaagtggagctgatgctgcccgagaaattgaggccgttgtacaaccatccagcaggtaatggaccctgaatggctccttatcgagaccttccttctcgcttcctctaaaatggaccttttagaggccctctgacaactgcctctagaggcatccacagccccaatcccttcccttcaagtgaagccgtctactctcctagcctgtgcatttcaccctctctcctgcaacatctcttcctaagccaacgtatctcaagtcagctcccttccccacctatgtgacatccgctcccttacgcacgactccaacccaaacctgatctccagatttgagccttctcaacttctgcggccaccaaactgtctggggccaccatgaaacactcattctctttctcttttcgaattgtggcatattaacccactctaggcagagctggatgggtggtttgtcgcactgtagggtttggagtaaaggtcactttcttcagctgctgctggcagaggcctgcagactgagccctcccccaaactgcatgctttacttcatccaggcttgagtcagtgtcatttctcatcccataggtccagtgtgtttttttaagtctatccttatttatgaaattgttgaacaagctctacccagagctttttgtgtggacagacctggatatcattctcttctaccacttatagttgtgaccttgagcaaaagcctagatctctgtttgtgtaatacgcggtctatgagaatgacagataacatatgtgcttgactctttgtaaatgctcagtaaacgttacatctctctttgcctactggaaaactgtgttcttgtggttgaaaaaaaaaactgtaagaaactgaaagattccaatccct

SEQ ID NO: 4783 - DNA, 6000 bp, Homo sapiens
tctgataactccttttaatgcaattaactccaactttgatagcaaagtggttgctcggacattaaagatcctgggtttgagttgaacaaactatactatctcatgaaattttgtctggaagctagtgcttctcattaaagactttccgggccgggcgcgatggctcacgcctataatcccagctctttgggaggctgaggtgggtggatcacttgaggtcaagagttcaaaaccagcctagccaatatatagtgaaaccccatgtctactaaaaatacaaaaattagccgggcatggtggcacaggcctgtcgtcccagctacctgggaggctgaggcaggagaattgcttgaacctgggaggcggaggcaggagaattgcttgaacctgggaggcggaggttgcagtgagctgagactgcaccactgcacgccagtctgggtgacagagtgagagtccatctcaaaaaaaaaaaaaaaagacttcccatgaaatcccttttaaaatctcctctgacagacctgtaagcttttatgtcaaacttttccaaaacacttggtaaatcttatgaaaggaaaaaaaagggaaatgattttaattttcttagaatacaaatggctagaaagcaaaaacagtctgtacctaaaagtactgtctctatatgtaagaaagcaataattattcagtttatgaaaatgaagagaataaaatcatcttatttctaaattacatggaaatcaaaaaggctcaactaaaatattttcctctttaaatataggtatgtattaactgggttttactacttagtctcacaatgggaatactgtacaagttgtaaaaaatgaacttagtaaacaagagattatcacaaaatgacacgtaacaaagagttacataaagttttaaaaattactttaaccacatatattaataatataaacacctccaaaaaaagaaacttggaccttttttttcaagtttattaaaatttttttccctgttgtcttcctgcttttccacctttactggggtataactgacaattaaaaattataaggccaggcatgattgattatgcctgtaaccccagcactttgggaggccaagggggacagatcacttgagcccaggagttcgagaccagcaggggcaacacagtgagaccctgcctctacaaaaaaatctaaaaactagccacgtgtggtggcacatgcctgtagtcccagctacttgggaggttgaggtgggaggatcacttgagcccaagaggctacgcttgcagtgagccaagatcacgccactgcacacttcagcctgggccagggtgaggcgttgtctccaaaaaaaaaaaaaaaccaaaactgtgtgtgtgtgtgtgtgtgtgtgtgtgtgtgtgtgtgtgtgtgtgtgtgtgtgttattaccactattaagctaattaacgtatccatcacctcagttagttttttttttttcctttttgagtcagggtctctgttgcccagcctggagtgcagtggcccaatcacagctcactgcagcctcaaacttctgagttgaagcagtcctcctgccccagcccctccggagtagccaggactataagcatactacaggcgcatgctgtcatgcccagctaattgtggtaaaaacatttaagatctacttacttagcaaatttcaagtataaacttcctgaatttatcaagctctgtaccttgaaatacccttaaaccacttaactctcttaataacgcctttatttcccaagtcttttcactccacagccccgcaagctgcctggcctataggaaacacccaatcatgtatattgcacgaactgaaaaaacaagaacttaaactattaactaaattagtagctgacatggatctaaatatatctagtcttttattactgagataataactaggccagggttaagataatcaatatgtattcattatttattatggctatattaatgaccactgtaagtcagacactatgaacacaaagttagataaggaacaattcctatcctcaaggagctcagtcctgtatgagggacagagatgtaaacaaataaaatgtaatcatgctataacaaatatatgtaaaaaacttatgaaagcagaaaccacgtttcttgttcactactaatacatgcgagaacatagcagatactcaataaatatttcatgttggtcaccaagtcggcttgagagaaaaatcagaacgcattcacaggaaagaggctacttgagctaggtcttaaagaaaattgtagttcaggccaggcgcagtggctcacgcctgtaatcccagcactctgagaggccgagacgggcagactgcttgagctcggagatcaagaccagcctccagcaacatggcgaaaccctgtctctacaaaaaaatttaaaaaaattaggcatggtgacacacgcctgtagtcccagctactcaggaggctgaggtaggaaaatggcttgagcccaggaggcagaggttttgcagtgagccaagatcgtgcctaattattatctcagcctgtgtgacagagactctgtctcaaaaaaaaaaaaaaaccaaaaaactgtagttcagcagacgggtaatgaggacaccaccttagaagcaactccaccttttcttttttttgagatggagtctcattctgtcgccggggctggagtgcaaaggcgcgatctcggctcactgcaacctccgcgttccgggttcaagcgattctcctgcctcagcctcccgagtagctgggattacaggcacctcccactacgaccaactaatttttcgtacttttttttttttttttttgagacggagcctcgctctgttgcccaggctggagtgcagtggcacgatctcggctcactgcaagctccgcctcctgggttcacgccattctcctgcctcagcctcccaagtagtggggactactgacgcccggctaattttttgtatttttagtagagacggggtttcaccgtgtactttattagagtcagggtttcaccatgttggccaggctggtctcaaactcatggcctcgtgatccccccgcctcggcctcccaaagtgctgggattacaggcgtgagccaccacacccagccgcaactccaccttctgtatcagtacgctctttattcaattacggccagctgtcttaaacttctgacgatcacagtagatactgtggtggttttcaaatatatccacaaataacctgagactcctccctccaaagggtgggacataacttccttcctcttcaatgtgagacagtttttaaaactgcctcccttctaacaaacacaatgtgacaaaaatgacagtgtctgatgtctgagattaggacatagagattgtggtttcctccttgctctcttgcactctctctctctgaaggaggccagatgccacaccaaaggacatccaagcagcacaagaagttcatgtggacaggaacagagagctggttgcaggcaaaaggcctaaactatcaacagctgtagatccttcagccccaatcaaggcttcaggtgattgcaaataggaatcaaccagctaagcccttcccagattccttaatcacagaaacgtaaggtacaggatagtggatagacagggacaaaaggaagaggattttgttttgtgtttgttttgaattgaggaataacttgtccaagttaatatgctgagaaaaggggactgtgaaaatatgtgtatatagatatgcgagattcactaatagatacaagctcccactctgtgctaagtgttacagttaaaacaaagataccgtccctgtcttcaagtctagtagaggaaacaaatacacactaaatgaaaatatattttagcatataacagatgagtaaatattatcaggtacacaattcttgagtatgtgacatgtcaaatattaattaatgtttactgtttcttgtgtttaagtcatgtttacctgattactaatatttctcttaatgggacataaaagtgaaggcctttgtaatccagacttttagggtacatctagcgccatcacaaaacctccagctaaagtttcacattaaattcttagggactgttttcttgcgcataaccatggctaaataattttgttctctccccttcttcaacttacattgcagagaacttacatttaaaggccaacatcacgggtgaagatgaattaacatccttcccttctcttctttggttatgtgggaaattgtcatgcttccttttcctgaaccctcctgatccttatatagagaagaaaaaaagagagggatcttccatcaccaagagtttgcaaaacacaacatagacaaacctactccttgctttaaaaccagatacccacagggccctcgccttagaggctttctccgcagactgacagagacgctgcccaggcctttccaagcaaatcatccaagtttccaccaactggtgctatgatctggcattacagcaattactgaactaggataaaatcacacctcaaaaatttaagaaaaaaggaggtgtaaacagggccgatctggccggggagagaaacagaggggccgcccccgagtctacaagggacgaaggcatccttcaagggtgaaaaggggaaaactgcatagaaagactggagaacctccccctccggataaataacgccccgtgttgttaaggacgccaccttctttgttgctcatgtcgtcacagcctacggtgagacgagcggagactgaaggacctggagcaagaggagtgcgcgaggtacaggccgagggaacctgggaaaacagcctgcagaaaaacgctttgcagccgggccgactacaacgcagtggccggaagtctcctctcacgtacttccggcctgcgtccggaggggaggggaggccgtcgccgctggctccgcccaccgcgtggtccaaggaccaccacccgccaccgccgcgcgagcgtactattgcggccgccctctgctgcgcctgaagagagaggcgactctacaagcctcacagcatgcactgttactaaaaagacgatgcgtcctcctggacctgagatctgtgtgatcgtgggaaagcgacgaaaaacgtacgtaatttttttctgaaggcaccttcgggacaccttacccttccctcaggggggcccagcttcgcgcgcggtgctgtgggggttgtagttcctccgccggagcgggacctccggtgccccgggccagggatgtgagaaagaagcgagccctcgagtttcctcggggcatgtgggaaggtttttttcaggatccaggcagaaccttacagagctgggagttttttaactttccattcctggcagtgacgccaggagctttaagtgatggaaatatgcgagtcaatcagtggatggtgttagtactgttttctcttatgaagatcaagcctgcccttcgggtctacttccaccttttccccctgcccgtctcccaccgtctccctcctctccactggctctcagaagccggacagcctgtgttcaacttgcctccacggagtggttgtgtgaccttgatgaagcacgcaacttctctgcctcagtttccttatctgtaacatagggatagaatagtacccgccttgtagggttatttgaggatgaaaggagttaagtctcgtgaaaacgctctttcacatataactgctcaattaaatattaaataccatactcctctcccaccagggctctcccaaacaaaatgatagacaggtgagtaatagcagctgtgttccactaaactgtgggcatttcattatgagcaggtgctgccaccatatctagactttgtgccgccccttagccccagtgcttctcagcgctgtgatccggtcccatgtaagcttccgtcaatgtttgttgaagaatcatgttcctggtgtcagaataggtaactagatggcaattcagcaccgtctagagagaaact

SEQ ID NO: 4784 - DNA, 6000 bp, Homo sapiens
agtgcagtggcatgatctcagctcactgcagcctcaacctcctgggctcaagcgatcctcctctctcagcctcccaggtagctggggctataggcgtgtgaccccatgcccagctaattttttgtagagatggggttttgccatgtgcccagactggtcttgaactccttgagctcaagtgatcccacccacctcggcctgccaaattgctgggactacaggcgtgagccactgcacccagcctgatataataaacattttacttacttgtattttacttaactcttccctccatcacctgaatatacaagggtaaggatttttgtctttttcactgctactgacctagcccaagcaatatttggcaaatagtgctcaaatatctgctgaacaaaccaacctttgaagatgcttgagaaaacttctggatgaagcgaagcatactggcccctattgaaagtcttgttcaggaagatgccaggtagttctgattaacatgttacagctaagcagaggcactgaatcaggggcatgtttctgtgtataacacaaggtgtcacttaattttcctcattttatacattaatttttaaatagtagtaattcatgaatataacactttcctttgaaaagaatcattaatgttttcaaactgtcggtaacacagtaacaaaatagatccttttagtatctgaactgttcttttagctttggctgtctagtgtaatagaaagagtaatgcacatagagattttacagatacttccaccatttcctagctgtgtgacactgggcaaattgcttgagtactggttttctcatctttaaaatgaagggtcttctaagtggtgtttttgtgaaattaaaaaaaaaaccaaaacaaaactggaaggtcatagcttctgtttccttttttcctcctattttggggcttaagagttcacaactcaaaataacgatagtaccaaccaatataatttaggtttttttaatttgtttgtttgttttgagacaagagtcttgctgtgtcgcccaggctggagtgcagtggcgcgatcttggctcactgcatcatctgcctaccgggttcaagcaattcttgtgcctcagcctcccaagtagctgggattacaagctcctgccaccatgtctggccaatttttgtattttcaggagagatggggtttcgccatgttggccaggctggtcctgaactcctgacctcaggtgatccaactgcctaggcctcccaaagtgttgggattacaggcatgagccaccgcgcccggtgagcattaactcatttaatgctcaaaataacctcattaacttagtactgagagagaatagcctgttggagtgcagactttggtgtcaaacttggttggaatcctggctccactacttattagctgtgtgtctttgaacaaattatttaatcttgttatggtgcagttcattcacctttgaaatatggatactaattcatagggttgatgtaacatttttttttttggatacagggtctcgctctgtcacccaatctggactgcagtggcgtgctctccgctgtctgcagccttgacctcccgggatcgagggatcttaccacctcagccctctaaggagctgggactacaggccacgccaccatgcccagccaatttttttttgagacggagtcttgctctgtcgcccagggtggagtgcagtggtgccatctcagctcactgcaagcttcgcctcccaggttcatgccattctcctgcctcagcctcctgagtagctgggactacaggcatatgccaccacgcccagctcattttttgtatttttagtagagacggagtttcaccatgttaggatggtctcgatctcctgacctcgtgatccgcctgctttggcctcccaaagtgctgggattacaggcattaggcaccgtgcctggccccaatttttgtattttttgtatagaaggggttttgccatattgctcaggctggtcttgaactcctgagctcaagcaatccacctgcctcggcctcccaaagtgctgggattgcaggtgtgtgccacttagcctgatataacacttaataagttactacatgtaaatagctgagaaccgtccctgacacaaagcactttacacaggagggactgattaaaaactctaatgtaagcagccagtaaaaacaggtgaatgataatatggatctagatctgacaatttcattcttaaccaagagaatgggatgtctaaaaaaacctacagttgctgcttaattttaaaaaatcgattgggcagggcgcagtgactcgctcctgtaagcccagcagtttgggaggccgaggtgggtggatcacgaggtcaggagttcgagaccagcctggccaacgtagtgaacctcccccccgtctctactaaaaatacaaaaaattagctgggcgtggtggcaggcgcctgtaatcccagctactcgggaggctgaggcaggagaattgcttgaacctgggaggcggaggttgcagtgagccgagatcgcgccattgcactccagcccacgagacagtgcgaagctccgtctcaaaaaaaaaaaaaaaaaatcgattgaactaatttattgatcacagatcttagggctgggtcaagaaatcctgtataccagttaatgtcttcatactatacttaaggaagcaagtagggaggtaagtaatcctgggcctccgagtagaatttagatcacacccacacccacccacctgagccccagaccaaaatgcccgcagagcgtacccatcacttttgttcaaaatcactttcttcttaaggactttccagaccactccatttaaaatctcaaccatccccccatctttggaaactccctttcctctgtggcacgtgctttccaactagtgggtattaaaaagtgataacctaaaaagtccagggacggcaggtgatgcgggattaaggactgagactcaaagcttaatcctcctaatataaatgaaaaagctcaatattcccattgccctggtgggaagactgcaaactgccagcttcaaactgacctctgagaaaggaaggcggggtttagacgccagtgtcttcgggaaaccctgcccgagagtgcccgcgtctccaatttactaccaacccttggtgccctcccatcccaacgtcgcaaatttactaccaacccttggtgcctcccatcccaacctgcacctgtggcgactttgagacttgccagcgttgcacggagagaaggaaaacaaccgcaacaacagcccaggtccactggaaaggcacttccggcaagtggattcagagaggcccctacttcctgagggctgaaaaaaaatgagtccgggtagggacttgacctgcgctaattggttcctaggcccggctttctgtttgggggccattcttaatttctagttgaatccagatgttgaacggtccttgaagttctattccagggctcccaggcagcagaatctgcccacagagttcgggtaagtagagtgcaagtactgaaacaatctcagaatgatggtggtgaaggaaggtaagagacgggattttaggcccagtgtgacctgaattgcttgccatctgtgggacttatgttttactttgcaaaacagggtttataaggcctatggggacacatctcactgcattagggccctttactatcatttagagggggaaaaaagcccagttcttacatccattttctttgctgggacctataaacttcattaagggttaaagagcacaagagcaggattttcacttccatgaaaggtgtggtgataagggccctaggcttgggggtggttcggaaagtcagatcatttctcctactgccctcggctttatttctcggctatgtgaccttgggcaagtcccttctcttatctagacttgtttcacaggaaatggcaccaggcaattttagtgcccttccgtgtctatggataaaactgaagacatgtagtaggagatctcaggggcccacgccggccagtccctccaatcctccggattctaggtagtctagcttcctggttgccagccattacacggtttagctttccgtgccggatggagccacagcgaagtcttccttaatagtaagcgcttttagtcgagctaggccttcagttttattgccttctctgtcatggcagcgccgccccttccagtagtgcgatacccaatgagacttcaggtaggagaaacggcactgtcgcaagcgcaggctctcgccggaatcccgcccttcgcttgggcgggggagtgacgcctgcgctccaggggaactactactcccagcgggtagcgcggccgacgcagccgcgcagcctccggggccaggccgtgtggcccgctggggactggagtctcaacgacgcgcacacgagaagtaaggagcggaaggtgggaaagggccggaaaacacacgttcctccgaaaccggtttgcaagtccttgtagaggtagtttcgggacgcgcactggccaaggggcgggctgtgggagggtgaagaaaaaagggatacacacatgcatacccacccactcattcatacgcgcccaggccctggaagtgggcaagggggttagaaggggcgtactaaactaggcttgtccgtgcctcaggcggcacgaggaaaggcagaggattcaattctgtagggggcagaggtgaccatgcgccgcctcaagcggcgaagaagggagccgggggcggggcagggcataaccgccgttctggaggccgaacgttggcagcgtagggaactggcgtccgggagggtcgccggagcagtcccttgcgcatgcgcttcttcaggtgggcgtgtgtaaggcggggtcggacgggggatgggagggccgtgctgctggtcgctcctcctcctccacccgctctgcccctcctggaccttgtgggccgggcagccattttgggaagagctttgttatggttgtggactagccgcctctgccgggtcgacaagctggggacgcgtcctcagacgcagcgtctagtccctggccatagctccgccgctgcccggtgagtgggagtttgggaaacggggcagtaggagatcctggagtcgttctggcgcggggctccgcccggtgcctaaccaacgggctgttaaaactagttgaaagaagctctcacacaggtggttgggtataggtccgacccgagaggggcgagcggagcccacgggtcaagtggttcggatgcggcacccccgcctcccccgtgcatggagctttgcacgcgagcgtcgccggggctccgcgaaagcgctcctactttaacttcggtcgtcgggtcggaacgctcacctgcggctctttggctcctctccaggcgatccggcttggtgctcgttgagtgacttggcttacgggtttttttctttccttcttgaaatgagagctaagggcttttgttttccttcaaaggaaaacctaaggaggaaaaagtgtaagtcaaatgttggatatctgaggggaaaaaagttttaacccccagctttccggttctctgtggtagcgaggtgttttcgcttagattgagtctatccgatatctaccaacctcctttccttggaggggcagggaaagctggtcgatcctgaaatgttttaagtgttattttttttctgttgttttaaatctagttctccccaacccgtgaaattcgaaagacagtctgaatccaaaatggctgtagcttggggaagtgccctgcccttcgattacttaaatacattaacgtttaaagattttagtcctttcccctgtggggacattaactgaatcttttgatattttggttttttgcagttggtgtctcacctttaactctccttatgctgggtgaaaacaaaggtgaggctcacaaagttgactattccaaaagtttacataagaatgggtgcggtgcggtggtgtgt

SEQ ID NO: 4785 - DNA, 6000 bp, Homo sapiens
aatcagggcctcccccttcaagtttctccacccttcacaacttcttgatcttttcttccctccacacatcctacacagaaaagactaggcttaaaaaccagggtaaagaaaactcatttgggtaaggagtgagtcataaatcccgattctatatcctgtgaacagggatgagtgcagaattgagtgggggtttgggtcctgagaaaagtcagtgcacacgcacaggtgtgcgcagttcaggtgctgacagagatgcaagctcatgggtggacatatgtttttacatgcatacatctaacataaaggtagattctaacagatcgagaaacagatgtgtacacacacacacacacacacacgcacgcacattcaggtcatgctgaggaacctgggagagatgactcccaggaagtggctttttaaattaccttgatatgttccctgaactgagtaacatcccctgggatgcttctttcaccttccccaccactgtcctaatcactaaacaaagccagagaggagacagaagacagaggctgggcaggttggacagggggaggtggtattgctctgggctttgtcatcactcttcactgtttatctctcagtttgagttcctattccatttgcttcccagaacagctttttttccagctaagccatcccttctgttttttttggtttaatgactcccctcatgctctggttcctcttctcttctcccttgagatggccgtgaccccacacctcaagagaacatctgtgtaccctgagggtatttattcatcattcaccttcttcccaagccagctatagaagcagacactggcaagaaagtctgacataaaaatgtctctctctccattctccttcttctccccagacaaaataagaaaccacccgcttcacaaaggcagtgtagactttaattcaggttgacaggtgggaagagaactaggatttgcttccaagggtgtccagatgagaagaccatccttcagggaggggcagagagggcaagagggtgcgggtggcctggtggcagaatagggcgaggagcaggggcgtagccacacagtgcaaaattgccagggcttctgccaggttcagcagcaggtccagagcctgctgggccagacatgttgacaacagcaacagcttggacctcaccaggaaatccagtcctagaaccaccccatgaggccaccagaaaataaaccaggcccacaggatattcatccaggggcctggccccatacccaatgccttcttcagccccttggctccaaacaaacccaatggcaacaagacaaagatggcaagacaggctacagtgtgtgtggcctgcaaagccttcagctccgtgctgtatatcagggtgcagagtccaccagaagcaccactggccagggtgacaggcagtgtcagtagggcagccactccccaaattcccacagtgagccccagggtgaggcctgggacctggcctgcacccagtctgtggcccagggaggcatggcaccctagcagcaaagcctgggcaaaggctgagccataccagacacagtagcccaggctacacagggcagagctgcgagtgctacctagccctggggccaagacgggcaccacaatgctgaagagggcactgcccacagccagctgtgccaggacaggccagccagggcagagctgccagcggaagagaggtctgaaaagcatgaagaggacagtgctgctagctaggatacccaggacactggtgaggatgaagaagggcagtgcagagtcatccagcaggttacaggagtggcagggggcagctgcttccaggttggcaccatagtctccatctgggaaggaatcattcacaccataggaagaattccatacatcttcgaagtccagctgacttgagttctcagttgagggggagagctccgcctggaggacatacccagaggaggccatcagagttacaccggaagagtctcctgggaattgaggggcaggtgggaggggaggacagagaggaaggtcgggtgggagaacaaggtctctgcaggagtcagatgcagtgcggacagtggaaaaggacaaagcagggagcctgaagagccggagcaggaacagtcctggggaagccagggcagctggggctggaggagcagtgcaaggtcagaaggaaaaggcaccaagagaccaggatggaactgactcaaaggcaaagggagggacacaagagggagctaggaggctagcataggaaggagagaaggaaaaagactttgaaggaagaggaaaaaagcaggaagggagaaaagatgaggaggaaaaggaagagatataaagactgaggggcaaacagcacgggaaatgaggggcatagggataagggactctggggcctggccccatactcaccctgtgcagacagttccccatggcaccgtttggttcaggcccgcagacagaagggctgggacggctgtcagcgcctgtgcttccaagataagagccaaggactaatgagggccatcaggttctgggcagggacagggggcatcaggaagccttaccccacgcccactgcctgcacaagcctcaggcctatgggggtcactggccttgggtcttcctgttttgaggttggatttggctggttgggactacactcaggaaaaaggtggggaccagaaagtgggcattttaccgaagtggaaagggagattgagaaaacagggggctttccagcaagtagagattttaccgaagtggaaagggagattgagaaaacagggggctttccagcaaggagagattcttcaagcacaaggaaggaagagaggggggctgggtgacttgtgaggcagagataagggaggtgctgggaaattggagtggaagggcggctgactctcactgctcctccatccccttgaactggatccaaggaaaggcagttcaaaagccatgtgtttgggagaaaggtggtggtggtcaactctgtcccaactgaggggtgtgtgcacgtgggcgtgagctctttgtgtgtactgaactctgtgtacgtttgctgtgtatcattgtgcacatatctgtatgtgaggggcttggcgggtgtctgggtgtgtctagctatctctaggtctgggtgtttcagtgtgagagtgggagggttggggtggctgtcgaggctgcataatgaagccatttcagggagctattgggtgtttgcctagccacctatgggctcagtgcatgcctcttgcatatgaagtggaatacatggtctgacaagttaaagtaggctctaggggacaatgggacagcatattttaaaatgggaccattgcccacagggtgatttctattcatatttctactgggggacataaagtctctggaactgtttcattggccaggcatcttagcaatatgtaaagtttctcactgaggggcagagctggccagcagagagaaagggcatctaccctgcaggcaggccgattctcccaagcacatttcacttttttagtggcttcttccccctccctcccctcctcagctgtttccccaggatcgtcactgtttcatcacccctctctgcttttatttcctcagctagggagacatagtggggactttgggagcggtgagccatggcgtgtccaagtcagaacaatgagatagaaagggctggttaggggacgctgtttcatttgtccaaaacagcatcggctgcttcatctccagtgttgttaaggaccttctgtcccattcatgtagggcttcctagggggccaagcacctcagacctaaggtgcagaaggatgggtacctcgtagagatttcccccttttctcccaagacactagctcaagtttcaggttcaacatgaaggggctggaaagtgaatttggtctggtggtgtctggtgatgctctgcagggtggggttgatggcatctccatcgccgtcttaacattctccagcaatgcctggcagagggtggggggaagcagtcagatgccccccaagacactctctggaaaggaagggcttagcaaaaggaagtgaacacacttctctcccttgtagagttatattgttgctgtacatagatattcttgagagtggcctggcaagggacacaccaccttttgaggcaccaggcaccaggtgcaaggggtatgggaagaagaccctcacatacacacatcccagcagcagcaagaggaccagaaaggaggcagctgaatgacacggataatccagatatattgagggtgacccctctgagattagcacaggagagttagaaagattataaagatacacggtcccctccctgctcccttcccccacccccccacccctggacagacacacacagcacaacagcccctctccctcccacccccccgtacaaatatggcttctgtgtaatatggacagagtggttcagcttgaagaggaaaagtcattttcccaaaagcgggtgctgggagacaagaagctcaacaggcctggggccccagggctctcttgctgttgtaagaggagtaggccccggcttaggtgaggggctgcctgtggtgcccaaggccctaaccagcggctggaagattcacaactgtattacctgaactgaagggggtgggcaggcctgctagattgcagctgcccctttttgcatgcccattgtcagaccagggaggaaaagctgggggagggtgggagcgatgccaagggcatcctggatctgaggcggggcagtccagccaggacagggaggaccaggaacctcatctccacagcaaccagctggggccacgagaaggaagacaggaaatcaaaaggaagggtggggacccagccttcaactcactgggtacagactatgggaaaaaataggtggtggtaggtctttccagggtcaacgccaaggagaggcctgagaggtgcatagcaaaggctgtggcactgactccatggctcagaggagggaaatccagggaagggctgaatgctctgtgtttaagggagagatagaatggacagctgggcaaacacacacccggggactcctttctccaagaccgatgggcattgggggtggcagaggaaataccagcatggaacaacatcccaggtgaggtgtgaaccctgactaggaataccccattcccaaagcctccccaacatgtcccacagccctgtccacttgcccaggacccctggctcttagccctcctcctcagttcctcgctctgcctctcactcactcacacacatgcacacacacacacacacatgcacacatgcatacacaccacacacatgcacacagttcacattattcccttagtttgggcaggaaacagctcactgcagtgaagctccttttagtagttttgttgttatgtctgcctggctgctgagggaggaaggatgaagggctggcgttgggaccaggaagggggcacagggtggccgggaagggagaagtagttgctgagcaatgccatgggaggagtggttgccgtgcaacaatccagagtcttgggtaagagtgaggggcccctcagggggggaagcagaggcagttcaggccccagagcagtgcctctcccactgctgctggagcaaggaggggcagccacactctgctatctccaagggcagttcctatggaaagggcccggctttgttcatttccggggggaatggggtgagagtccacctccatccttcctctccaaatctactcttccttgcagggacccgcgtcctccccaggttacagtcctgggtccctgcatggctgcatgttgtctgcaggccacatctcctcaggactcccgcactcatcactttcccattgctatggaagagaggtgtcaaggtggcacctgcctccctgtccgtagtgctcaggtgtgtggctaccagaggaaaagccactcccaacctttgccgacaaccatcccgtttctg

SEQ ID NO: 4786 - DNA, 6000 bp, Homo sapiens
acactctgtcacccaggctggagtgcaatggcacaatctcagctcactataacctccacctcctgagctcagatgatcctcctgccttagcctcctgagtagctggggttacaggcacacaccaccatgcatggctaattattaaacattttttttttttgagatggagtcttgctctgtcacccagactggagtacagtggcatgatcttggctcattgcaacctctgcctgctgggttcaagcaattctccttgccctcctgcctcagcctcccaagtagctgggactacaggcgcatgccaccatgcccagctaattttttgtatttttcgtagagatggggtctcaccatgctcgccaggctggtctcaaactcctgaccttgtgatcttctcatgtgggcctcccaaagtgctgggattacaggcgtgaaccaccgcgcctggcccatttttaaactttttatagagacagggtttccccatattgcctacgctggtctcgaactcctgagctgacgtgatcagcctgcctcggcctcccaaagtgctaggattacaggtgtaaaccacctcgcctggccttaaattttttttttttttgatacagagactcactctgtcacccaggctggagtgcaatggtgtgatctctgctcactgcaacctccgccggggctcaagtgattctcctgcctcagcctcctgagtagctgggattacaggcacacaccgccacgcccagctaatttttttgcatttttagtacagtcggggtttcaccgtgttggccaggctggtcttgaactcctgacctcaggtgatccacctgcctcagcctcccaaagtgctgggattacaggcgttagccaccgcacccagcaaaatttttcaaatatactttattgaggttgaatttacatacaataaatgcattcattttatgtatataaattgatgagtttgacaaatgaacatacccccttcaccaccacgtcaatcaaagtaaagaatattttcatcacctggaaatctcccctctcccagcccaggcaacatgatgtactcttttacagttctgcctgttctagaatttcatataaatggggtggaagcacatggtacatattctcttgtgaacggcattttggctttcttcactcagcatggtttttttgtttttggtgagacagagtctcgctctgtcacccaggctggagtgcagtggtttgatctcagcttactacaacctctgccacctgggttcaagggattctcctacctcagcgtcccgagtagttaggatttttttcttgtatttttagtagagattgggtttcaccatgttggctggtctggtctcgaactcctgacctcaagtgttatctgcccaactcggcctccctaagtgctgggattaccggcatgagctaccatgcccggcccactcagcatgtttttgagattcatgtttgcaatttttttcattcagaagtattttgaggacttgtcttcatatatttatcttcagtttttcattttttacactattccagaatatgaatataccactacctattttttagaaacaaggtcttgctcttgcccatgctggagtgcatcagtgcaatcatagctcactgcagtctgtaactcctgggctcacatgatcttctggcctcagcctcccaaagtgctaggactacaggtatgagccactgcactcagcctatataataattgaaaagtggacatttgaattaagtttcttcttcaaatattatgaacaatgcccctataaataatcttgcacatgtttcttggtacacatgagcaaaacttaatttctctatggtaggagagaaactgttggaccatggattaggtacatgtgcaatcttaccagacaatgaccagttattttccaaagtggttttactaatttatactttcactagcaatggttgagaatttagaaaaaatttttaagcaaaaggaatattgctctgaactagaccaagggacccctgaatagccaaagtattgattggttcatgatgtgctagaaactaaccctatgtctttctcatgaggcaggcaggactgttaaggtttcaagccaggacatcctcctagagccttttcatgtactatgtcagcaaagaacaaagaggggaaggttaatagcacttgttaatgaaagtacagtgctctaggagttgagggagtcatgagctctagctctacaactaacctgtttttcattcagcaacaaattacagagtacctgctatgtgtaggccctggcactaacctgtttttcattcaacaagaaattactgagtacctactatgtgtaggtcctggctttatagtcgtgaacaaaactggcatggtgcctgcattcttgaagcttacggtctagcggaagagagaggcatgttttaaacaaatggacaaacataaaaattatggtaaatgctatgaaggaaaaatcagggtaccatgtgaaaataaagagagggggaacctactttaaaataggtaataagcattccttttttggaagtaacatttaagctaagatcaaaagaatgaatgagctagccaattgaagaccattccagatcacaggagcaaaaagggtggaaaattcagccagtggagctgggtcccagtgatctggggagagccacacaaaagggggttggtaagggaagcaggtgtcttttacttagaagcgaaagactaaagaagcagaatgagagtggcagtgggatagcaataattctgattcacaaatgttgggtttgagatgtctactacaaatctaagtggaaatgtcaggtaatcagttggcaatatatgtaaggaactcaggaaagagttctaggatagagataaaatttcatctgtagctaaagccaaggaaaggaagacagtcacctaaggagaaagtacagacaaagataaaagaccactgggttattcacttcctatacgtcttctggtaaactgcctccttttcttgggcttcttggtaacatgaatggtggaattagatgatttatggagctcctcttaagtctaaaattatgtaaaggtaacccttctcattgctcttgggttaaccttaatgatctcaaccccatcctaatcaaacaaaaaacactgggtagtttaagatgagctgggaaatattttactacaaacagttgggaacttcgacccaagcccttcattctgcagatacaaaaacagaagttccaggatgagccacatgcttgccacagcactgagcaggtaagccaagttccaaagcgcacagtgcctgctcaacttagtaagtacaaggacaagtgcacgcaaagaaacatgagaattaaagtcatcactaaaggcagaggaaatctcattcttgaccctaaaagatctggagaagtatgtttaacttgtgccctaaggacctaccttgggggcattgtgtcccacagggacatgaggtccccttcgagatttcattgcaaagcgcatgatttgcctcttcacaaaaataaatagcagtacaaacacctgtccaaaaagatgtaaaaatcctttaataaaaagtcagttttgttttgttttttttttaaaaaagcatgccttcattccaaatccccagattccggctctcaggaatgtttcagggtaaaacttggggcaaagcaaggccgttatgatgggggtggatctaagaagccagcagcagggaggcgtggggtctgtgctctagcgttaaagggagggttctagactaacgagggcgggtcggcccgactaagtgacttaaactcccacctactcctggaataaggagtcaaagcccggataggcgcaggtgagtgggtggagaatgcagacggggtacagctcaaaaggagggtctctactgggtaagatgcgacagcaggaatggggtggggtaatctcctcaccaggctcccgtaggccatcaccagcacgacattcaccccggagagccagttactgccggacgccatggcctccctacctcgcgcagaattgttcgggtttaccccgctgtcctggctggtcagcccaggctccgccgaagcgacggcgcctgggtcccctggagctccccggccatttccttacgggggaagaccaagccagacccggcctgaaaacatggcggacaggcaggagagctgggaaaggagaacgacgccttccagcttccccctgacacgtgactcaggcaggcaatggcacccaggagcgtcgagcgctcagacgcggaactacgacagtaagaggaagcggcggccatccgtgcgtcacgtggtggaggcagggccgccgtgaaggaggcggggtggactcgcggagccggaaagaggtgtctcgtggcgaggcggcacgcgcacgcttgcgtgcgcgccccttttagcgtcacgcgctgagggacgcaggaaggcaagtgggcgggggaaggcgcgagagcgagcgcgagagggaaaaggagggagggggtggggaagagggaatcttatatcacgtgacaggggcggcgcggcccggggtgtcagtgtggaggagactgaggtaaagttgggagcgcagcggcgttggcggcggcggcggcggcagcggcagcgcggcggggccgggtattgtccgcggcccctttaaatccgcgatcccccttttaccctccctcttttctcccctgcccccgccgtatcccctccctcggtaggcccccccacaccgtgtgttcccccactgtacacccccccccgagtcatgcgagccctggcgccccccacctcgagtcggcccccggaggttttgtttatggttgggttcgcggcctagtgggccgcgccagagccggggcctcgatttgggagcgtggccggggcggggcttggagcagccgtaggaagggggggccatgcggctagagcctgagaggggagagcgagaaagagcgcgagcgagcgaggcctgggccttgcctgaggtagggctctctcttcaccccggccggtgcctgcggaggagagggcctcctccctttccacccactgcgggcctcctctgatccggatccggcctggtttgggggtggcgtgggggagggagggcgatggggtggagctcccccaaactcccccatgtggccctcagtttggtgtgcgaaggattaatttgttccggctgggaggtagggaggagattggccccgtgggctctcgatgtggcgctgaggggggtgagcctcccatcctccacccgtgggcttgcgtcccctctccgtttccaggctctttgtcagctcctcttattaccctcccttctttctcaccaacccagttcttggaatatgtttttgctgctgtctttagcttcctgtttatactgtagtttgggtaccccaaacaattgtgttatttgggaagctggacatggaggcccccatagggtgtatttacgcttaagggacgtcactagagcactggggtatttgttcactcttctcataatggtacaggaatgcccagtttcttcaaacccttaaccttgtggacagcccttaaattgctttgcaaactgatgtcacaaactggagactgctccttttccaccattcttgaaatgtagccacctctggtgtaggatgttgtggaaagaaaaacaccacagtaacaggcgtttttgttattattgttaacgtttttgcctttgactctccctgattattaaatggagaaatcctttttttttgtcttctctcccatcctaccttcctccgccgcatatcctgttttggggatacctgatgtgacttgctgggaggtgatggacattactagtaaccagcgtttctagagaattaaaacattttggctgtgtatcagttgataaaactgctttgagatctgtctccattgtacttaaagattagactatcccaatgattacagaga

SEQ ID NO: 4787 - DNA, 6000 bp, Homo sapiens
taagtatattctcagatctaggtatattcttcatagatgaagatatatctgtctcataacaatccagtgaagttgaaatttgtgttatcccctaaactgaagcacagggaagttaacttgcccaagtcgcacagtgaaaaaatgcacagccaagatgacccaggctgtttgactccaaagccagcactcaccctattatacaatcctgcctacaaaactgaagtaaatcatgtttaagactacatcgatttttcgcatcacatttggacagattaattatctaactcactgttactaggcatgaaagtaccaaaaggaagagaaaaaaacaatgtccccaggtaaagaaaagaaaaaagtttgaaggataaaaggagacactttataatactctaacagagggtttctcaatcttgatactgctacagtgtggagagaataattctttgctggggggtaggggcctgtcctacactgtaggatatttagcggcacccctgccctctacctactagatgccagtagtaccctccctcccaaatttgacaactaaaaatatctccaggcagtcacagaaaactcttggggagcaaattcacccccagttaacaaactcttccccagtgtttccttaaattaggaacagtgaactaataggcccaagtgagtttgtctttgcttttggtaactttggctatgttaaattaattactggtgtctttgagagaatctcagccatccacctccagatcaaagaaataataaatccgcagcaggccttttgtagaggacaggatcccagcctattcctactttgctgagaatgtatcagtgaaatgactccaaacgtggacaagagttctgcagcccagatcacaagtgcttatgtccaaatgttgacgaagtcttaacacccacaccaatcttcctcacattcatttcttcccacaatcctaactttaaaatctgtcatcttctttcttagatgaccatgaaataaaaaaggaaaaccaagaaaagttttagggtatgcctgatctggtgttacattagaactcagacattcatagttcaaacacgcaggcaatctttcagattggatgacaatcattatgataatttcttcaggtacgtgattatcacatagatcagtgaatcccaaaccaggatgcatttcagaatcacctggaaagcttttggggaagaggggaaaacaggcacagattcctggggattctgaagtctagaattctgttttgaaaaatttcccctggtgattttgctataaggtcaggtttggaaaccactcatctggacccagtgtacagatgtgaaaactaacgcccagagaggtgattggctcacctgcagtcaccatactactcctggggaaccactcatgtccaggcaagattgtgctcatgaataccagcacatacactgagagacggtaaatacatgatcaacacacagttccgttcagttcaggggaccaagtcagaccacggcaatctcatctaacacacactccgcctcttcctgttccctgcacacttttcttctcaccttcttcccgtatttcctaagtgctcgcagttgcttagctttttcagacctctccatggcagcctgtttagtctgcagcttctgtcgaatctacaacacaaaatgctgtcagttcatgtcatttgaatctggaatgaccactacttaggattcgctagagcagggaacagatattccctgttctttaaactgcggaacttataaatcatcagttccaacccctgaggacaatggggcccacaggctgagcactttaccaaaagtgccagagtgaagccagagattgaaagtcaccttcccgctcccagtgtgctgtctgtttcattatacaaactgcctatttgtagcccaggaaagaagacaaacttctccccatttctactgtcagtagactgaggctggaaaccagtatgcggcctcagtgtccttttctagtataccacatacacaataaaaacccaggcagataccaggtgcctagccttttcagtcaaacatacacattttagttaaaggatgagaagttgtcagtgagaatttgtacagagttcacagtaagaaggtgaactactaccacgacaaaagctccctaaaatccagcttgagaccccagggtactatttaaatatacttatccctcagtatccatagaggattagttctaggacccactacagatatcaaaatccacagatgctcaagtcctttatataaaaatggtgcagcatttgcatataacctacactcgcctccagtatcctttaaagtcagaggacctcaactcccaggccacagaccgctacgaacccactatgaatctgtggcctgttaggaaccaggccgcacagcagaaagtgagtgacaggcaagcaagcattaccacctgagctccacctcctgtcagattggtggtggcgttaaattctcataggagtgcgaactctactgtgaactatgcatggaactatgcatgcaaaggatctaggttgcctgctccttatgagaatctaatgcctgatgatctgagatggaacggtttcatcccaaaactatcccctccccaagttcatgaaaaaattgtcatccacgaaactagtctctagtgccagaccgcttctttaaatagtctctagattacttataataccgaatacaatgctatgcatcacctcattctcatggattcaatgtagttctcggcacacggaaaattcagttttccttttgcaatattttcaaatttttttccccaatatttttgatccaaggttggttgaatccacagatgctgaacccatggctatggagggctgaatgtatgttggattacatgctggcaatcccttcttccaaagttaaatgaggtccaagttctacccaactctaaattgtactatatctgaaccatctaagaatccctcattttacagaggagaaaactgaggcccagagaaaagtaattgtctacaagttctagcactgacagtggcaagggcacaagaatgctgtcctctctgcacaccatgtcatgaccatgccagctaggaaatgcactgggccatcttcacctcggggaccacacttcacacagcactgttcctctccttaattgctgattttagaaaaaatgtcatttttatatgcatctaattggtggtaactggcatgactctgaagtagccaatctatggaagaggtaataattgtcctctgacaactggctccccgttattgggctcatagctatctttctaagccagctgaatatgcttaagtacaaagttttgactttccagaggaaaacttctatttcttaccttctgcatctgcagatcagatttggccatttccgcaaaataatcagtgggtcgcttcgtagggactttgagctgatggaggcggggtaagactgcaagcactgcggcctgggcttggcgatagctgagaatcgtaggacaaaatgtgtaatgaggtgaaggaggaggccttacgttccttttcaccgccaatcatgagttatccaagctcagaaggactctcaaaatctgacctccattagcaagaacaaacaaacaaaaactgtctcactgatttagtatctaaaagaaatgtagccgtatactagtttttaaaaaggggaggggtgttgctaaaaatagtttaagagaatgactactctaaaggtacccattaacacaaacgaatgtcgattatggattcttatgtaattactaaagcaattccacacaagaacatcccataagcaatgtttgtttgtttgttttcctaataactgaagcatgcacaaaaagttttaacatgaatatttcaaattagcccataaagtggattttggatcgtgaccgtggaccaaagagctcttctctcaaacaggaagaatctcctagctattcttagtcaaaagaagccgctctctctactcctaggcttattctgagtgcagacttactaatttcccctctttcccactctcctgcacaaggatcctcaacttctccaacatttgaaaacaaacatacaaactcatctctcgctggaagtcgtcttctggatcaacagctttctggtccttgttctgaggtgctggcgcctcagatccaccgatctccggtaccggacccagtgtcacatcgagcctttcaacccattccagatcccgcttgaattctgccaaacattgcttcaggccattctaggaaatccagacactgagctcacaagaagggaactctgagtttgtctttcccaagcacaggctgttaggcgaagggacaaagtgctaatccccaatacccagacaggtaattgaccctcttggcgaggcgcagggtgcatctttcctgggacaagaatcggtctcccaagcccaacagcgcctgaagcgcatcccatgtccgagtacccccgaccctgtgcccacgctcaccacgtcgttcacggccttcttcggcccctctagcacgacattgaggcctggcttcagaagccctcgggaaaacgcatcctgcaactgcaggacacaatcacggtcactcccaggggtgtaaggccccctctcccacgcccagccccacgagctcggctgacacctacctctctgtctgtgacaagggattcatcggattccgactccgaatccgagagcgggggagtgtccatctcgccgcacgcacgtcccacacctacaggaagaaacggggtatcccgagacccaagcggctagcagagggcggccctggccgctgctgcctgccttcagccccctactcccacgccgtggctccacgtgccaccgaatcgctccagcgccagcaactcacagctactgctcaacttttgattgggacttccgcttccggcggcaaaccatacttccggtttgtcgttgctataggaaccgctacggcgtttgaaagtgtccgggttgcttaggatccctacaggtagcgcctctggatacatgcgtggtctgctgacccagagagaaacgaaaggtgggagggggtacctgggggtcgccagaaggagctggtagcagtgagggtacaaaggaaaaggcagaaaaaggagccgcgggggtggggtggcgcggaggaggaccccgggggaggggaaaggggagggacaaggggaggggaaaggggagggacaaggggaggagaaaggggagagacaaggggaggagcaaagggcggggagggcgagtccgggccgggggcggggtcggagcggggcggtgctctccactctgaagcgctgccttggtcttcagcagaactgtttggcgggagatcatgtcagccgtggtagctcagacgctgcatgtttttggtcttcgatcccacgtggccaacaatatcttctacttcgatgaacagatcattatatttccttcaggaaatcactgtgtgaagtacaatgtggatcagaaatggcaaaaattcattccaggtaaaactttttccatcctgacatatacaggaatggtatgtgccacatataaccccataatcccagcatgatgattggaaagaaagattttggccaatttgaatatatatgcagtattataaatgtagaggaaataaatggcgacttgtattatgaaactagattaatcagtcacgcatatgtagttaaaatcacatataaaatgttaatttaaaagtacttttttcactgtaatttcatgaaaatatgttaagaacccctcttttggtgtcttcaatatcactgcctttgtcatcaccagagccactttttgagttgtctaacagttttcctgagcacaccaccttcattatatcaccgtttgaatccaagtatgatgaagacactgtaaactttatcccaagtcgcaaataaccatttgtatagcattacagcccttatttttgttcacagtggtcctgt

SEQ ID NO: 4788 - DNA, 6000 bp, Homo sapiens
tccagcacgatagacaaataatctcaagagcacaggtaatagtacaataatgagaaaatgttaagttatcagtatttattaccttttttaaaaacaggatttaatcgtaaatttacataatttaatatttaatttttttttttgagacagagtttcactcttgttgcccaggctggagtgcaatggcgcaatctcggctcactgcaacttccacctcccgggttcaagcgattctcctgcctcagcctcccgagtagctgggattacaggcatgtgccaccatgcccagctaattttgtgtttttagtagagacggggtttctcgatgttggtcaggctggtcgcgagctcccgacctcaggtgatccgcctgctttggcctcccaaagtgctgggattacaggcgtaagccacagcgcccggctatttaatttttaataatggctgtgttttaagaatgggctcacaaacttcatgaaaatttaacaatcagctcttgcaagccaatagaagactgctgtagcacaccactggaaagagaatataaggaaaataaagctgcggtcagggcatggtggctcactctgtaatcccagtgatctgggaggccaaggcaagaggatcaatcgtttgagaccagaagtttgagaccaggttggcaacatagtgaggccctgtctctacacaaaataaaaaaaaaaaccagtcaggcgtggtggtatgcgcctacagtcctagctactgggaggctgaggagggaggatcacttgagctcaagagttggaggtcacagtgagctatgactatgccactgcactccactctaggtgacagagcaagatcctggctctaaaaataattaattaaaaagccaaaaattaacaacaacaaaaaaagaaaattaggcaactaatgaggaaaatgaggaatagtgattggatagctgttttagattcaatggttgtggaaggcctctctgaggaagtgatatttgagttgggacctcaataatacaaagagccagcaataaaacttctgagaaaacatagcatgccacacagaagggactatgagcattcgagggaagagcattttactgtctgagaaacagaaggccagggtggctaaagcccagtgaacaagaagattagtaaagtcagagcaatagcagttaagagatcatgtacagtcttgtgggacactgtagtaaggcatctgcatctttcacttggactttaacaggaagtcatcatctggattatggcacaccagtggttacccatcctcagtcttcttttcattctagggtctcactgaatgatttcaggctcaccgaatgctatagatacaacctacatgctgaaaaatctatacatttaggccagaccccctctcttgctctggcaccatatttctaaccctacttggatctcttccaaacactatggaatgtatctggctcataacatgataatccacaagttaaaaatcattatatttctctcttacatcacaaactgaacacaccccaaactgaattctattaccctgaccaaacctgctcctctccccatatttcttatcaatgaaaggcatcatcatctgcccagttgccaaatcatagaaacccaacagtgaacttcagactatgctattttccttagccaccacattcaaatggttccaaaggatgatgatttactgtcctaaatatcacataaattcatcaatttcccttcttcctgggctcactgttactgcttcattacttctctggattactgcaatagcattctaactgatctccacttttatgcatcagattccctacccaacctgattctcttcctacagtctctacttaggcaaaacaggttacctatacagataatcacaccagaaacctatagtcttctcagactttcaaaaatataaatgtactttggaaggccaaggcaggtggatcacttgagaccgggagttcgacaccagcctggccgacatggtgaaaccccgactctactaaaaatacaaaaattagccgggtgtggtggcaggcaactgtaatcccagctacttgggatgctgagacaggagaatctcttgaaccctggaggtggaggttgcagtgagccaagattgtgccattacactccagcctgggtgacagagtgagacaccatgtcaaaaaaaaaatacatatacacacatatatttatatatatatgtgtatacacacacacacacatagatgtaagattaaaatctcccataaagttaagattttatccctaaggatatgtaaacacgacacataaaatttctttaggaaatatctgcctacttccttactttgtttctcatgtctcctttcttccacccaaatctaactaattctaaccccaaatatgcaagggagtagttttttttacatcaacatctaggacagttttcctctccctcatctgccattcacagctcaaaaactcagctcatgccaggcacagtggctcatgcctgtaattccagcactttgggaggtgagtagatcacttgaggtcaggagttcaagaccggcctggccaacacggtgagaccttgtctttactaaaaatacaaacattagcagggcggggtggcgtgtgcctaaaatcccagctactcgggaggctgaggcaggagaatcgcttgagccccggagatggaggttgcagtgaaccaagatcgagccactgttctccagcctggcaacagagcaaggctgtctccaaaacaaaacaaaaacaaaaacaaaaacaaaaaaggaagatcagcttagatatcaccttttcttagaaaccttctccaagttcccaaactggtcaggtgccccttcttgtctctcccacaacacgctgtgcatgcttcaatcattgcccttaccatacttaactgtgattgtttgtttacttttatgactttttgtgcccttaaaggcagagcctgcatctgtaacttctatatcttggaaactgagaataatgagtaggatactgtatatattcctaatgtttgctgcaatcagcagtatcttctacgcttctaaagtgctacttttagatcagaatattacacaataacagcgtagctggggaaataaaaacagcctgaagtactaagaaaaagtaaggttaccgtggaagtaaaggttatccagtcacaaaacagtagtgagaactaccagtaaagagtgggttgctgtccagcatcagaactacagaatgctcagatacaactgccatagtttttcacatgaaaaagtggactcaagtcttattaaagaaccgttggtaaaggggaagtaaaacaaacaaacaaacaaacaaaaccaactccttcctttaatgtacaaaaggaaaattccaaccaattcacaaaccagttgggagcttaaaaagctacatgttaaaagctggatctgcacagcaaccctcttcccttcgtgcctgctctggagtagcagagtcagaaaacaaagttgatatccaccacagaactgtggggaagataagatcaatgaagagatatatctaaataataaggcttataggcagttagcaatcagaaaccgaaaggtcttgatagagagggaacagaagtttctccatgttccaaagaatattggtgtctcaatttgaaggaacccatatattctctttcaaaactggggtgtttatcttgctctgctgtgttatccctgttttgacctttctgcacaaatgaacactacatttaagccaaaattggacagtaatcaccaggatatgctaatatgcttttaaaatgaattctttcattttctcctaaagtagctaaaaactaatttagtggttaaaaacaacaagaaacaaacaaaaaccaaaccagttgccccaggtctgtgcaatcctgaaggctataaagctcccatctcataatttcttcatgaaaatcgtgggtgaccaacatctgccagccaaaaagacccgttaaaaccaagagaggaagagggggttggaggaaaaaaagacaagcgggagagaagctgggtggcgctggctgtcctccaaaatgatttgtggaaaaggtacaataatgactggaagacaagaacaggcaataaaaatgtctagaagttctaaattttcctgaagtgtttaaaactctattcccacatacaagccaagtgctctactcccaggaatataacagcagcatagggcggggtgcggagccacaggctatctcagggcgggtcaaacccgcaagtttctcaggtttgcccaaaaggtagctcgacatgccctcgctagagatggggagactccaattctcattcctcattctcgtgtccaggagctttctgaaggccccagggcctgatagaaagaaagagaaggaaaaagtggaaaggaaccaaaggaaccataatccgtagaaacttccaaaagcatgcacacacagacacacagcgatacactgttgtcctggaaaccaatccaaccaactaacccctcctcgggagcctaggggccagctcttttgggcaagggtggtgggccggaggaatagggactgggagaaaggggtactatttcgcgcggctccgctctgggcctcttttccctgggcgcctaccgagtagaggagcacgacagcgctgggactggttgggccaacggagaaataagagttagatgaactggaagactccatggtgcggctgccttcccgggcggggtctgggattctttgctaagccgtggtggtgctcctgctgggggcggttctttcgctcaggacggccctacttcgcctagggcggcggcaccctctgcagccgctacacaggatcccgggcgccgccatctcagccaggacggaagccgcgcagggccctgcagcgcatgcgcgcagtcgcggaacccggaagcgggggtgcagcgcggcagaatgagggttgattcctcggctgaccccacaatgtcgcaggagcaagggccggggtcctccacgcctcccagttctccgacacttcttgacgctctgctccagaacctttacgactttggtgagtgcggggtcccaggagcccacgtggagaacagatttgaggaacgtgggtctcctgtgttgcccgtcctgggttggcctctgctttgaggctaaaggttcttgcatgtcaagcacccttcgtcccacctggttccagtagcgaacacatttctccatcggaagtcacccctcgaccgggctctgctgagttattcatcaaaccttccaactcgtccccaagtgtggggaccatcctacttgcttgtaggaagcaccaaggctttccgatttaaaagtagcccgcttttccacgttttcttgagccctgggaagtcccctttccccatgccacccccaagacctgcctgaccctggtgcgatggtgtcatttcgctctggggcctcgggcctgttggataatacaccagcttcatccttgtgtgtccctctccagagacatcatagtccttggcgagttgtccttttcacgacttttttttttttaaacaagtgcgctgatcttttactctccgttctttgtcttgatgggggaaaaggaaaataaaagagcctattaaagtcgcatggcatgtcagtaggaagacagtgcctcatactctgaagagctttcccgggagaaggtgacaccctttgcacatgcaccaaagaaaatcattagatttcaggacaacacacatttcttaaatttacagcgtgatattttaaaagctatttttattttggaatgactgctcaaaattctaagttcacctaaacagtaggaataatagttaaaactgttgagaacttgccatatagcacatgcttttcgtgtatttgctcatttaattttcaacttcatgaaatagacactgtcataaatccatgattgcagatgtagaaacaagtactagaagttcatgaaac

SEQ ID NO: 4789 - DNA, 6000 bp, Homo sapiens
gctcgagctgggacccctggttttatatgtgccattttttttcccatcaactttactctatgccttgctaatatatttcaggggttgccaagggtgagcgttctttctccagagtaaaatctgaagacagatctgaatcagaagaatccaattcaagtatctgcctctgactcactcagtcgagttttctaaagaagccaatctctgcctcagtttccccatctgcatgctaaaggaaattgtcacaggtcccttctctccctaataaagggaggttgagtcagatgctgcagaagacaataggaatgacaatgacatttcccgtaagcgtcactgctcagagaacagaaaaacagcacaggcctgatgagctgattactggaactgaggaactgaggaactgaggaaagaatggaggtcgttcatgcatggcagtgggtaatccacatgctactgatagaagagtcaggaacacatcctgcattgtatttctttctagaagaaatttacccttctaactatactttgtttaggattaggagacttagtagttcctcagcatgcacttagctaggatttatttctaaggggcaagggatgtttgagaagcaagctcacaagttcaactctgttccaattcagagttggttaacatttattgaacactgacaatgctctggacactgtctgagacacttttacacacaacatttaatttattcccactaaaatcctatgataaaggcttttctgcccaaaggttacaggtaaggagaaggaagctcagaagtctctttcaaagtggctaagttctgtgtatatgggagctgacaattttcaaacagaccattgatcacctcactgccaaatggctttcctgatctaggtgttgcccaatactgatgttcccaagagaagacagcaagatgcagagattcctttccctgtcttccccaggcagcaatgagcaagggctcatgaggccttgcaattccagtttcagtcccatcctcaatttgtgaaagcaagccatgatcaccctctgggcctcagagtcttcctctgtaaaatgagaagaattggacaggaacatgacaaaagaccctttggctcaaatgatccctgattccactggatccaggacatcaagtctatagcttaggtctcattgagacctcttaatgacaatcacccatgcaaagaaggaagtagagcatctgggcttactgctgtgaggatggagttagcctgagcctcaaggtagcaaagggagctctgggaattcctgctgaggctggtgctcagcacagggcacacaacctgtgtcacttggaaaccaggggcaatccaaggcctagttcacccacagaacccctggccaccttcctagagagtaaaggagaccaagctcccagactctgagccctggatctttgacccttaatatcctgttttatcccagaataaagctcagagaggcagaatcttgagggggttcaagaggcaaaaagtaagagatcactgaatcagaggcaccctgtggaaccctgtgtggccagacacacagttctgccccctgaaagggtgatgcccttcccctttcattctcctagtcctgctctaccctgattcccaagctttaatgccaggtacctgcccctgccaagctgagtcccatcaccttctcctctctaccctaagccaatctccaaggaccaccagtcctttacaaactgctttcagatgaataattgagagctcaggggaaggaaaaattaacccctccctatcttgggaccataaaagcttctggtcccacagccaaatgtttaccccatgcgtgaatccagggcaatcttcctaaagaaggccaagcaagcaccaggctgtctccagaggctcagcccctgtccccctggtaaaacataccaaaaaaggagcaattaccccattgttactttctctgtgtgtgggggttgggaggtgaaaggggaggacaagtgtcccaccagataccatatccaaggccacactggccatacccaccccacaacactgcaggaatgacccactcaagtaggccttctccacagctcatacagcagcattcaccccctgacaggagccaacaccttccggagctggcctgggtatgaattcctgcaacaggcacaacagtgcggccccatttccagccaatggcactgcacatgcctcaaatgccaaggttttactaggacgtggacgccttacaaatgaaaaatctgaagctatttttgtttttggcagaagagtttgacagtgggaaagatagggggtggggggaggctggaaaagaggcattcaaaacaggtaagctctgaaatgaaaaaggtgacaaatcctggcaaaggaaaacattttcccctgctgtaaaaagtcagttactccattaaacagcttctattttggaggtaaaaggccaaaagggggtggagtgaccagacagcttgtcctggggtttgacacctagctgagtacaggcataaggcagcaaaaaaagtcatgtcaccaaggtctgtccttcaatgacctcagtggagagcctctggaaacttactttccacaatctcacatcacatcccctagctcagaatggggctggtctgggggcagaggaaggtgcccatgacccggagggcttctcctgtgttcacaggattttggtaggcaaagcatgaaactgacaaggtgaaccaagctggggatccttgggggacaggcttgggacacacgcacagatcctcttctccaacggtgccactcctaggctagccagggcactttcctgaactctttttctccagcctcctcaagagcaaaagggaacaagctactaacctctttctctggggggtcccttgtatacttgcattttgttgcattcaagtagagacgaggaaaaaataaacacatcagttcccttcctgtgtgccaacaggtccacatggggaaatgtacacatgctttgtattgaattcgtggacacccaggagccctttctacagacagtaaacatacaggctccctcgaagtaaggtaaacaaggcatacatttgaccatcacgtacattcatgcaaaatacagcaacgcatgcctggtcttacaaacagatcgcattgtgcctaggaccccgagaaagttcagacgctctctcttaagaaatacggaccctttttcttgcagtgcgatttcaggtctggaacctcagcctgttgctgacatatcagggctgcccgggataaaagcagaacatctcggatcctattcaaatgtcaacactaagcaagcgcaggaatttagttgagtccaggtaactttgcccagtcccttcccgtcccccacctccagtgtaaacacctcgcagagtgagtctttcgatccctctccccggggccgcgacggcccttggcgtcacgtagagacctttcccagagctcgcggggtggaagtggcgtcgggcaggaccagatggactggcccccagcctctggtagacacaccgccggctcgccgagctggagaactttgcgaagcgccccaaaccgctccgggtttccactttcagccatttctctccttgtcccctcaccaagagcggggacggagcaagccttcgccacctgtctctggcacccgccgagggaagacaggccaatggaaagagggcagaggttcacaccccacccccgaaccccagcgcctggctgcccggaggtggctccacagcccgagggaaccgacgcccccgggccggctgtctgctcccccacggcacgggccccacccccaatccttccggcgccccagcgcccacccacccgggcgcgggagtgggagggtgccgcgtgggcagccggagcaacaggcgtgggagcagcgctcctcgcacttcctggctccagaaggctcggtcgcgtccctcttaccttccgcgaagccagcccgggccccgcgcccggcgccccgcgcgcgcgaggaagctgcggccgggagccggggccgcggaggcgccgagcgcccagcagcgcggggaagcgcccagcagccgccgctcgcgcggctcctcctcgccagcgcagtctcgctcgctgcctccctcgctcggtcggttcgtgcgtccgtccgtccgtggggccctccctcccccgccgccactgccgccgccactgccgccgccactgccgccgccgccgctgccgcagcctccgccgctccagccccggctcggcagcgcgtcccctccccgcctcgccgctccgctcgcgggctcgcgggctccctcgctctctcccttcccccgccgctgccggcgccgcgccgagcggagcccggccggccacgggctgcctctcccgaggtccctttcccgagggggggaggtggtgggggcgcggcgcaggcggggcggggaggagaggagagtccgggggaggcggcaaggctgcgccctcggctcccctccgatccccgcgggcccagcggccccaggccgggccggagagcgccgagccgccaggcagtggaggaagagaggaggaggacccggagtctcgccgcgggagggtgcccagggcgagggcgtgcgagggggagtgactccgcgcgcgagggtgtgtatgagtgtgagtgcgtgtgtgtgtgtctgtgtgtgtggagaggggcgcgcgcgtgagcggggggtggggagacgaggcagagcctagtgcgtctccccgggcgagtggaggaatcctagggtgtgcctggaggtggcggagtgtaccgacgcgggtgtgagcgcgtgtgccagcgagggtgggcacgggggtgagcgtggcaaggtgagctgggtttgggggtgggggaggagcagggagtacggcgtgagcgtaagttcgggggcgtgtgtggctggggacccacggagaggtggcagggagggccggcgtgtgcgcgcgtggggtatgtgtgcacctagctgtgtgtctatttctcgctgactgtccacagggcagcagcacctgcttgagaccaagcccggcgacctggcaaggtggggccccctaccgcgcaatctttgcggctggcccccggctctcagctccgagtgcagaggctgaagaggtacccgggggacacactgcctctaaccccacctatgagccgctctcctctcggaggacgaaggcaccatcagaaggtcgagattcgccctcctctcccgccacgtctacccactacctagaccgggagtctggacttgggagcgtgaactctcacccgagccggtccccttacaactggagcccgcccagcccctcagtccctccctgaagcccatgggtccccactgctccgtgcctcgtcgacccaggatggggagtgggaaggtcagcatgtgcccacagggccaggtgtccggcccagattcccaccctcagggcggcggcgcgcaaagggcgcagtccccgccgctgggcggacccgcggctccggctttcccggtgtctccagcctcggtgcccggaatcctggatctcggcctggcgctccggaagcgaggcagctccgtgccccagcagggacggggaacgcttggcttgagagatcacatttctgggtgtggagaggtgggtgccgaggcagagaaatgcaaagtgcgttgtgacctctggggtgttctagactgcgagggtgttctagaccctaggacaattgtagacccagggctggaaaaggacctccctgaatccggaacggggcttctggcttgtgagaacccctagccctcttccagatgaaggagtggaagtcggtaattgtggtctgggcccttgtggcccctggcaccttggagtccctcattcactcactcttactttttccggagcccccttcagtctgtcagtttgaaaggtacacaattggcccttcaggaggtgggcgtgggctccattagcgtttgccaggagtcccgg

SEQ ID NO: 4790 - DNA, 6000 bp, Homo sapiens
aagactccgtcttaaaaaaaaaacaaacacaaacaaaaaaaacaacaacaacaaaaacacaaccaagcatcatgggtaggacccagagcagtctgaattcttccactgagatataaccctgaaaagctgtacattcccatgtgtgagacaagtctgtttgaacttgaatccataagaaacccgcctatgaatgacatcccccatttcctatattatcctcagatctgaaaggcaaggctactaccaagccttcacccctttacattccagccaacacctttactcttcgtgattccaagctgagggtaatgggaataattaacttaaccaactgcctgaatatctattcttggataggtgctagacagagatacagcagtgaacatcacgaccccatcaacaccaccactaccaccacaccattgtccctgatttccagtacaagatatctcaaaacagagttcggaaagcccaaccgctatggagtccctgaccagactgccagttcacttaggggccagggccagaagcaagagggtctataaccagcttattctcctctccctcaccccattttacaggaaggtccaggaaggagaggtgggttgcccaaagtcagacagttgagagtgtgctgaaactccaacccatgttctgtgggtctcctctctccaccacattgcttttgccaaggttccaaaattggaaagtgaggaaaaacagttggttctagtgacagagtgtttcctgacatatgcatgcccagaacctgcagcctcaaccatcttaacaacacagacctggtgaccatgtccatctctcgggatgctcatgaatgcacagtattgatctagagtccaagtgtccagttttcattcatgctcatttatcaccttctctctctcctgatatttactttcactttaaaatcttataagaacagggcctttttttatctgatgccagctccccctctgttccttggatttaatcaatccatgtctggaaataaacaaaccagggaggaaagcaacagtcccttttgtgaaaacaggcacctttctaaaatgatctacccctgggcatgacgcagatagaatttaaatgtgaaggaaataaagacattctccagcaaccatcatatgcgttcttcctggggtgggacagcaggaatggtaactgttaacaactaaaccaaaacccactctacatctttcaggttgtcgtgagagcgtggtcagtggcaggaagcctgaagagacaataggtttcaaaacaacagaaaccagccctctcttcttcaagattagtaagagagggctagctgaacaccaactccaagtatatgcagcatgcctccagctagtaccaggggtgcaaggagataccagctagaaagatccagacatctggtcaccaacttagaccttctcccatcatgttattttatacccacctgcaaagcacagaatcctcacccctcttcccaccctccagccactccagcaagcatcatcccagactctgctggcaaaataaattgtcttacacagagagggagaatcaagttccctactagccagcccttccttcctgccatgactctccagcccctggcattcggaaatggaccaccatctaaatgcaaacacagagagtatctcttctgaggaagatgatagttaattcttaatcctttgggggatcagtttgaaaatctgatggcacctctggatgccccatgaaaaactgcatgcatgcaatttatatgtaatttcactgggggtcactgccctactgggaggtcgagaggggcaaaaagagccactgtgctcagaagcagctttgagaaagagctatgggtggtccaagtgagtattcaacagcgtagttccttaacaagaaagggagaaatgaatgccccttacttagctactgcaagttccagctgtcactcaacctgagatttcaacaggaatctggaaactgagagcacacaaacatgcacacacacatacacaccaagcactcagtttccctgtggcttcctactgtaacttcacaaaatgtcctgtgattgctagttaagtctccaaacagagtaacagaaaagataagaagtggaagagaggtgggcgctggaagggaggatggttcagacaaggagaaggggataatctggctaagccctccatcggctctgagcaggtcttgacagggcaggtcctgatccttgctgcctgctcttcctggaaatcagggtcgaactgctgacttcttcgcagcaaatcaagaagtccaggcagaagcagccctttctttcctttgagtccatggggaggggagagcatcctctcgtttctagggaggagaccctggcccacagcttgcccacggccccctcgtggcctgggggtgtcactgcagccccctctgcattgctgggcaccatccgcacgcaggcagttctaacagtggtccagcagaatatttagtggcagtggcaagctggcaactgtcttcaagccttgtgaggctgtgtttgcttttgatttcttaaactaagactcagacttaaagtgatccttctaaatccctcctggtacaatccctacagggaaccagctcaagatctgcttcattatgccaataacctcggagcttctgtaatatgaccactgctttatcatctcttcctgcatcatatgcaattatgtacaattgtgtacaattgttctgaagctcaataagctcaatagaaacagaatgcacaacatcctctggtttgtaggttgcttactagattacaaaatatttgcaggacaccaaatacccccttaaatcctgggtttttaggtaagcaggtcctataggggttttggacttaaggtcacacagtgaaaaagaatgggaccagtggctctgtgtccacaaatgcaaaaagagggtgcactaaggaacctgaactccactctcattagcaactccacaaagggaaggagtggagctcactgggcctgggggttggatacgacataccagagtctgggagtgagggggcagttggtctaggggttcagctgccatctgtcacggtggggacgattaactgacccgagtggtgggaaactgtgtagggaggaaagaaggtgggacatttgggaggaaaggggaaggtgcaaagtgcagtctgcagggccagaagtagacctgggaccaggagtgactgaggcaagggaaaggggtgggagcgccagagggtcttctctccttagagggggcagttggtgggaggagtttgggggctgagtccatacctccttgattttctcccgctgggctcgcacttggctctggggctcctgactctcatcggccctcgttcccaggaccgggtggcggagacggctccggaatgcgttgaagtcaaagcggaaagggacgccctcgtccccgggcctggaggccgggatgctattgccccgggccgccgtggcctcctcgcggggtccagtggggcgggtgcgccgcagcccccctttcctgcggcggggactggcccagctgctggggtcatcctcgcccggggccggcgcggcgggggccgggttgggaggcggctcctgctcgcgggccggggcatggccggcgatttcagccaccacttccagaccaggctgctgggtccggggggccaggaagaggcgcttgaggcgagaggagtggggcagcaggaagagggccccgaagcacagggtgaccaggcccgagaggaagaggaggaagaggaacttctgcggcagccgcagcccccacggggaggccgggacgaagccgggcactttcctcatgagcatcgtggcccggccggtggctccagaagccctcggagtccaggcacgtgtctgcgggggcgcggtgaggggagggcgtccggagcgccgcccgggatgggggtccctgggcagggttgccaaccctgagagtttcgccgcttcgggggactgtccccgaagttcagggagtttggagcgagtcctcccgcgaggaggcgggggcgcagcggcctcggcggggcccgggcgagcggagcggcacggcttggggcccgggcccgcagcgaccggccgcgcgccgcagcctcccctccggccgagccctccccgccgcgccggggcccgcgccttcccgcgctgcggccgccgggaccgtcacatgccgtccgcggcgtcccggctgtccgcgccgaggggcgcccgcaggcccgcaccaagccgccctccgccccctaggctcccgcccgcgctggtaggcgcccaaagtttcagcttcagaagcagtttccggaggggaccgaggcgatggggggctggcgtgtcagcgccgccccgagcgcgcgcacacccggcccggtcgcgacagcgcccgggctcgactatcgggacacgtccacaactttctccgccgcggagagggcgccgggagctgggagccggagtggccagggagcaggagcaggcacttccgagcctgcgggggcagggggcttcccccgggccccagacagcgcagggatgcctgggtccggagccgcggctgggcggctgcagatgcgcccgggagcgcgggctcccgcccctcgaactcggcagggcgcggggctcccactgggatcacctgttcccggccccgccggctccgcggagcgcgcagccctggccgcgcctcccccgctgcagctgtcttcctcgcagcggccgctccagaccggccgctgccgccgagcctgcgccccacacgcgcgcacagccacccggccgcctccaccgccgtccccgccgccgccgccgctcgggctttcactgcgacagcgcccgccgccccgcctcctgccgcccgccggccacgcccgccggccacgcccacgcgcgcgccccgcgccccctcccgccgccgccgcgccgcagccggctgagggccgcgcgtccgggggcggggcagaggccgagcgcgggcgggagcgcagcccgctccaagccccgccctccccgaagggcaggcgtcgcgcgcaccccccatccagcgggcgccaatggtccagcggcgcggggcaggcgagggcgggggcggagagcgcaacgagggcattggctgcatccgagggatccccgttgggccacagtcgtccattggttactgcccagccttcgctggaccccaagcgacagagaccaccccccagcccgcccgcgaggctcgggttggtggcccccggaagcgggccggagacggtgttgctctggaggggtgtgcccgtcgctgggtgacctctctcgcccccgagtgccagcccggggttgtcagggagctggcagcccgcgccctggcggctgccccgggcttctcagcgctaacgccgggctgcaggggtgctgctggtggctggagccaagccagagagctgtgaccgcggccgggtcggcggaggtgatgtttccactggccccctcgcagaccactggcgtgccttccttttcccacaaccctaaacggggccagggctcctgggtggagcacggagggaggctgaccgcagccttgagaagcagcgaaaggaagagagccccgggcgtgtctacagaagaccacacacataatgtgacggacgtctaccttgatgcctacgtgtgtttatatgcacatgtgtgcgtctgggcatagatctatatgcacacagagactggcatgtgggtgtgtacatgcactcaaacatacacttaatttgggtatggacacccaagtgattataccacagtatgcatagacatatatgtaaattagtacaaacatggacatgtgcacccgcatacccacagacactcaggcaacagataacctccaaaaacagccaggcatcaactcccagacacgcgtgtcctcaaccccaaggccctcacatcttcctccttggacttagtctctgcatcttcccttcctgtt

SEQ ID NO: 4791 - DNA, 6000 bp, Homo sapiens
tgtgtgctgcttgctttggaaactgggcctgggtccaggcctagggtgagctcactgtccgtacaaacacaagatcagggctgagggtaaggaaaagaagagactaggaaagctgggcccaaaactggagactgtttgtctttcctggagatgcagaactgggcccgtggagcagcagtgtcagcatcagggcggaagccttaaagcagcagcgggtgtgcccaggcacccagatgattcctatggcaccagccaggaaaaatggcagctcttaaaggagaaaatgtttgagcccagtcagtgtgagtggctttattctgggtggcagcaccccgtgtccggctgtaccaacaacgaggaggcacgggggcctctggaatgcatgagagtagaaaaaccagtcttgggagcgtgaggacaaatcattcctcttcatcctcctcagccatgcccagggtccgggtgcctggggcccgagcaggcgttgcccgctggatggagacaatgccgctgagcaaggcgtagcccaccatggctgccagtcctgccagcacagataggatctggttccggcgccggtatggctcctcctcagtctctgggcctgctggtgtctggcgttgcggtggtacctcagctgagggtcaaggaaggaaggtgtgttaggagaactagttcttggatccctgcccactctccccagggctgcccctcccatctgccccttacctccatcccaggggaagtagagactgagaatgtgggtacaataggcacagaggttgtgcagcccacgcaggtggacctgcagcttcccactgggcagctttgcctgcagcagcagggccaagtagctgaagacgaaggcgtccaaggaggcagggctggagcagagagagaagggtgggatggaggagaaccactggggtagaaggggtaaagatggagctggaggaagagtcagccttgggaggtgggctctgggcagcaggcggccaccagggaaggacaggacacacagttctagacctggtatggggagagatccccaggtggcgccagcctggccctgaatagggctctatcccagggctgcataaagggcacattcagtgccccacagctcttcaggcccctcctgtgcctggctgccctcccaccctacccttttgtacctctgagaaggctctggcccccacacagtcacactgtcactagggccagtttctatcccagggacctcctatccagagcctgagccagccccagccccagccccagctccagctgctccatctgaacctgtatcttcttccaagccacccattaccctcttggagtcagactcacgcatctccaaagaagaacttttgagagcccaggcgctgagagagcagggtcagacactcccgagcctctcggtacagctgtaggggcgacacaggtaggcttgcagctgtgggaacagtgccacctccccacctaagcactcccattcctggccagcatccttggggctcatctcatacaatagcccccggtctcagagctacctccttctccagctcttcctcgtcctcaggcctgtgctccccagtcagcagctgtagccgttccatgtactgccgctgcatgcggccaggcaggaagaagttgaggggaaagggcatagcctctgcataccacttccgggtcacttccacgtagttcttggtgtctatccaaaaagtatgtacctggattgggtgggcaggaagaaacaggtaggtctgagccagtgcacctgtctgattcaaggtgggcttctgacccccatgctttcctgagcctgtgtgtgggtctgtgtgttcccgaaccctccccggctggccatggatgctgggaggtctgggcacactcaccagcaccgggagcaacttctcctccaggagagacatgaaggccagggtgtctgccccttgccgagctgacagatcataatcagcattgtacttctgtggaggaaatatccatggcgtggacactagggagctgcaagggcacttcaccagggaggaaggagtcctgtctggtacccccctcactggcctctgagtgcagtggaggtacagcaaggaacttttcctgccaaggcccccttgcctgggcccagccagtagcctgttgctgttggcgaaaagcctgggccttggagcctcctggccgtgaaggtccagcgcccaatgcagggaaggaaggaaggctccgccgcaaactaggagcagctcccagaatttccatggaaagctggaacaacgcccgctgacggcaactttctaacagtaacttccccgacccagacaccacaaagctagcacaacggagctcagatgcaggctaggactcggtccatgcctcaggaaccagagaaagccatcctcacactccctggatccagggaacccacgcccagggccccccagcttgttccctcagtgcccagctcttggctatttctttcacttcattccatcgctcagacaccattaccacatacacattccacccatacccccaggtctcagcctgccctaccttcccaggctccagtccctgttcctcagcatccccctccacatcctgagtaagctttgtccccagataacctcttcagcatgatccttaaatctccctaagcctcagtttctcccctgtggaatgggggtaagaatctctttctctgaatgcccctgtgttaggaaataatttagaatactttggaaactggaaaagctctgttcacacctaagcaatcagggcagtggcctcggctctgccaggaactttggcttttatctggatcctctctttccaggcctctcaattaattccccaggtcctcaacctttgggaagttagaaatgaggaagagtgtcctacttctgacactgttccctcttggaacctgaccgtcaatgctagaagaacccttggaaaacatgctggcccagccctctagttttacaaataagggagtgcacagccctgagaggttacatggcctgcccgagatcacatagtcaatggcagagtaaagagcatagcctaggcctccccactcctctagtaatgctctttcatcttctccaacctggctctaagccttgtccatcctgagccccatatctagcccaacctagtccctgaaaacaggaagtggcccttagaaatctctctccagtcccaccatcagaggccaactgctgtcttccactctccttcagcctgtgctcctctccctccctgcctcacagtgccctaagtttcatctcttgccgactgctttaatacatcacagtgacattgtgtgtgtctctgccacaagactgttgctccttgatgctctgggtcacctgcatctagcatggcatatatctggtgctcaataaatgtgtattgtatagaattgactgaacttctctcactggcagccccctctatccaagtcacctacctcttttcgaaggtgggtgatgatcttgtgtggaactgagatgacctctccatgactggtccgaagggcaggcagagttcctgatattgagagggaagtataccaaccagacccttagctgcctagtcatacatagttgcaacacattcctgcctatttcttgcttctccccttgtacacacccttccttacccccaagggatactgggtacctgaagggctctgccaggggttgctgatcttgtgtaccttcagtggagcaccagtaaatctggcataggtctgcagggaaggaagcagaagtcagagaggcagagccatgtcccccacagtggtatcaagaagagaaataacatttattgaataccttatgtgccattccctatacttagtatcttagtctcgaaaaaaaagggggagtcactaccatttctattttacaaatggacaacacagggctcagagagattccggacatgtctgtgattacaggacagccaggaaaatcctttcctctatctcctctcttgccatctacctggtgaacatctatcctcagaagcttttcctaaccagtatccctcttcttggaagcactgataatgcccttctctttggcagtatctgtggtctgttcctactttaacttatatgtgaatattttattatatttatttgcttacctatctgcctttctgtaaactcgaagggaggaaccaaattttattcatctttgcctggcaatgtttaatatttggaagaaatctaatagatcctctttaaagcaaggagtcaatgaataaatgaagcaaaggaagtctgattgctaagctctttatacaaagcctggctgtgagtcgtttggtctaacaaacaatagcctcagtaaatgctgttaagtgaggaggaagaggagaagggggctgaggagaaggcaggaattccaagctagagtaggtccctgagacagtccagcctagtaaacctccgaatggagaaaaaaaatgcccaaagagaaaggatctccgcaaggtcacacagccagtgaatggatgagcaaggactagaacccatcacctgaactcccaaccaggcgtcttttcattgctgcattaagcctagaaaactacagcatagggcactgaggccatatcggccacgtacgctctttgactgcctcagtttcccccactgcgcccgtgctgagtagccctggcaaggtttggatgcttggctagttcggccccctccccagtcatcagggcacagcagagggcgccggcgccacccctcaccagcacggccaggctgtccaggtccactgacggcagcccccagccccctgaccagcagaacagctccatgggcgccgccatcttgcccaccctctgtcccggaaacacttccttgtgtgcttctgccctcccctgcctgggcccgccccccgccaccgcccctccgatcgttgcggtcagggggcctggggagatccccggggaggcgaggcttcttctggcccgactggcagctgaactgcgggggactgggccgcgggcctcgggggagggcggccgccggcccatccagaggtggcccacgtagcgggacagcgctgtcggcccggcgcgcctcggagtgtcacggcgcctcgtccaagtggagccccgaacccctgaaggcgcggcaggctctggagagcggggtcttgtgcgcctgggccaggtctgggggctcttgccaaactgcacgtggcctgtactgctccagggccccttggggctcgtccccgagcggggactgcgggggggtcccccgagcagcatgttttccacagcgcgttatgtttggagcgggccctgcgccgcctgtcgccatggaaacaaaacaggggcggtggcggcggccggagcggaggccgggctggggcttgggtgggggaggggaagagaggctcgcaggctgtcgcttaggtgacgggaactcaggcgcccctctgcttcatccgggtcacggcccgtccgctagtacccacagtgttccacagtctggtccttggctcctcgcctgtacccctggtcttctgcgcctgtccctggtgtccctttcctcttttttggtttcttcactctgacctcactgaccactgctttagattctcccttcagttcccgtcagacgcttccagactcccaagctttcctacgaatgagggaaaatggagaaacaggcacttgtcaggggaccccccaccctaataaagagcacttgctccgccagaacagcaaaattcatgccatgtgggcatccctgggcactatagcaagctagttgcggccactcccttggcatcctttcctgccagctgtggaataatgcccactgtctagcactgcccctgccaggggttcttgccttccacaatcgtggcttccagaaaacagtggcattcggtagcgctgtgtgccgagacccccaacaatgatgactgcggagagggaggcacctgg

SEQ ID NO: 4792 - DNA, 6000 bp, Homo sapiens
ctccctgatggacactgccttggactgccacagctccaggaacggggagtccatcatcgcgcctgtcttccctggagcacaggacaacaggacaaggcagacgttcagggctcaaatttcttgcaggttcccaccagtgctggcagagccaaaggcaggcgtttcccagggactgatcgggcagtgagccagcagcaaggagtccgggagagccagacattggacctctgcgtgcctggcagtgtccacagagaatggctgcattgtgggacaatctcaggggatcagatggtcagagtggatggctcatccaggacacagtgggcagatccccagagggggcgacatggagcaaaggagggacagagttgctgcagctgctgtcttaagaagtcctaaagttcctctagcctcgaggactcgtgttgggaaagtcactcctgcagaagccactggcggatctagagtacaggcagaggagagggagaaaggcacacaaaggcaggaagaggaaaacaccgggataaacaaccagggaagaagggaacatccaagtattcacgatggtccatccacgagccacagacaacacctcactcccactgctcacagaatgtcagagctgggacctcagagatgggtccatctgctatacttggaaaccaagcctcagaggtttaataacttgccccaaagttaaggttaaggagctggtcagggcagaattgaatcccaaacccaatatcctgactctcagatgccacttctctttttactttgccacagaggagaaagtaaagggggtggtctagggtagggacggggagggagtcaggagtcccagggcctcctcagggacctctgggtcccctagctctgcgctttcacacacacatacccctcctgggtaccatcagtctaactgcaaggcccagcatttccaaagcaaacactgctccaggctgggttgttgacctttccttcctgaggctcctggcgcccctggtgaagctaatagaaatctccagtgtctgtcccctgacaccagaggaccgggagttagtgtccaagttctcatgctgtggctgaagggccagaacacatattcagcctggacttgcttaagatcctacctgcccaaatctggtaaatctagaattcccaggggatttttctgctaagtctggtgcttctagctgttacagggacaaagatcttgagaacaagaagaaaagatatagagaacccaaacagatgtttggataccagtagtgctggtgaggtgtgtatgttgggtaacccctaggcctagagtgctggggacaatcacacatggacacctacctacctacctacctacctacacacacacacacacacacacacacacacacacacacgaagcacaggaagcatgaatgagtggaaagcccaagaacatgggagcatcccacagacagccaagtgactttctcaaccttctaagagacttggcaatggctggaggtagtgggggttgtgatgccagagtcatggggctgctgactctgaacagagtgtcacaagagtgacctctggaacacagatgttcttggcttccctttaaaatcccccagtggcaccacccaatggaacacaccagcccaacacttcaaggccaccacctacccctcctccttcctgtccccacacttaccagacactaggggaaggaaggactgtggatgggcccgttggagaggtcctcagttggagctgtctctggcaaaggcaaaagcagccccagccacctcccaagctgccaagggccaggcgtcgggcctaacactcatgtcctgcagggctttcctgaccagcgagtcctggggtaccaaactgtagactttcctgaaggatcacagacaccaagcatcacatgggagccacccttttccagtgtaggggtctggatggaaaccctccagcacacacctgtgtatgcatgctgcccatatggacctttaggttctgcccagtgggctccctcctgccttgatctctccccaaactcccagaactggttctccatccatcagtgctcctctgtgcgaccctactcctccttcctcggccagcaccacctgtggccccagcctctctcctctttgccaatggctcagggacctgctgggtctaggggagcagccctctcccacagaaaccctggaggttgtgggctcacggtagggccccaagcaaaggacttcacctgggccccaagggccaatgctactggggaggctccccagggttccccaagagctagaatcaggaaaagggaacacagcagcatgaacaaggaaggcttgaaatgtgaagtggaaagaaaaaacatccccataaaatgctcacagagagagcattgtccctggaaaggggagggtgctgtggtggtgctgggagtggcataccctcgccagtgctgcagaggagagaggcctctgcggagggaaacacctgcggctcctcttccccctccctccagccccagtcatgcctctaagttacttgtctcttgccaaataggcttcccagggtggtttgacaaagtttgatatgaactcagggaggtggctagcaaatactatcagcctgagacggaggtaaggtcaggtggccagtcctgtctgccctctccgatgagcacccaggttagggtagagctctggggacccacaatctctctcagacctttcagctcagtcccagcctgtccctgcccattagacacataaagtccagatccccctgaaacagctccgtccctctggctctccatgggacagctcctctgcattttcacaaacaggcacgctctgagcaggcagctgggaacacagacaccatgggacagtgctgccaggctgaggagaaggcagggggaggggagcacccagctggcagctgtatagaggaggccaaaccagcagctaggcactgtggttgaagtggcactgcctggctgagaacccctggcaatattcagtcatcctagatgtatgtgaatgcctagcacttacctgtgccttccagaaattctccattcatccccttattcctactcaatatgccgagggtaggaaagccaagaattactgctgaggcccaagagccagagtgggcagcaggtgacttcacgctcccaacccaaagttcaacccatgtgcaggcaagcgtctgattgtggccagtgggagagggctaaatccaacagctggtctaaatttgccaaagtaaactacctatgctaatccactgccagtctccattggcagcaaggactggcctggtggtcaacttgacaagctctagaaataccagcagaatgttgcaggaagtatatggatattgttcgttcttgcaagaaggcccgtacaaattcagggtaattttatcatcaccaaatctttcaatcctgtgatgacaatagcgaaactacaagcagctccaggccttctgcctcaggagctaactctggtctttcagatgcagaataaggttgcaaagtaaagtacaaacttctccttatggcaacaccaaacaggacccagtaacctggacaactgtttacctcctaccctggagcacaaaggaaatgacacagcccctggctgaaaccagaggcagtgtggctcagggattatgtgagcaggctctggagttagggtctcagcaccacgcagttcagacaagcagcctaaccactctgtgccttggcttccttcgccaggaaatgcgagtgatgactttctctcacggagctgttgggaggcacagatcccaaacaacacctgtaaagcacttagcccaggacccggccctagcaagcaattagaagctgtctgcctttattttaagtcgcccctccagctaatgggaaacacaagggcaggatcccacctgacgtcttctctgttagagcccaacgaacagctaggagagacctttgcccccacactaaacaaaggagaggggcgtgtgaagggaaaaggagcctcggcttccgttcatatcccccttgaaggcacagcagacttgaggatgacctgagaggtgtcaagggagggtcagtgggtccgccacgctgtccacccctgcccttgaagaggacaccacctgcctggggctgaatgaccaaggcccctccagggcctcaggtagctagtcttatcaggtgctggaacctttgcggatttggtttcttagcagagctcgcctcaccctttccgcccccgcccttccccccagtccccgagtccccagcctccctcctcaggactccgccaaggctgcaggaagtggtcacccaggaacagcccgaggggtggcctctgccttcctggcgtcaggagagtcggacgcttggccctttcccagcccggcctcgtatagggtccgaggagcccatagctgcactcctagttaggtgggaggtcggactccgccgacaaatcccaaagagaggggtggggaagaaggagataccagccctgaaagcgaaaagccggagaggaaagtcctgaaaagccgccaggaattcccaaggagcgcagggctggaatggaggcgctgcccggaccctctcctcccacccaatcccgcgtcgtcaccccctgcttggggtcgggggctctggggtctgcgtaggctgggagccgttccggaaccggacacctggcgcgcacgtcccgggaaaggcggagggtgcattgcccctcctcacgccccctgtcccctgtacctgcggcggcggcgtgtctggcgggacccagcagcgcggggcgtgttccgaccacttaaaagttacaaagtgaaactccggcgcctcctgcacatgcgcagagctgcggccacccctttcccaatttggagtcttggcccgcggcggcgcaagcctgtacgcagctgactgcgcctcccgcggtggccctcggcggtcctctgccccggcctggcctcctggtcgccgctcagccccgcagctcctcccggaggtctgcaagccccggaccggccagctcacgtccaggctccaagaagggatccgccggggcgcaccctcttccgtcccccggcacgagcccagtctctggacgcctccgggagaactgggccaagcacagggtggtcgcggcgcagggagagcatctgcaaacgttggtccctgtagtgctttgaatttccccgaagagctcttagacccgccccgggagagtggggttgcgggggtggtagcatggggagctcagcaggattcagcccgcacctcggctccgggtagtcgggaaccgcgcggagcgccctgcaagaggccacggctcccccgccgctgtagaaggccggaccgtgaaagcccggagggtctccgttcgggcaaaaatgtgggggcgggtcgcagcatttccaacgccccctggggctagtccattactgctcgagccagggccgccaagggcacctactccagcccaggtccgagagcgcggcatgcctcccggccgggagccaaatgtttccagggagccggtggcctccacaaccggaccgcaagctcgcgagggcagggccggcccgccgcgccagggactgctgggcgctgcgcgggaagcgaggctgggttcggggaggaccgcgcgccctgggaatcaaggagcaaaccaacccgtccgcaggcccctgtttccctatctgtgaaatgagtggttggaccaaagcttcctctcaggtcccttccagcacccctctctgagctctgagcagtcctcaccccacatgcatgcctttgcaggttctccgacctcccttccatttctgagctttcatctttttctgtaacggcataaaaatatcctccttatggccgggcgcggtggctcatgcctgtaataccagcactttgggaggccgaggtgggcggatcaccttaggtctggagttcgagaccagcctgacccgcatgga

SEQ ID NO: 4793 - DNA, 6000 bp, Homo sapiens
gtttctatcccagggacctcctatccagagcctgagccagccccagccccagccccagctccagctgctccatctgaacctgtatcttcttccaagccacccattaccctcttggagtcagactcacgcatctccaaagaagaacttttgagagcccaggcgctgagagagcagggtcagacactcccgagcctctcggtacagctgtaggggcgacacaggtaggcttgcagctgtgggaacagtgccacctccccacctaagcactcccattcctggccagcatccttggggctcatctcatacaatagcccccggtctcagagctacctccttctccagctcttcctcgtcctcaggcctgtgctccccagtcagcagctgtagccgttccatgtactgccgctgcatgcggccaggcaggaagaagttgaggggaaagggcatagcctctgcataccacttccgggtcacttccacgtagttcttggtgtctatccaaaaagtatgtacctggattgggtgggcaggaagaaacaggtaggtctgagccagtgcacctgtctgattcaaggtgggcttctgacccccatgctttcctgagcctgtgtgtgggtctgtgtgttcccgaaccctccccggctggccatggatgctgggaggtctgggcacactcaccagcaccgggagcaacttctcctccaggagagacatgaaggccagggtgtctgccccttgccgagctgacagatcataatcagcattgtacttctgtggaggaaatatccatggcgtggacactagggagctgcaagggcacttcaccagggaggaaggagtcctgtctggtacccccctcactggcctctgagtgcagtggaggtacagcaaggaacttttcctgccaaggcccccttgcctgggcccagccagtagcctgttgctgttggcgaaaagcctgggccttggagcctcctggccgtgaaggtccagcgcccaatgcagggaaggaaggaaggctccgccgcaaactaggagcagctcccagaatttccatggaaagctggaacaacgcccgctgacggcaactttctaacagtaacttccccgacccagacaccacaaagctagcacaacggagctcagatgcaggctaggactcggtccatgcctcaggaaccagagaaagccatcctcacactccctggatccagggaacccacgcccagggccccccagcttgttccctcagtgcccagctcttggctatttctttcacttcattccatcgctcagacaccattaccacatacacattccacccatacccccaggtctcagcctgccctaccttcccaggctccagtccctgttcctcagcatccccctccacatcctgagtaagctttgtccccagataacctcttcagcatgatccttaaatctccctaagcctcagtttctcccctgtggaatgggggtaagaatctctttctctgaatgcccctgtgttaggaaataatttagaatactttggaaactggaaaagctctgttcacacctaagcaatcagggcagtggcctcggctctgccaggaactttggcttttatctggatcctctctttccaggcctctcaattaattccccaggtcctcaacctttgggaagttagaaatgaggaagagtgtcctacttctgacactgttccctcttggaacctgaccgtcaatgctagaagaacccttggaaaacatgctggcccagccctctagttttacaaataagggagtgcacagccctgagaggttacatggcctgcccgagatcacatagtcaatggcagagtaaagagcatagcctaggcctccccactcctctagtaatgctctttcatcttctccaacctggctctaagccttgtccatcctgagccccatatctagcccaacctagtccctgaaaacaggaagtggcccttagaaatctctctccagtcccaccatcagaggccaactgctgtcttccactctccttcagcctgtgctcctctccctccctgcctcacagtgccctaagtttcatctcttgccgactgctttaatacatcacagtgacattgtgtgtgtctctgccacaagactgttgctccttgatgctctgggtcacctgcatctagcatggcatatatctggtgctcaataaatgtgtattgtatagaattgactgaacttctctcactggcagccccctctatccaagtcacctacctcttttcgaaggtgggtgatgatcttgtgtggaactgagatgacctctccatgactggtccgaagggcaggcagagttcctgatattgagagggaagtataccaaccagacccttagctgcctagtcatacatagttgcaacacattcctgcctatttcttgcttctccccttgtacacacccttccttacccccaagggatactgggtacctgaagggctctgccaggggttgctgatcttgtgtaccttcagtggagcaccagtaaatctggcataggtctgcagggaaggaagcagaagtcagagaggcagagccatgtcccccacagtggtatcaagaagagaaataacatttattgaataccttatgtgccattccctatacttagtatcttagtctcgaaaaaaaagggggagtcactaccatttctattttacaaatggacaacacagggctcagagagattccggacatgtctgtgattacaggacagccaggaaaatcctttcctctatctcctctcttgccatctacctggtgaacatctatcctcagaagcttttcctaaccagtatccctcttcttggaagcactgataatgcccttctctttggcagtatctgtggtctgttcctactttaacttatatgtgaatattttattatatttatttgcttacctatctgcctttctgtaaactcgaagggaggaaccaaattttattcatctttgcctggcaatgtttaatatttggaagaaatctaatagatcctctttaaagcaaggagtcaatgaataaatgaagcaaaggaagtctgattgctaagctctttatacaaagcctggctgtgagtcgtttggtctaacaaacaatagcctcagtaaatgctgttaagtgaggaggaagaggagaagggggctgaggagaaggcaggaattccaagctagagtaggtccctgagacagtccagcctagtaaacctccgaatggagaaaaaaaatgcccaaagagaaaggatctccgcaaggtcacacagccagtgaatggatgagcaaggactagaacccatcacctgaactcccaaccaggcgtcttttcattgctgcattaagcctagaaaactacagcatagggcactgaggccatatcggccacgtacgctctttgactgcctcagtttcccccactgcgcccgtgctgagtagccctggcaaggtttggatgcttggctagttcggccccctccccagtcatcagggcacagcagagggcgccggcgccacccctcaccagcacggccaggctgtccaggtccactgacggcagcccccagccccctgaccagcagaacagctccatgggcgccgccatcttgcccaccctctgtcccggaaacacttccttgtgtgcttctgccctcccctgcctgggcccgccccccgccaccgcccctccgatcgttgcggtcagggggcctggggagatccccggggaggcgaggcttcttctggcccgactggcagctgaactgcgggggactgggccgcgggcctcgggggagggcggccgccggcccatccagaggtggcccacgtagcgggacagcgctgtcggcccggcgcgcctcggagtgtcacggcgcctcgtccaagtggagccccgaacccctgaaggcgcggcaggctctggagagcggggtcttgtgcgcctgggccaggtctgggggctcttgccaaactgcacgtggcctgtactgctccagggccccttggggctcgtccccgagcggggactgcgggggggtcccccgagcagcatgttttccacagcgcgttatgtttggagcgggccctgcgccgcctgtcgccatggaaacaaaacaggggcggtggcggcggccggagcggaggccgggctggggcttgggtgggggaggggaagagaggctcgcaggctgtcgcttaggtgacgggaactcaggcgcccctctgcttcatccgggtcacggcccgtccgctagtacccacagtgttccacagtctggtccttggctcctcgcctgtacccctggtcttctgcgcctgtccctggtgtccctttcctcttttttggtttcttcactctgacctcactgaccactgctttagattctcccttcagttcccgtcagacgcttccagactcccaagctttcctacgaatgagggaaaatggagaaacaggcacttgtcaggggaccccccaccctaataaagagcacttgctccgccagaacagcaaaattcatgccatgtgggcatccctgggcactatagcaagctagttgcggccactcccttggcatcctttcctgccagctgtggaataatgcccactgtctagcactgcccctgccaggggttcttgccttccacaatcgtggcttccagaaaacagtggcattcggtagcgctgtgtgccgagacccccaacaatgatgactgcggagagggaggcacctgggggaggatcattagggagaggtagaaagcagggaggcctccaggattctttcccagtgcccctggttcccagagctgatgatgcctccagggtgattggcagctctttgtttcagccccccctcacccgcctgctggccccccctccaattctgtccctccgccccccggctcctgctctctccgcctagccttttcccctcccagctgcctgcctgccaggggtagtgagccggctgagaggcatggagacgcaggaacttcggggggccctggctcttctcctcctttgctttttcacatctgccagtcaggatctgcagggtaagcctgtctccatcctcttagaccgctctctgcttcttccccatttgccctcagcccaagtagcagagaacatgtgggcaaggggagaggggaagagtccagaaattgagccagaggaaaacttaagactgcctagagttggtgaaattatggcctggtggagaggagtgggcaccggagagtagtgggggagctggaacaggacagggtcaggcatgaggccagggcagaggactcaggaactggatgctcaggctgcctggctggggtggttcctgagcatctgtaggcaccctagggtctgggagagcagcctgaaggtgggcgtactgtaggtccctgggcttcgtccccctgggctcctggctgcccaaggacagggcgggggtggggaccaagaagcctgggctctcccggaggtctggtggtgggatgggccgatggatgtgggagaggtagctggagcagatgacacaggcatagattctttactggctggagggaaaaccacagattggccaggacacaggaggcagaggagctgggtcctacattcccgtgggagatagcccagatggtgggagggttagagtcctcagtgggcagctgttcttatccagagcgagtgtgctgcgcccctaggatgggaggaggggaactagggtgtggaacgagccaaacccaggagtggaaagagaagctgccttccatttctacgttgtggacaccaggtgccactcctgtgggggatcagcacagcatctcctttgcgccacctggtgggggcatctcaaatttgtggggtgctgtttctgtgtttccaagtgagtctcaaacctgcaggttcctggaaggtagtaataggcaataatggggaaaggaaggcacagtgcctct

SEQ ID NO: 4794 - DNA, 6000 bp, Homo sapiens
tttttgtattttagtagagacagggtttcactgtgttgcccaggctggtcttgaactgctgagctcaggcaatccacccacctcagcctcccaaagtgcttggattacaggcgtgagtcactatgcccagctcaggtctgttgatttaaatgtttactacatctaaaaaatagcttcaggctaggcacggcggctcatgcctgtaatcccagcactttgggaggctgaggtgggtggatcacttgaggccagaagttcgagagcagcctggccaacatagtgaaaccctgtctttattaaaagtacaaaaattggggccgggcgtggcggctcacgcctgtaatcccagcactttgggaggccgaggcgggtggatcacgaggtcaggagattgagaccatcctggctaacatggtgaaaccccgtctctgctaaaaaaatacaaagaattagctgggcgtggtggcgggcgcctgtagtcccaggtattccggaggctgaggcaggagaatgatgtgaaaccaggaggcggagcttgcagtgagccgagatcgcgccactgcactccagcctgggcgacagagcgagactccatctcaaaaaaaaaaaaaaagtacaaaaattagccgggcatgctggcacatgtctgtgatcccagctacttgggaggctgaggcaggaggatcgcctgaatctgggaggcagaggttgcagtgagccaagatcgcagcagttggctccaggctggatgacggagggagactgtctcaaaatatatatatttttttttagactgagtctcgctggagactctaacccaggctggagtgcacgatctcggctcactgcaacctctgccaccccggttcaagtgattcttgtgcctcagcctcccaagtagccaggattacaggcaccagccactaagcctggctaatttttgtatttttagtagaggcggggtttcaccatgttggccaggctggtctggaactcccaacctcaagtgatctgcctcccttggcctcccaaagtgctgggatgacaggcatgaaccaccacgttcggccaaaataaataaattaaaaataccttcatggcaacagctggactgatgtttgactacacaactctaggcactatagcctagacaatctgacacgcaaaattcaccaccacggctcacacctataatcttagcactctgggaggcctagcactgtgagaggactgcttgagctcaagaatttgagaccagcttgggcaatgtagtgagaccctgtctctataaaaaatttaaaaaattagcggtaagtggtggcatatgcctgtagttccagctagtaaggaggctagggcctcactgaggcccaagcaaagctgcagtgagctatgattgtaccactggactccagtatgagcaaaagaggaagaccctgtctcagaaaaaaaacaaaaacaaaaacaaaaactaaccactacacctgcttaaccttgtttaattagtgcttctcaccaggacacttatgaatgtgttgagggcctatatgccttatcacccctacttcagcaactcctgtctggagcccaccaggaatgagccagggacaggattcagccccgtttaaagagcaggctaagccaggtgcagtggcccatgcctgtagtcctagctactcaggaggctgaggatggaggattgcttgatcccaggaggtggagactagcctggacaacatagtgagatcccagctcaaaaaaacttttttgtaatggctggcccagtggctcacctagaatcccaatgctgtgggaggcccaggcaggagaatcacttgagaccaggagtttgagaccagcctgagcaacacagtgagaccaccttctcaacaaaaaattaaaaaattagccaggagtggtggtgcatgcctgtagtcccagctacttgggaggctggggcaggagaatcacttgagcttcaatgaggcccaagtaaggctgcagtgagctatgattgcaccactacactccagcctgggggaaagagcaagacctcatctctataaataaacaaataaacaaacaaatacataaagtgtgctagcctgttccattttccagcctcttgcttgttagaaggtcttccatggtttctaccacttctgtcccgagtctctcaacggagggttcgtgcctcctgcctgagacaattcttcaggtatctgaagccggttttcatgtcttccctcctcctgctctacccaatctctcttcccagcccattctctttatctctttatccaggtttctagctgtagcccttcgagtaggtcgtcatacactagatttccagaaacttcttcctgagccaaccatctcgtgtgcttcatgggtaggacatcctgcagccaagcctcggcagcattcttgggcctctgggtctgtgacttccacagtctgcaagcaactgtcttcgtctttttttttttttttttttttgagatggagcctcgctctgtcgcccgggttggaatgcaatggtgtgatcttggctcactgcaacctccacctccgggttcatgcgattctcctgcctcaggctcctgagtagctgggattacaggtgcacaccaccacacccggctaatgtgttgtattttatgtagagacagggtttcactatgttggccagactgatcttgaactcctgacctcgtgatccgcctgtctcagcctcccaaagtgctgggattacaggcgtgagccactgtgctcggctgcaactgtcttctttaaaagaaaagcaggccgggcgcggtggctcaagcctataatcctagcactttgggaggccgaggtgggcggatcacctgaggtcgggagttcgagaccagcctgaccaacatggtgaaacccctgtctctacgaaaaatacaaaaattagctgggtatggtgacacatgcctataattccagctactcccgaggctaaggcatgagaatcacttgagcccaggaggaggaggttgcagtgagtcaagattatgccactgcactccagcctggatgacagactgagtctccatctcaaaaaaatatagatagatagatagatagatagaaataaaagaaaagcagtagtttccctctacctagattgttgacttcatgatggcaccaacctaatttatatttgtcaagctcctaaagcatctaatgggatgtgtcttcccttcccaccccatgaagaaccatggagaatcctacttgtcatctgggactctagggaactttgaacatgggtaggagtggagagaagatagaagagggaaaaagcggctgggcgcggtggctcacgcctgtaatcccagcactttgggaggccgaggtgggcagatcacgaggtcaggagatcgagaccattctggctaacacggtgaaaccccgtctctactaaaaatacaaaacattagctgggcgcagtggcgggtgcctgtagtcccagctactcgggaggctgaggcaggagaatggcgtgaacccggaaggcggagcttgcagtgagctgagatcgcgccactgcagtcccacctgggtgaaagagcgagactccgtctcaaaaaaaaaaaaaaaaaaaaaaagaagagggaaaaagctgcccttgcttaggcctggccacctaggtatggtacaaagccaagaaccaatttcaatgaagttacaatacaacacattctaacagcaagggtgaaataattggaaactggccgaagtgtctaggaaggtctagccagcacttaggtggcaagtggattgatgaacaaggcctggggacagttcaaggggcaaaggcagaggcaaggtcctgtttggaggatggcagccagaggggccctatagccaggggtcccactaagtgtggctctgctggcccctcactcacctgtcacacagggtcacctcgggtctgtgcctcacctgcagacagccagaatggagagggaacaggcctgccaggaggtaatctccggggagggtgaagtcaggagaagactccgtgctatggcaggcaaaggcccagcagcaggaaatgagaagctgcaggccgaccaggcgagccgtgcagagcagcatgctggccagatgcccgcgcctggcatggccaaggagtggcctctaaggaggccagttgcttaaatagaaggcagctgccggatgcttcctaacttcaggcccccaaaaggggtgggactggagcccagtggctgaagcaggactgtttgccttgacattccgggcctgcggtcccactcaggaactgggcaggacgaaggcacagatgcaaaccaggtggcacccagtgacccttcctctggacggttgtgggttctgtccacgctctgtgacttcacctggcttagaaaaggagctctggcattttggggcgaggtgggaggctggaacacaatttctccgggtgttgcgaggtttcagaactttttacctgggcctcagtttactaaatgagacacagctttgagtcgacacccccctgccccagtctccagttttctgacattaagattctgagcaaattgtcatatactttcgccttgttacccagggttgctcacttcgaaacaaatgcatgcaaaccgaaggtatgcaaatagacatgttttgtttaaactgccaatcctaaagctttttctgcaggagaaaaaaaatatcccggtgtttttccggagaggtggcccatggctggtcgcgaggtttctggctttctctctccggccggctggggtagggaatttgcgtaacgtaaatggagtcctccgtggagcccctcgaccagatcggctggaacctcctagtgtgcttccggaggttgccggcagagggcgccggcggctcggaggcccctcttttcggcagctgggagggcagcggggcggaccgacgggatctcgcgagattctcgcgcggtaggccctgaggacccagcatggcggactcgggactgctgctaaagcggggttcctgccgttccacttggctgcgggtccgcaaggcccggccccagctcatcctcagccgccggccccgccgccggctcgggagcctgcgctggtgcggtcggcggcgcctacggtggcggttactgcaagcccaggcgtccggcgtggactggagggagggagcccgccaggtgtcgcgcgcggcggcggcccggagacccaacaccgcgacccccagcccgatccctagcccgaccccggcctccgaacccgagtccgaacccgaactcgaatccgcctcgagttgccaccggcctctcctcatcccaccggtgcggcccgtgggccccggccgcgcgttgctgctgctgccggtcgagcaggtaggtggggggcgccggtagtagtccccgagggcagggagggctggagaggcagccccgggagagctgcagggtaggagaggaccgtggtcccccgggcctgttctctggctgccagtcggattcaagtccatcctcttgatggttggtggcaactaggctcccctgagcagcagggtaacaggtaccctgctaaggggtccctaggccttacgagctaaagggactttattttgttttgttttctttctttctttttctttttgagacagagtctcactctgtcccccaggctggagtgcagtggcacaatctcggctcactgcaacctccgcatcccgggttgaagcgattcccctgcctcagcctccggagtagttgggactacaggcgcgtgccacctcgcccggctatattttttgtatttttagtagaaacggggtttcgccatgttagccaggatagtctcgatctcctgaccttgtgatccacccgcctcggcctctcaaagtgctgggattacaggtgtgaaccaccgcacctggaactctgaaagggattttaatagttaaaaaaaaaaaaggttgcaattactgaga

SEQ ID NO: 4795 - DNA, 6000 bp, Homo sapiens
ccttccctccctgccacccaggagactttgggcagtcatgtcctggacaaatgacaggagggtggttcctgggcagagaggtggggtgggagccaggcaggaatgatgtcctgagtggtcccccgcgggtagggaagaggacctggctctcaccttggatggctcggcggatgtggggacaggggccccacagctcctgcagagtcacagggtcccctgagaagccctcacgcagccccaccaactcctccatcaggcccctggagaagcagatggagggaaggacccgggtgagctgctgcacgtcctcgcgctgcctctgggcccttccagtgctctccccacccaaatgaagaggaaggattgtgcgtgtgtgtgtgtgttatcacactaggtctgtgtgtgccctcatccctgaggttccgtcactgagggtgtgtgcctgtgtgtgtcattttgtgggatgagggtgggattcctaggtgtccccctgtgtccagcagcagactgtggacaccgctcccaccctcctgggtcgcttggtgcttccactactgggagcagtctctgcccagggctgtgactctctcactgcagagtcccatggatggctccgactctccctgccaatctcggagcaccctcctttctccccgacagctcaggtcacagaggcaggaaaaccccaggaccagaaggcctctgcaaagccaaagtgaggtgctggctactgcccctaccatcccctatgccctgcctgcctggcccttccaggttcatactccagtccacgcccagagacccctcacctgtcagtcctcctgctgcggctgaactggccctcctctcacagagcctcctttgctcccagctccagtgcacctggacaggtatatgctctaccaatcatcactctctccctgccaccccccttccccgccggccggggtttaccatggagattaaaaacgtccttgacaaaccaaccagaactgtggaggccagagctgtgcagggcagaactgccaagagagaaggggagcaggagcctccccacccatcacagctgcacagagggtggtgcccagctgtactcaggctcctgggtgctgctggacgagggctgggaagggggagctcatgcacacagcaggacagagaggggtcatctgccaaggctgagactcagggtccaggggtctcagagctggacatggaaggtttgaaaaagcacagagggagaggggaggaggctgggaagggaaggagaaggcaggggggcaatggtgagtggggccagcatgaccacagcctccctgtgtgtcaggtagagagtcagccttctcccagattaattaccctgagtgcccacggaaatcccacgaggcaggcagcgtgatcccgttgtagagaaatggtgtctcagggagctggggctgcctgtctaagatcacggaggccgaggcagagccaggattcccagcccaggtttgcctggctccaaagcccgcaggctgtgccacacggtcccatcctgatgacccatcttgtccagggctggcgaggaggccgacacctggggcaaggcagtgaattggggtcaggaactcggacttgatcctgtgtccagaccctccaggctcaggaaatgcttctcaaagcacacgtccaagggccagcggctctggtggggacttctgggtaattccacagagtttgtcccaccccaacagaggatggcagcacaggtgtgaggggacatggcgaggaacaagcacctgccgtgtgcctgcgacgtgtcaggagcgtcacatctgcagctcaagtcctccttcccacaccctgtgaatggggagagcctcgccattttgtagatggtcagagaggtgagtcactcatccaaggtcacacagcagaggctgaacccagccccacactgtgcagctcttcccctgcccaaagctcctccagctcctgaggctgaaccagggcaatggtttgggcacagaacagaagagttgtgtctgatgccacttttgggcaagaggttggggacaattgcctccactcccacccagacaaagccaccctctgaagcttatgatagcccttggatgattgttaaaatctgggaccctgggccaccctttgcccctagatgccaggcaagtcaaatcaaaatcaaagatgtgtgttgtgggaggtgggatgggagttgccgctctgtatggactcgagcccaccttcaccttggccaccccgacctgttgactctgcacagcaccagaactggctgccctgtcaacatcccgatttccagtgtctggtctggggcagctgctggctactgtcccacagccagcactgcacgtccacatctaccctcaccccccagccctgtgtgcaccaggaggctgagaagagggcagccagggtggctcagcaggatgaccggtttgaagccagcacagctctgctgaccctaactctttcatcaactagagcctcagtttcctcttctgtatgatgaggtgagcctggaagcaggggcctgtctctgccttattcatctctgagtccttcagagcctagaacagtgcccagcacctatttatagcaaggtttcaatgaatacctactgagtgatgagggcttcatcactggcctatgagctggctgtgtggggagctgatgggaagagatgtgaggtcccttccccagatcccaaatcaaaatcctggggtccaaggaaagggtctgtgtttgtgaaaagctctcctgggtgactgggattcaaaggactgcatcatctttgtagctccttctgtctctgtgatctgaaggtagaggcaggggaatgtccttgatgaccttttgaggtccctctgggtcagtgaagccagaggatccagtatttgtgtgggtgatgcctcgggaagggggaaaaaggggaggaggaatggtgggcgggggtgggtaacgggatctgacatccaggggcagtgactcaggccctcagcaccatgacagtgtgtctgcatttagccaccggctcctgtttccctggcgagcggcaggctctgggccccccaccccgccccaccctctctccatctcacctcagtgctggtggcttcccagctgccctagaaacccctcagccaggctgggtgtcacaggccccgacacgggcaggaaactctgccagaggcaacaggccctgttgctccaggcaacagcctggcccgccgctgtgccctgtgccctgctctgcttccactccacataccaccagcaccgctaatacccctgtagaaggagctctccaggatgaagctccagactgggttgtagggggctcagacaaaagagaaactgcccgtcttcaagaaccttcaatctaatggggagacaggtgaaccctcgcccccgtgggaactgccagttggatagggaagaagggacacagcagagagtcacagcacacaggaagactatgtcacactgccaggtgctgtgggaggacaaagacagtcagtgctgggggcatctggactgggtgtgggcccatgtgagcaggagcagtcagagaggcctccctgggggaggaggcattggagctgatctgggacggaagggacggatttggagaggacagcagaggcccttaactgcaacctgggcagagcagagggcctggccgcctctcagaatggcctccaccctggcccagggcaaggtcagtcccagctttgctgagcaagcaggtgggtagggaggggcttctctggctcttccgggccagcctgtctccataggcacatgttcaaaccacctcggcctctgaagggctttgggtccaacacatctaggttcgaatcccagctctgccacttacgcaactgcgagccccgccctttccaagaggcttcgcttccccgtccgtaacatgggaagagcccctccaccctcccagctgtgtggggatcaaacggggccgtgctggacagcttgcagccaggagcccatgcccagaaggcattctagaactcagggctagaataattgtcttccggaattctcttttacctctgactgaaatcccacctaaggcgctcgcaggcatcacctctgacacagagatggagcagacagttgccgggaacacaaccttctagacctttaaggagaaagctgccaactttgtcctcttggggctgctgaatgttctgagagtcagagggagtgcaggcacagaatccaggtccccatgggggctggcaggggacagctgcacattttacaccccctggcagggctcaacctttccttagagatgggctgtgaaggttgtctgccttgagggaaggagctcctgacgtcacagagcggtggtgcttccacctaccctgtccccaaggagcctgcacactgatggaggaggtacagccgtggaggagaaccagagtctggaggggaggcacagtcctcaggagcccccaggctgacgggggaaacaaaacacacaataaaccccaaacttgcaaggttctggggcaggcaccgaggtccgagtggcaaggagacaggatccagccctgtgcagtggtgaggaggcccctggggctgctgtgatcagcctggaatgtcaggctgtgagctcagccctctcggcctgcgtgtcgggctgtcagcagggccggcgcacgggagaagatttccagccccctctgggccatggagaggcctaaatttagctagtagacaaggggctggccccaagcccagggacagtcggccttataaagcggccgcagtcggagcctggcacgctcgcccagaggcctgcgcccacaccctctcctgtccagccctcgcccgcctgggcagggcccggcgccgtccgtggatgagccacagaacctcttccaccttccgagcggagagaagtttccattcctcttcctcttcctcctcctcttccacctcctcctcggcctcccgtgctctcccggcccaggacccgcccatggagaaggccctgagcatgttttccgatgactttggcagcttcatgcggccccactcggagcccctggccttcccaggcaagtgatccgggccctgaggggaggggaggtgcacagggaggggacgtctgctccagggcgccaccgaaggcgctgtggctgccggtcggcctggaacaggtgctgcacagcctgcagccatgtgtggccaccaagacagatgtggccacagggacagatgtggccatgaaaacaggtgggcctctaaggaacagttgtggccctgggggttggacatggttccatggccacccatgctctgtaaccacagccaatcccagctggagccctggagggctggatgggtgagcggtggggggcagcccccaggctccaggcctggggtggggttgttacagacctagcctcatatacacacacactgtgctgggtgaggccccacccccaccccagaaaaggtgggctgtaggaatgaggaggagcttagggagaaacagctaggggggaggtagggcctgggggagccgccccttgccccaagagaaggagccagaacccccggatctgcatgcaaggcctgctccatgcctcgctcacagcagcccatcccacagcccgccccggtggggcaggcaacatcaagaccctaggagacgcctatgagtttgcggtggacgtgagagacttctcacctgaagacatcattgtcaccacctccaacaaccacatcgaggtgcgggctgagaaggtgagccccccaccccctactcaccgcatcccaaattctgctcctgcctccaatgtctcctactcccccttaccatcctgggaccccagaccctggccagtgtcccttccccacccaaactcccccagggctaactgaaggccttgtccctgcaacccatggccatggggccccctcactgcctctctttgcaccgaggtt

SEQ ID NO: 4796 - DNA, 6000 bp, Homo sapiens
ccttccctggaggtctgcttggctccaggcagggaggaccctggtagttgagtctggggtagtcctgagggggccccgcctgagtcagagaggaatgcaagttgtccacgttcctcgcactgggactggcagatggctgtgtcaggatggaggagccctgaacagaacctcaggccaccactgagtgagcctggagctaccctctgctggcttgcctcacactgggggctgggcaggatttgtggcaggtgacagtggtggcacagtggatgccaggactgctgcccctgccagaaggcctttgacctgtccactctccccacccgtgcctgtactgggaggttcctgggggacagggagtgtgaagggggctggcagctatagctttcacctgtatccctgcaggatccatagcttagagagcaccagggtctagcagacttctgcgtgtcccagggcctgtggcgccaggtatcctctgggtccccagcaatgcccctggcccgctggctgcagcccagcctgggagctggccctcactggctgtgggcaccagccactggcactgcacttagtctccttctgtggtccctacttgctctgccccgtagctgaggggacagtcaggtctcaaagtgaacaaggcacatggggctccaaggaagggtgccaagtgcaggctgccccagccccttgctgtgcccccagctgtcccagcagctaacccccacgtcccctcattggcacaggtaggtgagggagaggcctgggtggaagataggcacagtgaccaggccttgggctgtatctcctgaaaggcagagggcagatgcctggcccatctgacccacagacagctggacagacagaccccttccctccctgccacccaggagactttgggcagtcatgtcctggacaaatgacaggagggtggttcctgggcagagaggtggggtgggagccaggcaggaatgatgtcctgagtggtcccccgcgggtagggaagaggacctggctctcaccttggatggctcggcggatgtggggacaggggccccacagctcctgcagagtcacagggtcccctgagaagccctcacgcagccccaccaactcctccatcaggcccctggagaagcagatggagggaaggacccgggtgagctgctgcacgtcctcgcgctgcctctgggcccttccagtgctctccccacccaaatgaagaggaaggattgtgcgtgtgtgtgtgtgttatcacactaggtctgtgtgtgccctcatccctgaggttccgtcactgagggtgtgtgcctgtgtgtgtcattttgtgggatgagggtgggattcctaggtgtccccctgtgtccagcagcagactgtggacaccgctcccaccctcctgggtcgcttggtgcttccactactgggagcagtctctgcccagggctgtgactctctcactgcagagtcccatggatggctccgactctccctgccaatctcggagcaccctcctttctccccgacagctcaggtcacagaggcaggaaaaccccaggaccagaaggcctctgcaaagccaaagtgaggtgctggctactgcccctaccatcccctatgccctgcctgcctggcccttccaggttcatactccagtccacgcccagagacccctcacctgtcagtcctcctgctgcggctgaactggccctcctctcacagagcctcctttgctcccagctccagtgcacctggacaggtatatgctctaccaatcatcactctctccctgccaccccccttccccgccggccggggtttaccatggagattaaaaacgtccttgacaaaccaaccagaactgtggaggccagagctgtgcagggcagaactgccaagagagaaggggagcaggagcctccccacccatcacagctgcacagagggtggtgcccagctgtactcaggctcctgggtgctgctggacgagggctgggaagggggagctcatgcacacagcaggacagagaggggtcatctgccaaggctgagactcagggtccaggggtctcagagctggacatggaaggtttgaaaaagcacagagggagaggggaggaggctgggaagggaaggagaaggcaggggggcaatggtgagtggggccagcatgaccacagcctccctgtgtgtcaggtagagagtcagccttctcccagattaattaccctgagtgcccacggaaatcccacgaggcaggcagcgtgatcccgttgtagagaaatggtgtctcagggagctggggctgcctgtctaagatcacggaggccgaggcagagccaggattcccagcccaggtttgcctggctccaaagcccgcaggctgtgccacacggtcccatcctgatgacccatcttgtccagggctggcgaggaggccgacacctggggcaaggcagtgaattggggtcaggaactcggacttgatcctgtgtccagaccctccaggctcaggaaatgcttctcaaagcacacgtccaagggccagcggctctggtggggacttctgggtaattccacagagtttgtcccaccccaacagaggatggcagcacaggtgtgaggggacatggcgaggaacaagcacctgccgtgtgcctgcgacgtgtcaggagcgtcacatctgcagctcaagtcctccttcccacaccctgtgaatggggagagcctcgccattttgtagatggtcagagaggtgagtcactcatccaaggtcacacagcagaggctgaacccagccccacactgtgcagctcttcccctgcccaaagctcctccagctcctgaggctgaaccagggcaatggtttgggcacagaacagaagagttgtgtctgatgccacttttgggcaagaggttggggacaattgcctccactcccacccagacaaagccaccctctgaagcttatgatagcccttggatgattgttaaaatctgggaccctgggccaccctttgcccctagatgccaggcaagtcaaatcaaaatcaaagatgtgtgttgtgggaggtgggatgggagttgccgctctgtatggactcgagcccaccttcaccttggccaccccgacctgttgactctgcacagcaccagaactggctgccctgtcaacatcccgatttccagtgtctggtctggggcagctgctggctactgtcccacagccagcactgcacgtccacatctaccctcaccccccagccctgtgtgcaccaggaggctgagaagagggcagccagggtggctcagcaggatgaccggtttgaagccagcacagctctgctgaccctaactctttcatcaactagagcctcagtttcctcttctgtatgatgaggtgagcctggaagcaggggcctgtctctgccttattcatctctgagtccttcagagcctagaacagtgcccagcacctatttatagcaaggtttcaatgaatacctactgagtgatgagggcttcatcactggcctatgagctggctgtgtggggagctgatgggaagagatgtgaggtcccttccccagatcccaaatcaaaatcctggggtccaaggaaagggtctgtgtttgtgaaaagctctcctgggtgactgggattcaaaggactgcatcatctttgtagctccttctgtctctgtgatctgaaggtagaggcaggggaatgtccttgatgaccttttgaggtccctctgggtcagtgaagccagaggatccagtatttgtgtgggtgatgcctcgggaagggggaaaaaggggaggaggaatggtgggcgggggtgggtaacgggatctgacatccaggggcagtgactcaggccctcagcaccatgacagtgtgtctgcatttagccaccggctcctgtttccctggcgagcggcaggctctgggccccccaccccgccccaccctctctccatctcacctcagtgctggtggcttcccagctgccctagaaacccctcagccaggctgggtgtcacaggccccgacacgggcaggaaactctgccagaggcaacaggccctgttgctccaggcaacagcctggcccgccgctgtgccctgtgccctgctctgcttccactccacataccaccagcaccgctaatacccctgtagaaggagctctccaggatgaagctccagactgggttgtagggggctcagacaaaagagaaactgcccgtcttcaagaaccttcaatctaatggggagacaggtgaaccctcgcccccgtgggaactgccagttggatagggaagaagggacacagcagagagtcacagcacacaggaagactatgtcacactgccaggtgctgtgggaggacaaagacagtcagtgctgggggcatctggactgggtgtgggcccatgtgagcaggagcagtcagagaggcctccctgggggaggaggcattggagctgatctgggacggaagggacggatttggagaggacagcagaggcccttaactgcaacctgggcagagcagagggcctggccgcctctcagaatggcctccaccctggcccagggcaaggtcagtcccagctttgctgagcaagcaggtgggtagggaggggcttctctggctcttccgggccagcctgtctccataggcacatgttcaaaccacctcggcctctgaagggctttgggtccaacacatctaggttcgaatcccagctctgccacttacgcaactgcgagccccgccctttccaagaggcttcgcttccccgtccgtaacatgggaagagcccctccaccctcccagctgtgtggggatcaaacggggccgtgctggacagcttgcagccaggagcccatgcccagaaggcattctagaactcagggctagaataattgtcttccggaattctcttttacctctgactgaaatcccacctaaggcgctcgcaggcatcacctctgacacagagatggagcagacagttgccgggaacacaaccttctagacctttaaggagaaagctgccaactttgtcctcttggggctgctgaatgttctgagagtcagagggagtgcaggcacagaatccaggtccccatgggggctggcaggggacagctgcacattttacaccccctggcagggctcaacctttccttagagatgggctgtgaaggttgtctgccttgagggaaggagctcctgacgtcacagagcggtggtgcttccacctaccctgtccccaaggagcctgcacactgatggaggaggtacagccgtggaggagaaccagagtctggaggggaggcacagtcctcaggagcccccaggctgacgggggaaacaaaacacacaataaaccccaaacttgcaaggttctggggcaggcaccgaggtccgagtggcaaggagacaggatccagccctgtgcagtggtgaggaggcccctggggctgctgtgatcagcctggaatgtcaggctgtgagctcagccctctcggcctgcgtgtcgggctgtcagcagggccggcgcacgggagaagatttccagccccctctgggccatggagaggcctaaatttagctagtagacaaggggctggccccaagcccagggacagtcggccttataaagcggccgcagtcggagcctggcacgctcgcccagaggcctgcgcccacaccctctcctgtccagccctcgcccgcctgggcagggcccggcgccgtccgtggatgagccacagaacctcttccaccttccgagcggagagaagtttccattcctcttcctcttcctcctcctcttccacctcctcctcggcctcccgtgctctcccggcccaggacccgcccatggagaaggccctgagcatgttttccgatgactttggcagcttcatgcggccccactcggagcccctggccttcccaggcaagtgatccgggccctga

SEQ ID NO: 4797 - DNA, 6000 bp, Homo sapiens
attacaatttatctaattgaatttggctctagatattatcaagggcaaaggtataacaaaataacgccaaaacttcaaaaacagtttttatcatctgagcagatatttacaataaaattatattaaccaaattctgacaagtagcctagaagattttaaaagtaaccccctttcctttcctatccccacaccaaaccctgactcagttagctctggcaactgacatcttctggcaattattttaaagtaacaattttaggctagtcaaattacttttatcaggttacagacagatccatactcgattaataacatttttaatggctagcatgagtacatatgcctttctttttaccctcagctcaatgtatttaagatattttcttcatagactaaaaactcaaagctttttggccaggtgcaatagcctgtaatctcaggaccttgggaggccaaggccagtgaatcacttgagcccaggagtaggagaccagcctgggcaacatggagagacctcatctctacaaaaaaaacaaacaaaaaaaaaaacaaaaattagcccggtgtggtggccttcatccgtggtccaggctactccggaggctgaggtgggaggatcacctgagcccgggaggtcgaggttgcaatgagcagtgatttcaccactgtactccagcctgggagacagagtgagaccctgtctcgaaaataaataaatcttaaagcttaagaaaaaatggcttggtgcggtggctcatgcctgtaatcccaacactttgggaggccgaggcagacagatcatctgaggtcgggagttcaagaccagcttgaccaacatggagaaaccccgtctctactaaaacaagagcaaggccaggcgcggtggctcacacctgtaattccagcactttgcaaggccgaggcaggcggatcacgaggtcaggagatcgagaccacggcgaaaccccgtctctactaaaatacaaaaaaattagccgggcgcagtggcgggcgcctgtagtcccagctactcgggaggctgaagcaggagaatggcgtgaaccccgggaagcggagcttgcagtgagctgagattgcgccactgcacgccagcctgggcgacagactgagactccgtctcaaaaaaaaccaaaaaaaacaaaaacaacaacaacaaaaaaacaagagcaaaactctatctcaaaaaataaaaataaaaaattactctttagagcctacgacaccatatgatcataaaaaactaatagcagatcccttgagggatctgaagtgtaaataagaattttattctgtaaattacttccacacaatgtattttaatgagtttcctttttgtttttgctttttaaaaaaaaattttaaggggccatgctaatcttctctgtattattccaatcttagtgtatgtgttgccaaagcgagcacttttttttccctgagactgagaagaaagttaactggattatggagaaatgcaatcacatctattgactggttttgacctgactgcgtcttaaacacttccttgtaccttaatatactcattaaaaggagatataatccatataatgaacaaatgttttattatgccatttttaccatgcagttaaaacaacccaaccacttgttaatcaaattttaaaccataaactcttaaagtggaactaataactctccacaaacaacaaaatatcaacatggtcaaagtggtcaaagataaaataaatagtacatattttaaaacatcctgcagaattcaaaacccataaacacaaacgcaccaaaaaataaggcccaaataatcaatgacacttactagtacaccagcagcaatggaagcaatagtattgcgcttttccccccagtcaatgcattctgagcatctcaagccctctagaaatccagacatttttttcaggtcacttaaaaacaaacaaacaaacaattaaataagtacttccatttacttgcttcaagcccgaaaaataattaatagctcaggaataattagataaaagtgaaattacaaatgctttattttggttccacatacttcttcagaatatttgatttagtttttgatgaatttccacattataactttggaaagtaatatctggattcatttagtatcttttttaatgtaaaaaatggtttgggggccgggcgtggtggttcatgcccgtaatcctaccaatttgggaggctgaggtgggtgggtcacctgaggtcaggagtttgagaccagcctggccaacatggcaaaccccatctctactaaaaatacaaaaattagccgggggtggtggcgcatgtctgtaatcgcagctacttgggaggctgaggcaggagaatcgcttgaacctgggagtcgaaagttgcagtgagccgagatcgtgccactgcactccagcctgggcgacagagcaagactctgtctcaaaaataataataaataaatagaaataaatggtttggatatatttaagcagtattaacaaaggtgggtctccaaatattgaaaaaattttaactactggttgacctcctcctgaaaatctgtcacatcctattatttctaagtaggtattaaattagtttaggtggtacttttaataccaagtatatgattactaatccacaggagctcttttgtatcattttgattccaaacttattaaatgaatttgatatttacagtccaggagcactaacattagtagagagacaagtgataaactttggctctgagtggaattacagattcaaatgaaaaatatttctctaatttacatattttatcacagaacgtgtgtttcttcacacctaaatcaagaaattaaacactgcactgcagttcttacctctacccacatcatttcctttcacttcattcattatttttctttctgcaagcctgccttttggtgtcatttctatataaagaacatccactttaatatccctatctctgatcctaacgggtgtttccagccaaaagcaagcacagaatcgtggttaatagtaattcagattacaaaaatccaactgctatttaaatatagccgacccaagctgtctttacaaattatataaaacattcctgtaagccgagcagtagagacctgagatacagccatgttatctctatttcagagtatgaaaaagcctgaaatacatataacttgcgaataacaacacccaaactcctacagcgaacttgacttccttaagatactttgtagccagcaattatggttgtccaaaaatatgacaccctacaatagagcaacgtctcccatttttaacttctcttttaaaaattaaatattaaaatatatgattacagccaatgctaagatgcctttgggacaagttcaatttaggaaattcactcatttgattcttccccgggaagaactgcaattcaataagtgttattttcggttcatcccaatggccccaccccgaatccatttttctttgcacgacgactggtacgctcaagccagaccccgccctccaaactctgggacttttaggtctcgagggacgccgctggaagatgggggagccacctttagccggggcacccctcgctgagggagctggccgggtcacgctcctttctcggggcttcggcttgtccagctgtgaagtgggggatcgggggattttccagggatcctggggtgtcccgggggagggcgcggtcccctctccgtcttggcggggtctggacgccgtcgccttctcctggcgccgccggacccaggagaggagaggtccgcggcggctcagcccgggtctgcggcttccgggagggtggcggcaacgagcctgtgctgtgggcaccagcccgtcagacggccccggctccgaggcctctccagcctgcggccgctactctcttacccccactccccgcccgacacttacgtccagccccgtcgtgcagtggttccggagcccggtgtcgcgccgcgccggcccgcctcactcccccgattttagccaagaaaacaaaacggccacagcctccagacacccggatgcagcagtaccatccacccggctcagtcgcgcatgcggacacggggcggagggcggggcgccgggtccggagggagccacgcccaccacaacaacgcgtctgcgcatgcccgggcgctgggttcaggggctttccgccgctctgggttcacagctggacgtcgggagtgctagtttggagtacgccatttgagagtaggcgtgagaagttgctctgtgtgctgagcgttctaaaggaaggcgtccgttggccttcgtacccgtcttgagtgaggtgacgagtgttttctagtactggggtcggccgcgcagccctctcaggggtgggtggcaggaagagtgccgggtcccgcgtggtgcaaaaggtgggttcaggtttgcggccacacagcgctactcaggactttttagtcttgtttattttctccgtgcctgttcccgccccccgcagctccacctctgggagaggggcgggttcagctccaggaggcggggacttcccggcttggcgtggctggggtgtcccgtggaccccagtctcggcgcggtgacccacttatgggacttggcctttctttgttgtttgtttaaggcagggtttctcagcctgggcactactgaggttttgggccggctaattctgtctgggttggggagggtgctgtcccgtgcttcgcaggttgtgtagctgcatcccccgcctctacccagtggatgcaagtagcagccccagtgaaccaaaaatgcccccagactttgccaaatatcccctcccggggaagatcgcctcgcttgagaaccactgttggaggagagcctgggttttcgggaggtaaccgtttacaaaggggagaacggtaagaagccggaagcaacgatgacttagctacgtgaaagacttgcggccgggctcgcccctcttctagaagccgtcagtttgggtctcgcgtctggaatcaccgtcaaggagtcagatccagccccggagagggagcagggtcgaggtctccttgcagaaggcgccaccgcaggaagcacaggcgcaacgtgcggtctccctagcggaggcgctcgcgatcctgcagccgccggtccgggaggtgctcggtagccctccttggtgcctgtccggtagctggtcactctcgggggaaggtcgtgtgcagaagggcacatgcgatcacacagagacggcgttgctgcggctttgacccgatggtgcacccgaaagaacacagagggtgaagggagagatccaggaagtggtcgcggagcagaaccccccttcacttcagttaaaaaggtgggtcaattgtcgttaagagatacgcacaggttcatctgattgacatgtacggcggcagtatatgagtgggatgggaaccaaggtgactgttgtttcctttgatggatgaaactttcatccctttgggtttttttgtttgtttttggcggtgcattagccgattagtagataaaactgcatgacaatctatagcctgtttttaaatggacacgttcttaccactcaggaggtttatcgtgattgtttaatgtctcagggtggaggaatctagtgcaggcagttcttaatgaaaccttttaaattcccgttagtgacttaacattagtttaccagctctgagcagctttaaacaaacatcctcttttaatagctaatgagtgcgggagaaaagatactaactcctttctctttgcgttttttgcccctacccttttttctcttttctggccttaacatgattgtcaaatatttataaatatgagtgagcatctttatattactcttactaataagatacatgcttaatttgtcattctttacctttttgggacttaatgaatgtttgtcttttgtagataaaatggagctgctagaaatagcaaaagccagccacccatatt

SEQ ID NO: 4798 - DNA, 6000 bp, Homo sapiens
ggactccaaccccacttctcccttccacactgccctagcagaggttctccatgagggctccacccctgcagcaaacttctgcctggacatccaggcatttccatacatcctctgaaatgtagacagaggttcctaaaccttaattcttgacttctgtgcacccataggctcaacaccatgtataagctgccaaggcttggggcttgcatcctctgaaacaatgtcctgagctgtatgttggccccttttagccatggctgagatgcagggcaccaagtcccaaggctgcacagagtaggagtagggtcctgggcccagcccatgaaaccatttttccctcctacacctctgggcctgtgatgggagaagctgctgtgaaggtctctgacatgccctggagatattttcccctttgtcttggtgattaacattaggctccttgttacttatgcaaattcctgcagctggtttgaattccaccccagaaaatgggtttttcttttctaccatatagtcaggctgcaaattttcctgacttttatgctctgcttcccttttaaacacaagttccaaattcagatcatctctctcaggttcaaagttccacagatctctagggcaggagcaaaatgccaccagcctctttgctaaagtatagcaagagtgacctttgctgcagttcccaataagttcctcatctccatctgagaccacatcagcctggacttcattgtccatatcactatcagcattttggtcaaaaccattcaacaagtctctaggaagttccaaactttcctacatcttcctgtcttctgagctctccaaacttttccatcctctacccattacccagttccaaagtctcttccatatttttggatatttttataccaatgccctactctctgcagtaccaatttacttcaccaggtaaaaaactatgacctgctgaggtgcttgctgaaagcaaagggaatacagaatgggtagtagaagaaggtagtgatcaataccagctatgaccacataagcagttgcagaaattaggactgtaattgtcatgagttttcctccttattttgttaagaatatgtttatgcatgtatacacttgtactaagaataaagaatatatctatatttcccctctttttcctgtatcctgtgacatttattgacatcatatcagcatttaagtgttgttaactttatgtaatggcatttaggttaaggattagtatgcttctggttgtataaaggatagctgtattgttaggcataattatgaccgtattattgtttttatgtaagcatgcaatgggttcaccttgcctgctacctagaccgaacgaatttatcaagacaggggaattgcaaaaaagaaagagtaatctatgcagagctggttgtgcgggagaccagagttttagtgttactcaaatcagcctcctggaaaactcagggatcagagtttttaaggataatctgttgggtaaggggccagtgagttgggagtgctgattggttggcttgtggatgaaatcttagggagtcaaaactgtccttttatgctgactcagctccagggtgggggccacagaactggttggcaggtccaggtggggccatccagttatcagaaatgcaaaaacctgaaaagacatctcaaaaggccaatcttagtttcacaatagtgatgttatcttcaagagtaactggaaaagttgcaaatcttatgacctctggaataatggctggtaatatttagaattccagcccctctcatcctaacttggtgcctggtggcctttcaatcattttacaacaacagtttagcttttgggaagggctattatttaaactataaactaaattccttcccaaggctagtttggcttacattcaggaatggacgtttagaggttagaagcaagacggagttggttaggtctgatatctttcactgtcataatttcctcagttataatttttgcaaaggcagtttcatttatttggagattaggtatgatttcaagaaatgtgtatgggttcaagttgacaagggatggacttgtgaaggttaatattgtcaacttgattgaattaaaagatgcaaagtattgtttctaggtgtatttgggtgtttctgggtgttgccagcagagattaacatttgagtcagtggactaggacaggaagacccactctcaggaagacccactcacaatgtgggtgggcaccatccaattggctgccagcctggctacgaaaagcaggcagaaggtgggagaagctgacttgctgagtatttgggcttcatctttctcctgtactggatgcttcttgccctcgaacatcaggctccaagttctttgactgttagactcttagacttacaccagtggtttgtcaggggctctcaggtctttggccacagactgaaggcggcagtgtcggcttccctacctttgaggttttgggactctgattgagccactactggctttgttgctcctcaacttgcagatggcctattgtaggacttcacattgtgattgtttgagtcagttctttttaataaactcattttcatatacgcatctatcctaccagaactatcctagttctgtccctccagagaaccctaatataaggatccagaagcaaaataaatgcacacgatcccaactatctaatgttacacatttgaaaccagaggatgtatgccatggagcaaaacatttgaacatgtcagcaatttgcacttgtatccagtttctagatttatatgaatttgtattcttatgtacctttacaactccttttttaaccagcagttcccagggcgctcaatttgaagcatctaaaagggtcaaacagggttgcagataaatgccagggttgattactgaggaatgacagatagcatctttcctattccttgctgaccattgcccaaaaggagctgaaaccatgactgaaatgagcttctgccccttaattctctctgctttcatttctcagaatcctcagtcacacgtctgagcagctggggtttttccacccatagagtctgcatagctaacctaatgcaattagttggtaggagagatataaaaacatatttaaaagttcagggtagaaatccattttttagtttaaaaatgttcaatagtatatgtattttatgatcttataaaccgatttaatcttgtaacatacaaaggaattaagaattctgattggtgacttgcaagataccatttgaacagagttgaagaatcatttttgattttccaatacgacatattgaaagggcaaaaggaatggcttagtatttatggaaagacttactgagtgacagctgtcccttcacactgctccaagggcatcccttgtgtaaattttaaacatcacagagttctaaaagacgagactgatttgcctgtcacaacccccccctttcttcataactactcttttccataaaattcctccagggaaggaactttttatttatctggctttgtatccccagcacccagcacagagcctggcacatagaagacattcattaaatgactgttgaatgaatgaaagaaacaaatttgatatgacaacaaagataggttaacatatatgggacaaacattatttgacaatgacaaaagaagtgaggcacagcctgacgtttttcactcatagaacttttcctgatttaaatagtgtccacctacacttttatattgcaaataaaatgcctttagttttaaatttggtcattatgctctttaagactgaaagatgtgaagacatcaccatcactttttgaaaggagaaggtcctcatgggaatacctatcatatatcttgggggatggggagtgggggaatttgggagtctctggaaactgatgtaactgaaattaaacttcaatttctcgtacccatttcaaaactatttgaaaagaggtaatgtaggtttctccataaaccacttaagcgatttctgatttgtagcaatacagtataaaatataggacttattttcaaaggcagaatacaaaaaagttcaaaatgcagctgaccttgatgagttaggattatgctggaaatcagttgctgaaatttaattatttctattacttctcccgccttctcccaagttaaatcatattgaataagggcgttttggagaaaaatccaattaccatagaattatttatctttaaactatctagtttgcacccaattaatttttcctcagcagtgcagtagagtaaaattcaaggtctactgctaatacaaaaacttccttccaaaaaaagagtaaatgctactaattttaaatatttctacacttaaattaaaagaatgaaatatacgctaacaaaggcaaatacaaaatactcttcccagaacttacttctgaaacctagctgtttttacacagcagttttaattaacatttttcaaaattgtagaataagtacatattttcaaaaataaaaccaccgaatactccatacacacacacaaagttctcagaacgagagcaaaacatgcatatatcctcactacaaaaagaaaaatactaatactggagcattttgctgtgtctccttacctcgagtgcagtagattgcagtagggccagccgatttatttccctgcagcttagttatcataaaacggaaggggcgtctcgtttgctcatttttgtttttttttctaaaccaagtagcgtgcatctatccttctccattagctggattaacaacctggaaaaagtgccgcccgcaaagtgagcgcctggagcaagggacagtccccgagtggccgcccctccctttcggtgacgctccacttcctgtcggcctaaaaggcattcccaggaagctcggttttgtagtttccagcccacctccgaaagccaatcctttcctccatttcttctccaaggtaacaacttttaaacattcacgtgacggaccaccttccctcagccaaacaacttccctgaaaggcgcccgaaggagccttcccatccaccgcgggtgcccaggaaaggcctgtggggctctcctccccgcgctccacacgccctcgcatcccaccgaggggccagcttctgcctgcacgttgctgaaactggcctggaggttctgacaagaattagagcggcggccgttgccccggggatgacctggaagcgaaagagaccggcacgaattctagagtttcggggtttccgcgggttgagattgtacgggaaacaatgcattaaccaaacctaaaaatcaaacaaacacgtctggtagaacctaccattaaaaagcttctttcctatactacgtttaacagcctttattttgaaagacattgattgatgccaggcatggtggcgcacgcctgaggtctcagctactccggaggctgaggaggatcacttgcgtccgggagttccaggctgtagtgagcctcattgtgctccagcctaggtgacagggcgagaccttgtctcttaaaaaaataaagaaagaaaaacattgatcgcctcctgcgtggcagtccagaagggtcaagcgctgttttcggggtggcgtggaatggattcctaagatttgggcgcccatagagttaacgcagcaaaacgatcacttgcgtttcctgcggactggcggcaatagaacacgtggctgcctagactcttaatcactgatatctaccacaccaggatttaatgccagttgggaggaaatggcgaaagggcaggcgctggagcccatgcatccgggaacactggtggtaggcggtcgggtgggcgtgagcgggctctccatctcccagcccagtctgcaggtcgccacctcaggattttcttcctgagtccgggtggcaggattccatcccaggtcagcccctcacaccccctggtagttgccacctcctggcgtccctccaacagctccagcacctttctcatcccgcccccgccg

SEQ ID NO: 4799 - DNA, 6000 bp, Homo sapiens
gtaggctctgctgctcacttgggaagtaaaaaactctaggcctcaattttccaactatagaagatgacaggttagtttgtctctctctctctctctctcaagtcccacttccaaaacctacactatccacatattctctttcttccttagtaaaaaatccttgactttccgcagaatacatggctgagtggaataaagactacatttgcaactaggcatgaccatgtgataaaattttagtgaaagcattgtgtgttagcatccaggtaaatcttaaaaaaaaaaaaaatgtgcacaccttttacctctttttatctgcattccagacattatgctgccagggatgactgaaacactagcacccatcttggaaatgaagttttatcttgtgtaagcaaccattattttaggtttttgttttgttttgaaacagagtattactctgttgcccaggctgtggggcggtggctcaatctcggctcactgcaacctctgcctcccaggttcaagggatgctggtgtctcagcctccatgtagctgagattacaggtgtgcagagtttttctgtaacttgaaaacaaacttaaccgtagatgatacaaaaccacattgttacactatgttaccttgagattagtcagttactcaacaataaattagtaaatgaaaaataaaatactagaaggaagggaaaaatcacatagaatttctaccattttcctcccaatttctaagagtgagagaatggaatttaatgttttgtcattgctgtttttccttaacggggtagttaccatttttagtataggtagtgtaattccatacattaattattccctcattctttcatttagcaaatatgtattaagcatccactatgtgctatgtactgaagtgcctgcataagatagaaaagatccctacattaatacagtttacgttctagtgggaaggtgaaaggtagcagatatttattgaggggaaaaacacacaacaactacctattgttccactgaagagacctactcatcatctaaaatataaatcaactataattaagttcttcctttaaaatgaaggctctgaaaaagaaccagaacaatttaacatttgttaaaattagatcaactgcttctatgaacctttatttgtgaagtgagtgttttattcacgtttcagtcctctataggaaaaaaattcttggttatttcatgttctcaacaagttgaaatttatttttacagaatgaaattcaacaaggaattgactaatacacaaaatgagttttggaagaaatttaatcaaggaactgaaaagctaatataacctacaggaacacagataatcttctggtcatataaagaaattattgatcagtcaacaaaaggaactaaaaattttggtgtctaaataaaacacagaaagccagattattaaaaggccagagaaatgcctaaatctgcccaaatatcaatgacaagagatctgtattaaaaattaatatttaagaataattggttgtagatctggagattaacataaataggcatgagatgacggatacgtgctaaatgaactaagtacaacatgcactggagctagatttcaaatctagctagaagacataacacaatgaaaaacagtatataagctgcactagtaaagaaaagcaagtcccctaagggtaaaagaacaagtcgactacaactaatgtttttgttatgcactgatgcatactgacttaaaaaataatggttctggtaatctccccaacagatctctacagatcaaaagagttactatatacttaactttccatgaaaggtggtttaggaacttcaagtgtgaatctcttgaatgagatatttcacagagtgacttatgtaatggaaagccatagtgaaacactgcaatagaaactatctgtagcaaaatatgcatatataagctatgatacactcttgatacaaaatatgcatatacaagctatgatacactcttgatacaaaatatgcatatataagctatgatacactcctgatacaatcagcacatatcccaaaattaatttggcataatttaggaagagaaaaatgtaaaatatactgtaaatattatatatttatgataaagtatgattattcaagtacaagtgctttcaacatctacagtatattaaagtgtgttaatactatgggattaaaaaattaatctatgatggggtatccttcaaattaacacatctgattcccaaaggattcaaaatggttattacatatattaagatttcattgtgccaatatgcctttatacccaactgttgactaaaccaataaccttcataatctgctggttattgagtattttttatagaactgaattgacggttgaattgaaagaagcccaagcattatataaaagtatacatgtcacaaaacctggtgatattacctgtcaatgtttgatctcaacagaagatcaaggacagcgattttctctgaaaatgggtcttaaacaacagagactaagtctatttaataaatagaaaacaggttcttaatctagagtccaagatttagtacagggaacccaacaacatcctgaagctttatgtacaattctgagtattggctttcatcagatttttgaaggagtatgggatctaaagacagaattagtacacctaggagtgtgacagtcttgttagcagaacaacttcataagaccttaagttactcaacagcaaatacctgaataatagtaacttcactgccacagagttacacactagattttcctcctcctaaggatgtttcaaaaaaaacaaaaaccctcaaaggtgccaccaaaacccaagaaatgttgtttctagaaactatatgggatttttacatcgcagttaagactacaggaaaatcatgagacagtttcggcattaaagagagaagagaatgacacatattcctcccgatatcactttataaaacctcccattccaagccccaataacaaactaagtagaacatctcagatatactctctcagaatcttaagggtgaaatccaaatgccactcccccccgagagaggcagcaaacaagtttctcccaattccaacaaagtgggtaaacctaaggcctacaattagaaatgaaagattctgcccatctgctaaaataaggaggggcttgtcagtcttgtctgatggaactggaggggagcgtgacaagagaggttgcacaggataggcccagatcttactcaagaactgtagccctaccagattggtgtgggtatgagaaagcaactcagcagcagaggtaggtaacaaaggtaggacctgaacctcctagtgaggagctacgtggcattaagcaaacagtgcttcgtctccctcacacccagcttccgcccaaaccattttcccctttggttaccagttgctccagatgccgtagagtagttccacaaaagcgaaagagaggttcaggcacaggaagaaaaacaggttccgggaagtcttgtcggacagtatagacctgggaatgatacacgtggaaaagagccgggagagttaaggaggtgccgggaccccgaggctgggtaccctcttcaagaccctcccagttcacatgctcctttcttcacagctaggggttgacggggagtttttgactctccctcactggacctcgggccatcctgaggtctgggccttctccctttctgccggacaccccctccccgcaaacacagcaccccgcacctaaaccagcccgagatcttgccgaacaaattgaacttgggtggtttgtattcatcgtctttgatggacaggggcaacatcttctctgcccggcgaagggccgggtctactcccctctagaagtggctccgtggggtgatggcagtgacagtagtgacgcctcaaacgggaatccccagcgcttgtccggggccgcgcgccgctgcgagacacagacagacacagacacacacccgggaattcgcttacttccggcccgggccgcgcaacgcgtcctgggacaggaaaggagggaggccggtcgcgggcggggcctgcgcggcggagggcgtggcttgcggcgggggcgggatgagaaaggtgctggagctgttggagggacgccaggaggtggcaactaccagggggtgtgaggggctgacctgggatggaatcctgccacccggactcaggaagaaaatcctgaggtggcgacctgcagactgggctgggagatggagagcccgctcacgcccacccgaccgcctaccaccagtgttcccggatgcatgggctccagcgcctgccctttcgccatttcctcccaactggcattaaatcctggtgtggtagatatcagtgattaagagtctaggcagccacgtgttctattgccgccagtccgcaggaaacgcaagtgatcgttttgctgcgttaactctatgggcgcccaaatcttaggaatccattccacgccaccccgaaaacagcgcttgacccttctggactgccacgcaggaggcgatcaatgtttttctttctttatttttttaagagacaaggtctcgccctgtcacctaggctggagcacaatgaggctcactacagcctggaactcccggacgcaagtgatcctcctcagcctccggagtagctgagacctcaggcgtgcgccaccatgcctggcatcaatcaatgtctttcaaaataaaggctgttaaacgtagtataggaaagaagctttttaatggtaggttctaccagacgtgtttgtttgatttttaggtttggttaatgcattgtttcccgtacaatctcaacccgcggaaaccccgaaactctagaattcgtgccggtctctttcgcttccaggtcatccccggggcaacggccgccgctctaattcttgtcagaacctccaggccagtttcagcaacgtgcaggcagaagctggcccctcggtgggatgcgagggcgtgtggagcgcggggaggagagccccacaggcctttcctgggcacccgcggtggatgggaaggctccttcgggcgcctttcagggaagttgtttggctgagggaaggtggtccgtcacgtgaatgtttaaaagttgttaccttggagaagaaatggaggaaaggattggctttcggaggtgggctggaaactacaaaaccgagcttcctgggaatgccttttaggccgacaggaagtggagcgtcaccgaaagggaggggcggccactcggggactgtcccttgctccaggcgctcactttgcgggcggcactttttccaggttgttaatccagctaatggagaaggatagatgcacgctacttggtttagaaaaaaaaacaaaaatgagcaaacgagacgccccttccgttttatgataactaagctgcagggaaataaatcggctggccctactgcaatctactgcactcgaggtaaggagacacagcaaaatgctccagtattagtatttttctttttgtagtgaggatatatgcatgttttgctctcgttctgagaactttgtgtgtgtgtatggagtattcggtggttttatttttgaaaatatgtacttattctacaattttgaaaaatgttaattaaaactgctgtgtaaaaacagctaggtttcagaagtaagttctgggaagagtattttgtatttgcctttgttagcgtatatttcattcttttaatttaagtgtagaaatatttaaaattagtagcatttactctttttttggaaggaagtttttgtattagcagtagaccttgaattttactctactgcactgctgaggaaaaattaattgggtgcaaactagatagtttaaagataaataattctatggtaattggatttttctccaaaacgcccttattcaatatgatttaacttgggagaaggcgggagaagtaatagaaataattaaatttcagcaactgatttccagcataa

SEQ ID NO: 4800 - DNA, 6000 bp, Homo sapiens
ataccatggaatactatgcagccataaaaaagggtgagttcatatcctttgaagggacatggatgaagctggaaaccatcattctcagcaaactattgcaaggacaaaaaaccaaacaccacatgttctcactcataggtgggaaatgaacaatgagaacacatggacacaggaaggggaacatcacacatcggagcctgtcatggggtggggggaggggggagggatagcattaggagatatacctaatgtaaatgatgagttaatgggtgcagcacaccaacatggcacatgtatacatatgtaacaaacctgcaagttgtgcacatgtaccctagaacttaaagtagaataaataaataaataaatagtgaaaacattttgccagggttactaaaatagctacagaggttgaagctcaagtcacacatggaaagacttccctagagctattcaacataagcttatgtcctctatgctaaaaaacgaatctgttcacaactattataaagaaacaaatgcaaacaaattttaaacaattataatgaaaatagaaagaactaaaaaactataggtaactaagtatatatataattcaataaattaatcaagtacagcactggttcccaatactgatccaagacaaaatttttagcagctggccaggcacagtggctaatgcctgtaatcctggcactttgggaggccaaggtgggcggatcacctgaggtcaggagttcgacaccagcctggccaacatggcaaaaccccttctctactaaaaatacaaaaattagctgggcatggtggagggcacctataatccctactcgggaagctgaggcaggagaatcacttgaacccgggcgacagaggttgcagtgagccgagatcaggctgcttcactccagcctgggcgaaagtgagaaactccatctcaaaaaaaaaaagaaaaaaaatttaacagtctacagtgaaataaaacagtaaggaaaaggttacttttatttcataaagctaaatctatataatctatagaagcgtccttaaccctaaaaatacatacttcttaatgttttggtactatcatgaaatgaccaagacaacacatcattgggggaaaggggttctaacaaagttactttgcaaaataagaagttgagtcataaacctagtctttcaatgctgtgtatgtgtgtgtaatcagaataatgtgaaacagagctctatacccacagagaacccagtcaagctctgaatgatcaaataatattctagagagtttctcatacagagaagcataaagacagtatctgagtatgtttccaaaaatcagtattaatgaattttgtccataatcattttgatggtcacaagtttgagcatatatttgaatccctaatatatttaaagcattacatgtatttcaacattcaaaattacataaagaaacccaaatgtactgggtggttttatagctaaaggcaactgctgaagaatgtttcatttctcaatttaaaatagtacggtactatcttttaatattctaagagttctaccaatgtaagacttccatccaattacatttctacaactgaattgttctctaagtcatttcacttcaactgaaaatgtcatttcattataggacattaaaaattctgaatgtcacttggctctaggcaattggtcttgattaaacaaaaatcaaaccttaacacaaaaatatatcttacataaaattacttctaaatgtttaccaaccaacggagaatcttaaatgtaggcccggctgtggccaagcgcagtggctcgtgcctgtaatcctagcactttgggaggccaaggtgggcagatcacctgaggtcaggagttcaagaccagcctggccaacatggtgaaaccccgtctctactgaaaatacaaaaattaggtgggcatactggctcaagtctgtaatcccagctacctgggagtctgaggcaggagaatcactggaacccaggaggcagaggctgcactgagccgagatcgtgccactgcactccagcctgggtgacagagcaagactctctcttaaataaaaaaaaaaaaaaagtaggccaggccgggcttggtggctcatgcttgtaaccccagcactttgggaggctgaggtgggtggatcacctgacatcaggagtttaagaccagactggccaacatggtgaaaccccacctctactaaaaatatgaaaaattagccaggcatggtagcgcacgcctgtaatcccagctacttgggaggctgaggcaggagaatcgcttgaacctgggaagcagaggttgcagggagccgaggtcacaccattgcactccagcctgggcaacaagagcgcgactccatctcaaaaaaaaaaaaaaaaaaaagtataggccacattcattccaattacagctaaatgaagctgttttgtcaaatctgtgccagacttattgttataatcaggtagctcttccaagaatgtcttagaaaaaggcacttgctgcataacaaagaggctgtgctaggtttaactgacactacactgcacactgataggagtttttaaatttgggtcaataaaaccagaagtgactacaggtgtcactaccatgaaagagaaagcatcttactacactgcagttctatgtttactaaaagatttgattatttatgttaattttttcaatgactacatgaggtagctttctttcctatctgtgctaacctatttgcaaatatataaatacttcttaaactccgcaacacctcttatttgtattctatttccaataaaaatccaagcagcctctcatattttaattgcacttcaacctatttttttagtgatgactctttttttttttgagacagagtttcactcttgttgcccaggctggagtgcaatggcacgatctcggctcactccaacctcgccctcccgggttcaagtgattctcctgcctcagggtgtagctagtattacaggcacgcgccaccacacccagctaactttgcatttttagtagagatggggtttctccatgttggtcaggttggtctcgaactcccaaccttaggtgatcagcccgcctcagcctcccagagtgctgggattacaagcgtgagccaccgcacccggcccctcttcctccccgaccctccctccccccagacggagtctcgctctgttttcaggctggagtgcagtggcgtgatctcagctcactgcaacctccacctcccgggttcaagcgattctcctgcctcagcctcccgagtagctgggactacaggcgcacaccaccacacccagctaatttttttgtatttttagtagagacggggtttcaccatgttggccaggatggtctcgatctcttgacctcgtgatcggcccgcctcggcctcccaaagtgctgggattacaggcgtgagccaccgcgcctggcccattgatgactctttcttaacgactccatcagaaatctgtcagttaataaacgtgctgctcagttagtgacgagaaataactgtatgttagtggttaagaagccccataattgcagcatttaatacctgctgttgttcctaataccaccaggctgactcagactaaggagccctccaagttccactgtctaataaagacctgtcaaagtgaaaactcaacagtggaaactccagaattcattcaaccgttgtacctgctttacctacataaataagcagaactgatttttgggttctttgccacaagaagatgcgctgaaaacaaagcatcaaatggttctgcaaaaaatactcctcctctttacagtgaagtttaaattagatcaagaatgctacttacaaagatattctgaattacaggatctcctgattcatcataatgaacttttcaaccctgttaagtatcaaaactgcagcacaaaatcagccaacatgcgaactaaggactaaagacagttcataggtctttggcgattgtgattataaaatcacgtgcctgaggaccactaagtctgaggtacacaccaaatcatgcagctcaagataagcagaaagcactgttccgtgctcaacccaccccccgccccaccaaccatccaaagtcaatgctggtgcccaggacccgtgagtccttaccattaaatatgcccgccccatttcctccccagttgaggaaatcacagactccttggccccaagaatcttaaccctcgtcttcatacaattctccagaaaccttaacaccggcttttttaggctcccaccacctaaaacaaagttcataaaatcctgacggcagtttccttcagagcttaggctctcgaccacaccctccgaccaggcctgtctccctcctgcctgccccctgtagagggaaggctccccctccttttggtcactctgcctggccgctctactcacaggatagcggtgtcggggggcagcaagcccgacagcgccctccagctcggtgcgggcaatttcctgcgactgcagtccaggagaggaatgcggcaggagcagggcgcggggcagagacctgctccggcggcgggcaacaggaggagagcggtctgggcaatgaagagtaaccgagaaagcactctagatcgacaccccagcaactgctcctccgggacgcctaggggcgccggcgccattttccccctcgacctggacgtggcctagaagagctgcctgctagaaaaggaggatcggcggagaagctcagcagagatgctcggtggctgcactgtctcccgaagccccggctgaaggctgtaccatctaaaggcatgcaaggagcagacgcagcgcgacagcggggtcgacggcctgggacacacggcctgacggacacctctcgtccgcccctccccacggcgcaacgtcctcacgcacaggggccagccaatcggtgccataagatgaggttgcgcccggggcggaactcagtgaggggcggggccagacgcagccgagtatcttgaggagaaggactttaaagcgttcagggattttagctgccgctgtggagttccgccgctgttcttccgctggagggcgcagtagttccttaagagggaatggtgcggcgaatagctgtgagttcaaagtcctgactacaggtatatctactgtagtagaaaaggatcttttatttgctctgggctttaagaaaggggagtggcagaagggctgccttccaagtcgcacacacgaatgggtcacgggagcttctatcctggctttggccagatcggcctccagagccgagctcgagcctcttctgccccctgctgcttggctgtagcccctgctcttctgcaagtaggcggcaactgccatttgcataagatcaatatcactctctgttaatggccttgtaagctcctgaaggcagaggccctgtttcttcatcggtgcacctccaccttttgttctagcttggagttcaataaattttggtgggactgcacctgcatgtctatataaaggaaatacccttctctttggagggatgctgtcaaggtcactctcagaaaagcaagcgagacaagagggtgttgagcagtcaacaaagcaaagactggatgtgaggaaatttatttctcctaaagcagaggctatggaaaacttactaggaacagtgaagtctggccatcttatgctcattcagccatccaaggttgtaaataagactttgagaataatagtgatggttcacttatacgtagtgaacttttcaaagggcgtttgcatctgttatcttgtttgctccttcagtgactgtgacattggcaagacaattattgctgatgatgcaacaagccccaagaggttaaaccaagttactcttgaggcaggggcaggttcgacattaacatgggttttctgacataaattgaaaatctgagcaggttaaaaagaatgataatgcctaggttagggttctcatagaaagt

SEQ ID NO: 4801 - DNA, 6000 bp, Homo sapiens
ttattgatttttaaaacaaattttagaataattatcaacttaaataatggcagtgcggtcgccgtattccaaagcagcagctgcatgtaaagtgagcatgggcctgccagccagtggcacaggtgggcctgttatctccatccatgtgcaccttggcctggtgacagcagacacagcaaagagtacttccttccaacaggatctctttcctggcagtggagagaacagaagcagcagcacttcaattgagtttcatgttaataaggaagaatataaaaataatctcacctgtttaaagctagcagagattgatgaggccagttcacctctacctccccttccatttatggactgagagactcaagacataaccctttgaaaggcagatttttaaaacaccaagatgccccaatattaccattagaggttttgttattgttgttgtgggttttgtcttttttttttttttttttttttttttgagacagggtctctttctattacctaacctggagtacaggcatgatcacggctcactacagcctcaaactcatggactcaagcgatcctcccacctcagcgcctcaagtagctgggaccacaggtgcgtgctacaggcccgactaatttttttttttgttttagacagactcttactgtgttgcccaggttggagtgcagtggcaaaatctcagctcactgcaacctctgcctcccaggttcaagcaattctcttgcctgagtctcccaagtagctgggattacaggcacccaccaccatgtccagctaatttttgtatttttggcagagacaaggattccccatgttagccaggctggtctcgaactcctgacctctagtgatcctctgacctcggcttcccaaagtgctaggattacaggcgtgaacaaccaccgtgcctggccttgtttttttgttgttttttttgttgttgttgttgttttgtttttggtttttttttttttggtagactcgggtcttactatgttgctcagactgctctccaactcctggcctcaagcgatccttccaccttggcctcccaaagcactaagacaaacgtaagccactgagcccagccagtgataagaattttatattatctaataatatagtacttaactgttttcttgagagaaaataatatttggcatttatttatttagagacagggtcttactctgttgcccaggctggagtgcagtgatacagtcatggctcactgcagccccagcctccaaaactcaagtgatcctcccacctcagcctctggtgtagctgggactacaggcacatgccaccgcacccagctcatgtttgtattttttgtagagacagggttttgctatgttgcccaggctggtctcgaactcctagactcaagcgatctgcctgcctcagcgtcccaaagtgctgggattacaggcatgagtcaccgtatctggccaatatttggcagtttataacacctgagaaattgtattagttaccaaagagttcctcatttaatctttggaacgtatcattctgttagtatatgccaggctctctcttccatccagattcttatattggatttttagatggtaatccactggaacatgatttccccaaagtttcttaaatttgttacagacagtattgatagtcccctgtctaactcggtagccaacgttttgtaaaaccttccctcctctgaggtagattcctgattccaactgtttacattatttgcttgcaggccattcagcaacaagccatctgctcagaaatccctttagaaacttccctacattatttatgtcactactaaagctatttcccctcccctaaaaaacagctgctttacatacaatgaaaatatcattatttagccatagaagttgatatatgttctggttacttctaggtaacccatcattaccttttacgcactaattggctacagaagtctctcccttctctgaaagactaccaagtagccgtttaatttaacagtagatgtaaaatgcgattcttatattctctcaattaaaagtacatttgtcatgacttttatgtaactggttttaacctcacaaatcactaagatctcccaaatagctgatatgatttttgaaattctgaacttcagtctgcttattttctcatgcaaacttaacatacttacccaaaatttccacattccacatcatcaaacttttcatcttgtctcaaaagaaaaaagaaaaaaaatttaaagccaattaagagccaaaatcaaccattttcagcttcaatttcaattttcaaatgtcagtttgtttttacccaattctagcaaatttatgtagtgtaattctaaacttcactatttgacatttccccgtggaagaaaagcaacagaaacttttcaccatctgtgttgctcttggaaaccagcccctcccatctgtggtgcgggcagtgcagcacccttgctggtctttggggctctgcctgcaccgctgccctcagatcagcactggaacctctggcaattacctgcagctgatgcgttctggagactcgccctctggaaacaaggtgccaaccgcagagatagtgaatttctacattcaacatacaagtgggaattccgatttgcaggaggtgagaaaagaaaaaaaattttttaatcaagtaaaggtctagtctgtatttttgaatagcccgttttctgctgaatcagctaatatttctgaagcctttgaattccgaattcctacggactttagtttttccaaaacaaaagtgggaaggaagtgttgtttttcagtataaagaggttcaactctatagactaaaactaaaaaagttaaaaagataggggggtataactatagattggtggatatgcctagaacacagaacttgccaaaaacggggcgctggggcagggtgcggtctgacagtctacttgtaatatgtttcataatgaggttgctaactgagctacagaaagcaggaggaggaagacatagatgccatcagctcaagcaatctacaaatactgctggttatttttgttttatgacaagagttgtttctgaacggacaaccacgagctaccaccaccaccagcagcgccccgaaaaccggaactggcctcaaatgtacttttaattcttttgctctgtccccacgccctctgcaacttttgttctccaactgtacttgttccggtatgaaacctggcaaatagcaaaaatcttgaaacaagaagagagtgagagagcggagagaaaagggagggaaggaaggagagggaggaggggaagaggaggaggggggagagaaagtggtgggggagagagagaaggaaaggaggtggggagagagagagagggaagacagaagagaggcagggaggaagagggagagagggggacggagatggggaggaggcgggagggagggagagaaagagagagagaaacatattctgccaccctcctggctaactgaaatgcttgttcccgagattacagtaattactgccccagcatgagttccatacaagcgctaaatgaaacagcacatcaattaaaaaataaacactccattctaggagaaagacagccccctgggacgccctaacaagcgtaaatgaacctgccaggccgccggcccgggccgcccgcagcccccctcccggcccgtcttaaggtggcggcggagccggcgggggcagcgttcgctggcggtggcccaagcggctgctaaaagcagcccgggtccggctccggcctcgtgcagagagcagatacgtgtcgcggagtccacgccagagcgcagcgccgcctcccaccagagaaaaggaggctctggcaaaagcctgtgaacttgggatggatgaatagacgtcctgaaagaacgaagggaagacagggaatccagccccagagtttccagcctgtcctatttataagtttcgaggtttgttttgaattttagaaagaaattgaatgatttttcctaagaaagcacggcggctcggggcttcctatattttatctcacctaattatcaaagcccccttggagatctgtgctatgatcacccaactctctaggtggggaaactgaggctcccccaggtcacgcagcggaggcgggaggagagtctctggcgggcatttgtcccccgcgcccctcgcgcgcccaaggctgggctccggggcatctcacccgggccgtcccgggtccagccccagtttagaatgactccacaccccccacatctccaagtctcagaaaccatcgttctgagaaccccaaggaggacaccctttcccgggtcttctgcagcgccgagccccggcaggcctccccggcgctcgcctgctgcgagaccttcctgccgccccgaggagcacgagaccccagccgcctgcagatcacccacatttgcggagggtggcagcaggggcttggctggtttgaaacgcgccggggaggcgcgcgctgcaccaaaccccgtccctgtccccaagggcagactcggggtaaggggaccaagacctccgacgcactcagcgccatggggacagccatggccaacactctgtctctgcggtcaatcccaaggttaccaaaactctccatccgcagagagcgcgcacagcagtgcggacactcggggactgccttaaggaaggctgagccctgggagcgcgtggactccgccctaccgcccggcgattggctcgcggggctgggggcggagaccgagtccgcgctgtataaatattcatgagccggcagcgcggcgcgagcggggctggagccgggaagttgggctaagggcgctgctcccgccgaggaggaggcggcggctgggcgcgggccgcgccactcaggtgtccgctccgccttccggtctggatttgctcctgggtgtccagcaggaaggagactgtgtgcacctcgcccgactgcggccggagcgcggcgctgacttttccaggcggcgggggtccgtctgtcccggcggcggacggacgaaggacggacgccggagaaagagggcggcggcctgggccgaggcgggtccccaactccggcggcggcggcggcggcttggccttgggggcgggcatgagcccccgggggccgagtggtggccgccagggctgacccggcgcggcaagcggcccggcccagccatcttgactgcgcaccgcggccccagaggaaacttgcggcgcctccgccctctctgtccggcggagtcaccgccgcccggcgcggcggggagaagtggtcgggcgcgcggagaggaggcgagcgagcgcgggacgatgagccgaggcccggccgctctgcgccgcgagggctgagcgcgacccggggccagcagagcggacctacggactgtggcgcgcgcctgcagccgccttcaaacccccggagcggcggaaaggagtgcggaagggccctgcccaggctgcgggccgcgccgctgcggacgcgcccctagaaggggttagattatcggcagacccccctcccgggcgaagcataagggagaccccagatcacccgctgtacccgtctgcggctctctcgtgggccccccccccggcacccctctgcgcgccgcctggagggcgagggcaccgggccgaggcgcacagcatggagtggggttacctgttggaagtgacctcgctgctggccgccttggcgctgctgcagcgctctagcggcgctgcggccgcctcggccaaggagctggcatgccaagagatcaccgtgccgctgtgtaagggcatcggctacaactacacctacatgcccaatcagttcaaccacgacacgcaagacgaggcgggcctggaggtgcaccagttctggccgctggtggagatccagtgctcgcccgatctcaagttcttcctgtgcagcatgtacacgcccatctgcctagaggactacaagaagccgctgccgccctgc

SEQ ID NO: 4802 - DNA, 6000 bp, Homo sapiens
gtcctaaaattcatatggaacaacaacaacagagagcccaaaaagcaatcctaagcaaaaagaacaaagccagaggcatcacattacctggcttcaaactatactaataagactacagtaaccaaaacagcatggtgctagtacgaaaacagatacctacaccagttgaacagaatagagagctgagaaataaatctgcacacttacagccatctaatctttgacaaagttgccaaaagtaaacaatggggaaaggactccctagtgaatgaatggtcctgggatagctgactagccatatgcagaaaaataaaacaagacacctaacttttgccacatacaaaaattaactccagatggattaaagatttaaatataagaccttgaagtaaaagaatcctagaagaaaatctcagaaacaccattctggacatgggccttgggaaagaatttatgattaagtcctcaaaagcaattacaacaaaaacagaaattgacaagtgagacctaattaaactgaacaacttctgtacaagaaaagacactatcaacagattaaatagataacctacagaatgagataaaatatttgcaaattatgcacccaacaaaggactaatatccagaatctataaataacttaaacaactggacaaggaaaaaacaaccccattgaaaaatgggcaaaagatatgaacagacacttctcaaaagaagacatacaagtggccaacaaatgtatgaaaaaaggatcatcattactaatcatcagagaaatgcaagtcaaaaaccacccatggtagctaacgcatgcaatcccagcactttgggaagccgaggcaggtgggtcacctgaggtcaggagttagagaccagccttgccaatatggctaaaccctgtctctaccaaaaataccaaaattagctgggtgtggtggcaggtgcctgtaaccctagcttctcagtaggctgaggtaggagaatcacttgaacccaggaggcagaggttgcagcgagccaacattgtgccacagcctaggtgacagagtgagactctgtcttaaaaaaaaaaaaagaaaccccaatgggctaccatctcacacatcagaatggctattatcaaaaagtcagaaagcaacagatgttggtggagctgaggagaaaagggaatgctcatgcatggcagtgggaatgtcaattagttcagcctctgtggaaagcagtttggagatttctcaaagaacttaaaacagaactaccatttggcccagcaaccccattactgggtatatatccaaaagagaacaaattattcctccaaaaagacacatgcactcacatgttcattgcagtactattcacaacagcaaagtcatggaattgacctaggtgcccaccaacagtgaattggataaagaaaatgtggtacatatactccatggaatgctatgcagtcataaaaatgaagaaaatcttcagtgccatccccatcaagctaccaatgacattcttcacagaattggaaaaaactactttaaagttcacgtggaaccaaaaaagagcccgcattgccaagtcaatcctaagccaaaagaacacagctggaggcatcacgctacctgacttcaaactatactacaaggctacagtaaccaaaacagcatggtactggtaccaaaacagagatatagaccgatggaacagaacagagccctcagaattaatgccacttatctacaactatctgatctttgacaaacctggcaaaaacaagaaatggggaaaggattccctatttaataaatggtgctgggaaaactggctagccatatgtagaaagctgaaactggatcccttccttacaccttatacaaaaattaattcaagttggattaaagacttacatgtcagacctaaaaccataaaatccttagaagaaaacctaggcaataccattcaggacataggcatgggcaaggacttcatgtctgaaacaccaaaagcaatgggaacaaaagccaaaatagacaaatgggatctaattaaactaaagagcttctgcacagcaaaagaaactaccatcagagtgaacaggcaacccacagaatgggagaaaatttttgcacctactcatctgacaaagggctaatatccagaatctacaatgaactcaaacaaatttacaagcaaaaaacaaacaaccccatcaaaaagtaggcaaaggatatgaacagacacttctcaaaagaagacatttatgcagccaaaaaacacatgaaaaaatgctcatcatcactggccatcagagaaatgcaaatcaaaaccacagtgagatgccatctcacaccagttagaatggcgatcattaaaaagtcaggaaacaacaggtgctggagaggatgtggagaaataggaacacttttacactgttggtgggactgtaaactagttcaaccattgtggaagtcagtgtggcaattcctcaaggatctagaactagaaataccatttgacccagcaatcccattactgggtatatacccaaaggactataaatcatgctgctataaagacacatgcacacgtaggtttattgtggcactattcccaagagcaaagacttggaaccaacccaaatttccaacaatgatagactggattaagaaaatgtggcacatatacaccatggaatactatgcagccataaaaaatgatgagttcatgtcctttgtagggacatggatgaagctggaaactatcattctcagcaaactattgcaaggacaaaaaaccaaacacctcatgttctcactcataggtgggaattgaacaatgagaacacatggacacaggaaggggaacatcacacactgggcactgttgtggggtggggggctgggggagggatagcattaggagatatacctaatgctaaatgacgagttaatgggtgcagcacaccaacatggcacatgtatacatatgtaactgacctgcacgttgtgcacatgtaccctaaaacttaaagtataataataaaaaaaaataaataaaaataaaaaataaaagaaaatgaagaaaatcatgtcatttgcagcaacatggatttggctagaggactttatcctaggcaaacaaatacagaaacagaaaatcaaataccacatattctcactcataagggggaggtaaacactgggtactgatggacataaagatagcaacaatagacactggggactattggggtggtgaaggagggaagggagaaagtgttgaaaaactgttgagtactattctcagtatctgggtaatgggaccattcataccccaaacctcaacatcacacaatatacccaggttacaaacttgcacaagtgccctctgaatctaaaataaaagttgaaaaagcaaaaataaaacagtaaacaacaacaacaacaaaacagcaaaaccctcaataaatacataaataaaaatataaataaatgtctttgccagagctttttgttttttgtgtggctttgagttagtatctggggtcacgttgcttttaagctgtttgctatcaactgcatcctatctaatatttctttttcttaatagtaaaccactcaatttttgtgaggagatattacattgtggttttgatttacatttctctaatgatttcctttccagtttggatgctgagcattttttcttatgttttttgcccattcatatataattttaaaagaaatgtctattcaaatccttttgccattttaaaatcatattatttttaaatattgtgttgtagaaattatttatatattctggatattaactctttatcagatatataatttactaatattttcttccatccacaagttttttttaacattgttatgtcctttaatgcataaaagttttaaaaagtttgatgtagtcccaattgtctattttttcttttgttgtctgtacttttggtgtcatattaaaaaataattgccatatccccttattctaagagttttatagttttagatcttccatttaagttttaaatccattttgagttaattcttgtatatggcataagacaaagtttcaacttcactctttcatgtgtggatatccaagtttcccaacactgtttgttgaagagaatgttcttccctcattgagcggatctggaatgctgtaaatattatttgaccatatatgtggagttttcttttaatgggttctttattctattccattggtctatatgtctctctttaagccagtgtcatgctgttttaattactgtagtcttgtaacatgttttgagatcacggagcatgagaccttcaactcagttagttttcaagattgtctagtcagagtatatatgaatatttagataaatttttctcttttttcaaaaaatgcagcttagattttgatagggattacatataatttgtagactgctttgggttctattgacttttcaaattaatacataatgttgtacagatttggggaatacatctgatattttggagatcttaacattaaatcttccaatccatgaataccaatgtctttacatttatttgtgacttctttcagtactgttttgtagttttcagtgtacaagccttttatttccctggctaagtttattcctaagtattttactatttttgatggtattgtaattaaattattttcttaattacctttggattgtttatagttaatttatagaaaggcaactgatttttgtgtgtcgattttggatcctgcaactttccagaatttgtttaatagttccaacagttttctggattttatgcatatatgcatctaacagttttctagattttatgcaggagtctaggattttatgcatataggatcaagtcatctgtgagcagagataattttacttttttcttttattctttggatgtcttttcttgcttaatttttttttcctaattggtctgcttggaaattcaaatactatattgaatagaagcgaagagacagagtatacttgtcttgttcctaatccagaagaaaagtttgaatcttttaccattgagtgtaagtttacctgtggatttttcatatatggcctttattatgttattttccttctattcctagtttgctgagtgttttcgtgataaaaggtgttaaattttgttaaacattttttctacatcaatataaatgatcatgctgttttgtcctttattctattactatagtgtattacattgatttttgcatgttgtattattctttttttttgagatgaaatctcattctgtcattctggctggagtgcagtggcatgacctcagctcactgcaacatttgcctcctgggttcaagggattctcctgtctcagcctcccaaagtgctgggattacaggcatgagccagcacaccctgccacatgttctatcattcttgcattccaggaataaagccaacctgatcatcacaaatattggtctgtagttttcttttcatgtaatgtctttgtttgactttgaaatcagggtaatactggcctcatataatgagctttgaagtgttttttatattcatttttgtaaatgactttgagaaacattggttctaattcttccttaaatgtttggtagtcatccggttctgggctgttgtttgtttggaggtttttgaaccagtttaatctccttcgtagttataagtctgttcgttttttctacttcttcatgattcactcttattaggttgtatatttctagaaatttatgcacttctaaattatccaatttgttgacatataattaactgttgatggtattttcttataatccttttgatttctatggcatgggttctaatgttctcttttttatttctgatttattagttgaatcttttttccttagttaatctagctaagcatttgttaattttgttggtgttttcaaaaaccacctcttagttttgttgattttttt

SEQ ID NO: 4803 - DNA, 6000 bp, Homo sapiens
gtcccaaattctgggccactgatgcccaggccaaggggcagggggcacagagcgcaccttctaaaggggccggcctggggccctctggtttacagactaagaggggactatctatgagaaataaatccaggagtgctatagactctgatgtcctgctacaaaatccctgcaggacgtatggagaaatattctcttactttaagctttagggcctgtaaaaataaaaatgctacccattcacccctaacaaggtgataatttagactttactcatcatttgttattcatttattcatttgatgtttattgagcatctaccatgtaccagtgtgccaggcattatacggccctgcccacttgaaatcccaccattaacttagaactttcatatctgtatcacaaagacatagatataaataaataaataatgtacacataagattccccatccctcactggagtattattttacattttattcatcatttttattcaaccaacctttataggacactgacaacgttctggccactcctagacactggaaacaaacaagacgcgatccaagacctgagaagccttgcctgccatcagtgtgacaaggaggtgatcaaggaagtggtttcgatgggcctccgggacgtggaggccgacagaacagtaaaggcaagacaaggggacgtgagccccacctcactggtgatgaaaccaggcctcgccctgcccctcttgggagctcctgcacctctttttttttttttgagatggaatctcaatctgtcacccaggctggagtgcagtggctgcatctcagctccctgcaacctccgcctcccgcattcaagtgattctcctgcctcagcctcccgagtagctgggattacaggcacttgccactgtacctggctaatttttgtatttttagtagagacagggtttcaccatgttggccaggctggtctcgaactcctgacttcaggtgatccacccacctcagcctcccaaagtgctgggattacaggtgtgagccaccatacccagcctcactcctcttctctaattgaggaaatagataggggctcctgggtctttgaatttcatgggccaatataatattaaaaacctattgagggggccgggcatggtggcttacgcctgtaatcccaccactttgggagactgaagcaggcagatcacctgaagtcaggagttcaagaccagcctggccaacatggtgaaacctcgtctctactgaaaatataaaaattagctgggcatgggggtgggcgcctgtaatcccagctactcgggaggctgaggcaggagaatcgcttgaacctgggaggtggagggtacagtgagccaagattgtgccactgcactccagcctgggcaacacagtgagactctgtctcaaaaacaaacaaacaaaacaaaaacaacaacaacaacaacaaaaaccctattgagggaaccataccggtcactgactttttattccaccaagtaaggaattttaaagaaaaagcaaaaccaggtcaacaactaccatccgccatccccattatttcatgaaagaactcaaacagcaggaagggcatggtctcggaatgaaggacagtccatggaaccagattcatctagcagaatgaaaagtgttcttcttcttgtcctcatttggccccaccaggagctcccgcaaatacagatgtgatccttcctcctgtctctgggatgatcactggagcagcggctcagggtcagacccaccaccgggcacaggactggagcctttcagcagaggggctgaccctttgccaaccccacgtcctcctctcacttcggccacctcctggcacccccagcattgccctggtgacagggtgaccctcagcgctagtgtcccgcgatgctgtctgtgacctctgaagctagggcccagagcagcctcccaaacagagataggccactctcaagagcatcccccaggcgctgatagcaacgcctcatccacagtgctttctggagccgcctttcctctcccacccacttctctcacacaccacagctctcccaccttttcttcctcaaactccctggaagatcattcctctcccaactctggtctttaagcctctagcccagaggtcacaattacaccaaccagcaaggcacagttgccagcgcacgcccgtctgaaggagtggctgctgtctagctgtgtggacgttgccctgcgcttcccaggcccccttcaagctgccgggcaggcatatagtaccagcaccatgtttagcgtccccgactgcaggcctcgcctcaactgccttgacaacaatcacatgatttcttggggtggcccacgtccagtgaccaatgtggaaatataaaggcctggttaactttgccccacacggggcaactctgaagctatcccagttccaattacccatggggttaccaaggctattgtaggcctggaccacagcacgatgccgtgcttcagccacacttgcttcctgccttgtctgctgccccaagtgttgaccccagtggtagctccctgagaaacagctggtgtgtttcttacacagcagggtctgcttcctggatgcacgcaactggcaccatcagctcaggtgtgcgattacaggtgtgagccaccgtgcccggcatttttttttctcctttaaaaggactggccttccaggcgcagtggctcatgcctgtaatcccagcactttgggaggctgaggcaggtggatcacctgaggtcaggagttcaagaccaccctgaccaacatggtgaaaccctgtctactaaaaaaatacaaaaattagccaggtgtggtggcatacacctgtaatcccagctacttaggaggctgaggcaggagaatcgcttgaacccaggaggcggaggttgcagtgagccaagatcgtgccattgcactccagcctgggcgacactgtgagactccatctaaaataataaaataaaataaggactggccttcgggatcgctgtctagctatggactcagaaggccagtgccaagcagcaaagctgatcaggaaccccttcatcctgggtggcccgcatcttcccctttcacgaggcttcaaaccatagcacatagttggaaggctgcaagagcagataatttaaggggaaaataaaaactcagatgtacaagctccaaaacataatcccctttacataaacagtggaggtggcgggatgttgtggggaggaaggaacttgaactctgctgggcttctgtgactggtgacaggcgctcaggcatcccagccctgcactgggtttgcacctgaagctcaacaaattcccactgcctgggagcaggaggacagcaaaaagagcaggctgtcttgggcttccattcttatttctacacattctgctctttaggaccctggccagatgggcatgagacagaagcaaaccctaaagtactgctactgttgccgccaccaacagagatcaaaggcagagacccttctgctagggtccaaagtccaaacaggccactccagagaggaaacaggcacacaggcacacacccacgggaggagtaggggcccaggaagcactccctccccaagggcaaggatggggttcccattcgacccagcacatgctcctcacatctgcacagcagggagaccaaacaatagatacaatttcagtgttgattgtcgatgaacttacccagaagttcataatcagaaaaatccataaagaagctctttcaatttcagcatgtttaagtttcatgacttatggtttagtgttgtttttatattggattccatgggtggcataatcttttcagcactagagacctttaaaggtctttctcagctcaccccgggagacaagggctgggtgtcaggaaagtgacacacagggagaagcagaaaatggactgggagtgtgggggccgaggcccagccacgagaaacccaggcggtgcaaggcagagccctgggagcacagaggctgctgtgccgtgggttgctggtgaatgagaagcctcctctgctttaatgaagaacatgcccccccgactcccgctaatcctgccctgccttcatggtccacacaccacaggtgtgcacaggttcatgcgtgtgtgtgagcttaacacgtcagccgcacatacagttgctcagaaacatcttcactgcttcacacacgtgcacacagtcaatgaccaggagcagggatcttggggcaaacctagagcagcttctcaggagttaaaactccagctttgctgtggttcccggaagagccctgactttgtcctaagacagtggttctcaaagtgaagtgctggctccagcagcatcagtatcacctgggaactcgctggaaacgctccgggttctggcttctcctcctagagcgcccagagctgtggggtcctcccttcgggccagaaactccaatcatagtttttatgtaccaacccctgtgctaagtagactttgtgcacattatctccatttaaaattcacaaatgtactgtaagatgcacaccatttttctatatttttcagatggggtagacagagctcagaaaggttaagagacttgcctggagtcaccaaaccaggctcgaactccttctgtattcagaatcactcttcagacgtagctcctgtcctgggctgaaagtcaacatccgccgagagctgggccctctgtaccagccccatctcccccaagtctctccctgcctctgcagccagtcctaaatctttcaagagacaaggccaagcagggggtgggaccaggggcgggagccaaagccccccctcgtgagcaggcagcacctctgccaaggcccccactggccctgccccagagaacggcagggaagctgcagcgagggctggcagctggcagagccctgagcacccagcacccagcccggcttgcagcccaaagcctggagagaggctgctgcgccattgacctgtggactccagagactcccgctgtgcattcctctgatctggaaggtttcctgaattacgtgacgagaaacctgggttcgagtcctaacttgtcaccaacttcctgagtgacctgggctggtcccgtcccctcttggaatctctgtcttccatctcttcagcgaaggggttgatttataagggtgttttctgctctgacactgtgatttgaattctgtgtttccacatgatattcgagaagtctggccggaaggatggaatctgaaatgacaatggttctggactgggctttgtgctcagcccagctcatctttgcctgagacctaggagtggccccaggctctcctgatgtgccaccacgcttggcatctgctcctctccctgcccccatattcccatgctctgaaggggagttctctttcatagcaaatccgagaggagccgaggagccaggtcctttgttccagacccagaagcagccatggggacctgtgacattgtgactgaagccaatatctcatctggccctgagagcaacaccacgggcatcacagccttctccatgcccagctggcaactggcactgtgggccacagcctacctggccctggtgctggtggccgtgacgggtaatgccatcgtcatctggatcatcctggcccatcggaggatgcgcacagtcaccaactacttcatcgtcaatctggcgctggctgacctctgcatggctgccttcaatgccgccttcaactttgtctatgccagccacaacatctggtactttggccgtgccttctgctacttccagaacctcttccccatcacagccatgtttgtcagcatctactccatgaccgccattgctgccgacaggcaagagggtccttggggaagctggggggagcctccccactgagccggggctcagataagggtggtgacatgcctgtgattacacagcaagtttgggtagaaccatgggaatggcttccc

SEQ ID NO: 4804 - DNA, 6000 bp, Homo sapiens
tacaggcacgcaccaccacatctggctaattttttaattttttgtagaaacagggtttcactctgttgctcaggctggtctcaaacccctgagctcaagtgatcctcccaccttggcctcccaaagtactgtgactacaggggtgagccatggcacctggcctctgtttctattttaaatatgagaatgctgagtttgcacagaggtaaggaggcaggaagaagggctgggacttcccagactgtgtgtatccactcgaggtgtctttagttcaaggcttttaattctgtggttctcaaaccacagtgtgcgttggaatcatctgaaggatgcttcaaaatgtaaaacagagatagctaggccccagtcccaagggtttctggttcccaaggccagggttgtggcccaagaatttctgtttccaatgagttccaggtgatgctgacactgctggtcgggacccctctttgagaactatacaccctgatctctcttgggtaccctggagacaaccattattacaccctgagatggggaagctcctccagtagaggaatggcttcaccgggttcaaggatgaaaatttcacaggctgtaattacaagggcacctggcagatcccaggaaggacaaatccaaggtgtcaatgaggtctctggctgctagcatgcagcccagatggggtgggaggcctgcctgcctccagtccagtggaattgccaggaatgggaaggagtttttcctcctccagaaaggattcatgtgcagtgctggaatctgggccctgtctagaaatgatgcccaggctctgctgaggctctagcaatgggcagggtcactcccagatacttctcaggacagacttcggaagatgagcttacttgagggccaagtgaaggatagtgggggaaatggactggagtctagcctgaaaggttctggcagtttcctctgcccatccatacccacagatccccccagtcatgggagatgattcagagctaattttgaggctcggcaggggtaagcaagtctcccaacaggtgctgggatgagtgatgcctctcatgggggttctttctggaggggcctggagaaggccttccaacatcagcactgcctgcctgcagcaggaccctctcacctgatataaggatccaccttcctttctttttttccttcctacagatatttatttattccataattattagctgtttattgaaccatttactttgggcaggcactgacaagatgctgaggacactgccaccaacaagacagggaagatccttgctttgcaggtgctgtcaagcatggggaaaaagacaatcaacctagaaacacacaaactattgacagattgatgaacataaaccagatgctatgggaagacaacatttatgctgagagctaaaggaagggacgagcaaaggccctggggttggaagaagcaggagtgcgtgaggagctaagcagatggcaaagtgaccagagcataatgggcaaaggggagagtggcactgggtgaggtcagagagatgtcaacagggatcagaccatgaagtgttttggaggccttggtaaggagcgtggattgtatttaaaatgcaatgagggttgggaggctgaggcaggtggatcacctgtggtcaggagtttgagactagcctggccaacatggtgaaacactgtctctattaaaaatacaaaattagctgggtgtggtggcatgcacctgtaatcccagctactcaggaggctacggcaggagaatcacttgaacccaggaggcagaggttgcagtgagccaagatcgaagccattgcactccagtctgggcaacagatcaagactccgtctcaaaaaaaaaaaaaatgcagtggggagtctaggcaataatccttagtgtctgctgaaaatattatgttaaaagctgatggcacagtggctcatgcctgtaatctcagcactttgggaggccaagacaggaggattgcttgagcttaagagttcaagaccagcctgggcaacgtagtgagacctcatctctacaaaataaccttaaattaacccagcttggtggcgcacggctgtagtcccggctactcaggaggccgaggcgggaggattgcttgagcccaggaggcagaggtacatcacctgagccccctgattgagccagcaccacaaagagaaaggccactggacaaaatctgatcaagactctagatctgactgccaagtacaggtaatacagggaacagagagcagaacatgtaaaatgacatcatgagggagcaatcagaaaaatccagcctgcagaagtgctacagaccaaccactcagtccatatgacaaacatactgcagaagggaaaagagacagactggggacctgtgaactaaaagagacttcagcatcacgtctaccaaatgcaatatggggatggtggtagactttatcataatggaccttaatgaatcacacttccatgtccacacctcttctgcaatgctatattgcttttcttcctatcaacaggagaaactatttatccactgacttgaacctgggcatcccttgtgacttacttgggccaataaaatgtgacagacgtgatgtgaaaattccagagtctcggacttaagaagttgtagcttcttttcttgctctcttggaaccctgagaccactgttctctgaagaagcccacactagcttcctggaggatgagaggctgagtggagaactgagacatcccagccaatggccagcactaatcaccagccatgtgagggacaccttggacctcccagccccagctgagccagcagataactacagcagctgcacgagagtcccaagagagaccaggagaagaactactcagattgccaagccacagtgctgtaccattaaattttggggtggttcacaacataataataggtaatagaaacagaaatcttgctccgatccacactcaaacaaaccaactatttaaaaaattatgaaacaatcaggaaattttgctggatgctggctatttaatgatataattacataattgttaattttgttaggtttgataatgatggaaaccacattttttcatgttgtttttttgagtccttattttttaaaggtacaaactgaaacatttatggatgaaaggaagtaatgtctggtatttacttcaaaataatccaaagagaagtggggatatggatgaaacaactccaggcctcgagttgataactgttgaaagcagatgatgtatacatgggggttctttatatgatccctctaataacagctcattaaactttatactcttgtatatgtttattacaatattctctcttctacatgtttgacatttaccatattaaaataaagatgtttgagtacagttggaagtccttggaaggcctaaacctgggagtatcatctctcatcgggcacaggaagtttgcaggttgtccgcctcccgccgcagtccctctgccccatcccaacactcaccgcagtgccccctgctggtccctgcagccctgatgatgccagctcgctggccctgctcctctgagggtctctaacctccaggcccccagcctccattgagcctccaggccagtggctgagttctcggtgtgacagaaagattccacagggactcttcatcccctggaataggcctcaggaggaaagtttatgacacaacatcatgagtcaccccaactaatgacttcccagaagagctgtggttggacactgagccttcccttcgaagcaagcctggggaaacacacaccaaagcctggtcctaattcacagacacacagagcagggccagctgtgctgcagcatcattggaggaccttgagcaagtcatggaacctttctgacctccatttcaaatgaagctaacaccttagggtaattcaatgagggtttaaaaaaaatacaaaagaaaacaaatgaggctaatacctaatgacttacatcatgggatggctcggagagctaaataaaataatagatgtggaagtgttatgttaaatgctatgcaggcagaacagctgatcatgggatgggaggaggcaaaggttgagcaggagcccctgctttggatgttctgctgaatgtgatgtgcctcttctccttagccctggttcacagttccccttcattctccctttctctactgccttcttgcctttctcaactaaagttccatggaggagatgaaggggaacgacatcaaagagtttgagggtataataattgggtcccagcagaaaacaaatggtgcactcagaaagggtttaactgaacagagtttaatggaagaagagagggttaagagaaccagccagaaacggtgaagcacccagggactcacaaccacaggaagctgttaccattgagtgcaaggagagggaagagtgttactgtagtcaggtgagggctagagccatgaaaggggactcacccaataggagcaggctgtggctatagggaaaaacagctgctgaaagaattgggccaggcaggaagggaatcagaagacaaacaccctgacctctctctctgctcctgccctcccatctccttcagggcctggcattggctgaacccagctagaagccagaagacaagggaaccagggcaatgcagaacttagaggttagcctctggggcacacaggagggccaagaaagttggaacctaaatgggatgggggagttaataaagaaaaaccaacattggagaatgagttatgggcaagacagggcatgaagtacaagaccagggtttgagtggttgtaggctgaaagtcttggatcagtgcatcaagttgcaactggagctggggacatgcttgggggaccagggcatggttaaggtttggcacacagagggtctcattagtggtgagaaatcggtaatctcttctttgcctaaggtcctgaccaatatattcctttggtcctaggggagccctcccagcctcccaacagcagttggcccctaagtcagaatgggactaacactgaggccaccccggctacaaacctcaccttctcctcctactatcagcacacctcccctgtggcggccatgttcattgtggcctatgcgctcatcttcctgctctgcatggtgggcaacaccctggtctgtttcatcgtgctcaagaaccggcacatgcatactgtcaccaacatgttcatcctcaacctggctgtcagtgacctgctggtgggcatcttctgcatgcccaccacccttgtggacaacctcatcactggtgagtgcgggcagttggcagcaggagtgtcccctaccccccacttcaacttctcagataaggctggaaatcaaagcttagaagacagatatcattgctgggctggcctcttggccatgccgtggtctcgaactctcaagacagtcttggggctgaagagttagactagaaataagagatttaatgaatttcctgttttctttgtgcctggcatgatgttacttctcatgcattatcttaattcatcctcacaacaatccagtgaagtagagtttatggtcctccccattttatggaagaggaaacatgctcggagtggttaagaaactggtctgtagttacacagctaataggtgtcaaggtcaacattctcacacccatacttctaattattgtattataccattcagtcccactctctcacggagctcgcatgggcagaattagagccagtggggagaagtggaagggaggcaggtttcctctgaatcgggaacgaaaactccactcatttgagctggaaattgagcagggcacagaagagagtcctgcctgtaagtaatgagctctctgtcccttggagtgtctaagcagggactggccggccactcagtggaccacttgacctctaaattcctgccggtgcatcctgcagatgtcagaacagtgccatctactctctac

SEQ ID NO: 4805 - DNA, 6000 bp, Homo sapiens
agaaaaaatgtttttatttttagtatgtctaaattaaaacaaaacacaattcacttttaggctgaagaattactttacaacatgaatgattcttggttataggcattattctacactcagttcaactgactaatgtttattgaacacctagtatatggcaggagtaaggaaatatccctccctttgataagttcacagtctaatggggaagacagtcatggaaatatgaagcataatgcaacagtaagtactataataaatataatttaaaagtgctttaaaagcctacaaagaatgaaattaactatggcgaggggtgctgtcactgagaaggagacattcaggtgtcccagactaactgcttttatcctaactgggcctcaaaaatgtctgtgttgatggatttgagtccctgtctctagcatgtgtgttctctgtattagtgatctgtagccccaataaaggccacagggtagtatctggatatttacttacaatactcttagtactacactgtctaagcattctagtttccctagtcttttctcacccaattctgggggcaagggacacccagataattagtctagttgagtgaggaaatggggtacaaatgtgagagactgaaaaatttggagaaatgaaagagtggccctgtggaagtccgctgcactgggcatgggaggccatcagacccccgatagacatgatatcagcatgcttgactgactagtgagttgccaatgaaccctatggcttaggaagctttttttgtgcttcttaaagtacatctaggttgtcagggtatgaaggtttatgggaaaacaaactatcctaagcttatgtcctgtggagggatatgtgtgggttttcatagatgggattacgcatatgcatttagatgagctagatgagtacctagagggaagaagggctgataaaaagacagtaactatgatgtaggactccacagctcttctgcactctccgagagcagttcttagagcaggagattgccagattgccagttggaaacctcagaaagctgtattctcaggtgccctcactgacaatcttatgagaatgctattgtaggcaatgagagtctagataagaattagtacttttaaaagcagtaatttttttaaatgctaggaataaaagggacagaaaataaagacatgatttgatttagatgccaacactttacttactgtctctggtataactgttgaagagtgggtgggcagcgggagggaagaaggaagcaacaccttgatatggcttttaaacaccagaaaactaagggcagaacaaacaacaaatttagatgaatatttagatattttatgaatattttgtgaagctatatctttggcatttctttgtgagaaaattacagaaaagtatacactagattttggcatttttatgaggacacaattatttgttagtgaaggttaaagggaaactgaaagaattccagattgctctgtcaggattttggaataacacaatgatagatgaaatttaaactcaacataagcaaagtaatgctgcagaagccgagattttcaataactatgtttatgcattgtgacagcttataaattagaaacctagcaactcttaggaaatacactcagccatcactagggataatataacagaggtgactgttctataaaaaagggagcttggacttgatgctatattgacaatgaaggaggtagtaatttaaaaaatagtattttaatgattatttgctgtatttatatgtcacacaatttaaaagttgttatggaataaacatttgtttcctccaaaaaattggtatgttgaaatcctgctccccattgtggtggcattaggtgtgagagagtatctcattgtggttttgatttgcattttctctgatggttagggatgatgagcattttttcatgtttgctggccacctgtatgtcttctgtcgagaagtgtctgttcatgtcctttgcccactttttaatggggttatttgtttcttgcttgttccttcatttaagttatagattctgaacattaggactttgtcagatgggagagggagatgattaagtcatgagggcagaaccctcctgaatgggattagtaccctcataaaagggaccccaggccaggcttggtggctcatgcctgtaatctcagcactttgggaggctgaggcaggcggatcacttgaggttaagagtttgaggccagcctggccaacatggtgaaacccggtccctactaaaaacaatacaaaaattaggcaggtgtggtggcatgtgcctgtaatcccagctacttgggaagctgaggcagaagaatcgcttgaacctgggaggttgaggttgcagtgagccgagatcgcgccactgcactccagcctgggtgacagagcaagaccctgtctcaaaaaaaaaaaaaaaaaaaaaaaaaaagaaagagagacccagagagctctcctaccccctttgccaggtgaggacacagcaacatggctaaatttactgttgccttgttcttggtaaatgtttgttgttaagccacccaggctatgatatttttgttatggcatcccaaagggactaaaacaagacaaaagcaaaaactagaagctgttgtgaaatataaatgggctacgtgagggctgtaagagtgtaggtggtaaatcatattgactagaggtttaaatacaaataaaatgattaattttcaaaatctgtgtgtaattactctggaatattatttgacagagccaagacagaatatataagctgaactgattagggtattcaaggggaagaatacaaaagtcaaaataagttaaaatgagttgaaaagttaaaatgaaaaaaatatcaaaagtatcttggggaatatactacatgaaggaatttttaaaagaccttaagacaattccaaacctcaaaataaaaaaatggagacatttcaatgcagtcacatatgatcttggataagttataaaatttctcccagcctctatttcctcctctgcactgaagggtgaacaaatggtttcttagatgcattccagcaacaaactatttgtcttttgtctgagatttcctctctcccaagatccccagtggatgcctaaaaccccggatagtacccaatcgtatatatactatgtttttttttttgatctggtaagagagagggctactaagtgactaatggtggatggcatatacagtgtggatatgttggacaagggatgattcatatcctgggtaagatagagatttcatcacgctactcagaatagtgtgcaattgacaacttacacattgtttatttctgaaaatttccatttaatattttcggaccgtggttcaccacagataacaaaccaagaaaagcgaaacagagaataactaacataagtaaggttgaagaaatttcctcatccatcttaactgttagataatattgctttgtggcctaggtattatattcaactcttcctctgactcaatggattggtttgcttatcctaggcagagaggagcctctgaaatgttgatcacagcaaaagagctgtgaacattagggcttttttttttttccattaaaactttttctgaatgtgtacagggaagaatatgggcatagtaatcagataaacttgggtttgaaacataactattccttaccagctgattgcaagagctaacaaccttccctatctggaaaaacagagctaatacccaccttgaagaatgaaagtactattcagcactctgatcaatatactttgaggtttttattccttttcttcttatttataatccgctagggcctaacaagaaaaaacagatttgattatttttagagtcttaaactacagaaatcactgctggcttccaatgaaaccttcaaacaaaatggaatgaagcaagtctcacaaataataaaaatcagccgctctgacagggtttggataccaaggggaattttagccaataggtattaaatcaacatacacctccaggattcctttatagaagagtataaccggtcatttctttgcttatgtgtaagacttccagaatgctacgggaaaattaactctcttttcaatatattaggctttgaagtctaaatataaaggcaatcagggtctattttcagagcggagaggactgtttctagacatccaggaaggattagtccaaatgggtgtaacccccttggaggccttgtccccagagcatcctcatctcctgggtgccaggggcttaaggaatccccctccctcctttttttctttcttcctcttctcggagctcccaccctcaccccattcggctgcttcttttccatcttcgcttcttcccataagcggtcaaaatagaaaacggaagtacctatttgttgcttagtgtagtgctcagagacgtttttttggttgttgtttaattaagaaaaataaaatccccctctaggttcttcatttcgcaatgagcccaaacatccgctggctcattaggcctcttaacaaaagaaaaatgcccccactgaactgtggctgactagtgtgcggaggctggggtcggctggaggggttctaagtatctatcatgcggcaaggacagcttcccgggcgaggggacccgggatcccgggaggcgcgtgcagcgccgccccctcacagtagggaggcgcgggagaggcggcggtgcctgcccagcccgggtatcccgtcccaggagcgcgagggagcgggcagcggccggaggcggcggcggcggggacgcggcgcggctgccgcaggggagcggcggcggcggcggcggcggcggcgggcgcgaggggcggggcgcactccgcaacttctgccgctgccgcccgggcgctctcggcgcagccgagctgctgctgcgaactgtggagctgccagcggagcccagcccgagctccctcgactccgcgcgtcccaggcgtccgtcgggggccgaagcgcctcccgcagggagtccccgtgaggccgcgctgccgcgttacccgcagcggccgggggtccggggagtgcggggctccgagacagagccaggcgccccccagcggtcggcgcgggccccatggctgggccgggcggagcggaaccggtgaggtgaagccccggggccggcagccggaggcgcgtggccggggcgccggctccatgggcagcggcacacggcggcgcgatgatggacgttaacagcagcggccgcccggacctctacgggcacctccgctctttccttctgccagaagtggggcgcgggctgcccgacttgagccccgacggtggcgccgacccggtcgcgggctcctgggcgccgcacctgctgagcgaggtgacagccagcccggcgcccacctgggacgcgcccccggacaatgcctccggctgtggggaacagatcaactacggcagagtcgagaaagttgtgatcggctccatcctgacgctcatcacgctgctgacgatcgcgggcaactgcctggtggtgatctccgtgtgcttcgtcaagaagctccgccagccctccaactacctgatcgtgtccctggcgctggccgacctctcggtggctgtggcggtcatgcccttcgtcagcgtcaccgacctcatcgggggcaagtggatctttggacactttttctgtaatgtcttcatcgccatggacgtcatgtgctgcacggcctcgatcatgaccctgtgcgtgatcagcattgacaggtaagggccggaccgccccgtcccaggctccggctggggaccggctggcagctcagccccgcgcgctcgcctttcctgggaggatcaagctagacttcaaggcgggatgaagggctgcgcttaaaacaccgctccccccaatccaccctacaccaaccaaacttcggttacggcatagcctatgtacatctttaaaagaaaaaccggaaatgttctgg

SEQ ID NO: 4806 - DNA, 6000 bp, Homo sapiens
ctaagcctagctggggaaggtgaacgcacccacctttaaacatggggcttataactcagctcacacccgacccatcaggtagtaaagagggctcactaaaataccaattaggctaaaagcaggaggtaaagaaatagtcaaatcatctattgcctgagcgcacagggggagggacaatgatcgggatataaacccaggcattcgaactggcagtggcaaccccctttgggtcccctcccattgtatgggagctctgttttcactctattaaatcttgcaactgcacactcttctggtctgtgtttgttccagctcgagctgagctttcactcgccgtccaccactgctgattgccgtcgtcgcagacccgcctctgacttccacccctctggatgcagcagggtgtccgctgcgcttctgatccagtgaggcgcccattgctgttccggttctcaccattgttcctgtgcggctaagtgcctgggtttgtcctaatcgagctgaacactagttgctgggctccatggttctcttccgtgacccacggcttctaatagagctataacactcactgcatggcccaaggttccattccttggaatccgtgaggccaaaaaccccaggtcagagagcaagaagcttgccgccgtcttgcttgggagtggcccaccaccatcttgggagctctgggagcaaagacccaccagtagcactatggcccaaggttttgtttcctatatgggatggaagcaagagacatttggggtaaggcatgaagatctgtttagcttaaacatgataaggtgtgagttgtaactaaattttctagagctttcttaataaaccatggggggaggggttcctgtatttattcaatctcatttgaacctgcttgtattttcagtctttgcaggtacatctgccattcattcataggcagtgaagtatagtagttgagtggtgtggtgccagaatcaggcagatctaagatgaaattccaaccccactgcatactagatgtgccattatggttagtttcttgacttgagagccagttttctcatctgtaaaatgggtataataataattttgaggggactcaaatgagacaatttgtgtgatgtacttagcaatggctggcatgcctaaagccctaagtaaatggtaactatttttattcattcaataaaaaaaaagaaaaagaaaaacacatgtattgggtatctgctgggctcgtggcatgttgtaggtacaaaatgtatcaagacattggccctgtccataaagaatttacagtcagggttggtggaggcagggaagctaaacacttccgtaatttcaaggtagaaattaataaaagacagaaagattatggaagggacaagtctttgagaacagttgtccttgggttgggtcttgtaggatgtgaagaatgtggacaggtagagttgagtggggattaaacaactgacattgtggagaaaagaaataaaccttaagagaggaattagacaggaatggtgaggatatctcagcacccagcaaagtttggcttgtacctaggaagtaaaatggacagaggtgggaagctagaccaaaaaaatgaggacatatcagaaagggagtgcacactggttggaaataccatgcgaaagcatctggccttggttggatgggctattgaagacttttggagaatgggaggaagtaaaatcccatagtttgctgtctactgtatgaagtattacctttccttcatttatcctatttttttttgtttatttatgctctctcaggtttttggagcattcttagtactggacagtctgaacattagcatgatttaatcatgatgtgctggctgggagagggactagccttaactccagtgaggagaagagggaatgaagccctaataggccacattaaatcttcattccctcttcaaaggacagctgttcacttcctttccaccttgcaaatattgataatactaaaatgcttgcccaactttatctggaatttggcaaatgatccactctttcctctggagggtgccccaatattgaaacttcaaatatccatgtttacatgaccttcagttattgacaaagttgtcttcgtattattacttttactattatatatgataattgaccaatataatgatattgaccagaatgatggctctagttaggaggcctaacaacatcccaaatcctttttcactgactttatcgcaatttcctctgcttaagagattttgaaacaaaagagtgcccctgctcttgggtgcataaaaccctgcaggtgaaaatgatgagaaaaattactgggcaaggtattaggcaggcactgattgtatcctatttagagctctgcaattaaaaaagtatatataatactgagactgggtgcagtagctcatgcttgtaatcccagaactttgggagtctgaagcgggaggattgcttgagcctaggagttcagtcagcctgggcaacatggcaaaacctcacctctacaaaaaattaggccaggcgcagtggcttacgtgtgtaattccagcactttgggaggccgaggtgggcggatcacgaggtcaagagatcaagaccatcctggccaacatggtgaaaccccgtctctactaaaaatacaaaatcatctgggcatggtggcacgtgcctgtagtcacagctactcgggaggctgaggcaggagaatcgcttgaacctgggaggcagaggttgcagtgagctgagatcacaccactgcactccagcctggcgacagagcaagactccgcctcaaaagaaacaaataaacaaaaattagtcaggcatggtggtgtgcacccgtagttccagctacttgagaggctgagaggtgggaggatggctttggcctgggaggttgaggctgcagtgagccatgattgtgccactgcactccagcctgggtgacagagtgagatcttgtcctaacatatacatgtatatatacacacacactggttttagctaaattgattataactcagggaccgtgagcttaggatggacagaggtgcataacattgattacttttgttccaatattgacttttttctatatgagtgattcatttaaatttggagggtggaataaattgatattagtttccagtctaactggaatatctgcagccagaggacaaagtacaaggacttatcagagaggagacaatgaagctccatgctctggaaaaaggaaacaagaggctgagggaatgagatagcttctaaggagggagcttacaaaggcccctcctcccctggctcttgccccgtgggccaggctaatttgcatttcaatgaggacttaatactactgaagattttatgaaacgcctaagcttctcaaatgtttgttacttttgttaccctagctgaaatctgcaattaccagtatttttaaaaaatcctaaaatgaagagaagaggcctgtgggtgttcagtcaaggagggaggggtcaagtctcagtccaggaactactctgtgctgggagaagcagccagatacggcacaggtcgcggtagccgagaaagaaagcgagagaaagggtgagccggggagtcgctgggccagactgaagtgtgcctgtgtagaataactggcaggagagctgcattttctgaccccgggaggtaaaagacgacgccgtccttggcactgagtgcggtgaccaccaagaggagcaaaagtcatgagtctccgacccccaggcccccggctcagctgcctccactccaccctactcttctcagccccagcccagaaagcaggcagcgaggcaggtctttgaaccggaccaggttccttccccaaacacccggatccagagaggggcaggaattccctagtcattttcccctgctcctccccacatcatccgcccgaggggcggcagatccagcggaagctgtccgtggtgctgactcctgcctttggcttggccggacccgctgcccgctgagcgcgctgcagccaagcagggggctcgtgtggcggggccacgggagggtgagggtcctcaggtccgcgaccagctccaggctctgctgttaaatcccagcccgagccctctagcgtctctgccctccgcaacctggccgctaggcaggatccagcctttaagaacgggtcagtcgtgcctctctcaagcccccagctgcattgcaatctcccaccgctacttccttccccgctccttccctcctaagactgcaccggctcctcccgatagcctgacgcttcgcgcctctcctccgccctcctccactgtgcgctcctccggaccctgaccctccaggggccgtgcaagctcctgcagtagagattcgtcctcttcgctgctctggccaggtttgccggcccctcctcccgtttcggattccatcctccccacactgtcctcttcactagttctctaagcaccgagcatggcagagcgcgctccacccctattttccatacatgggagctggagtggggggcggagctgaggggaggcgctcccagtccctctaagaagctgctagcccactgggaaacatttggatccgttcagctcccgcggagaagcgagaccggatcaccgacgtgggcagaggactaccgagggccagcagaaattctgccccttcttcccgcgagtgctttcccgctctccaaaccccactcccaggtaggatcgcgctcctgagtctgcctgcgtggactgcgaggaccgtaaatagaggcggaagcgtttaaataaaccgtatgttctaaccgtgcttaggtttattttacagaggtgagaggacaacactttttgctacttttgctgttgttctgtggccggttattcccaagggaggactcaggcgatgggggaggggcgcggctggtgtaggaggtcggatggagtatggcaagggaagtgacggactttgattacctttgaacaggtggccatggcctcatcgaccactcggggccccagggtttctgacttattttctgggctgccgccggcggtcacaactcccgccaaccagagcgcagaggcctcggcgggcaacgggtcggtggctggcgcggacgctccagccgtcacgcccttccagagcctgcagctggtgcatcagctgaaggggctgatcgtgctgctctacagcgtcgtggtggtcgtggggctggtgggcaactgcctgctggtgctggtgatcgcgcgggtgcgccggctgcacaacgtgacgaacttcctcatcggcaacctggccttgtccgacgtgctcatgtgcaccgcctgcgtgccgctcacgctggcctatgccttcgagccacgcggctgggtgttcggcggcggcctgtgccacctggtcttcttcctgcagccggtcaccgtctatgtgtcggtgttcacgctcaccaccatcgcagtggaccgctacgtcgtgctggtgcacccgctgaggcggcgcatctcgctgcgcctcagcgcctacgctgtgctggccatctgggcgctgtccgcggtgctggcgctgcccgccgccgtgcacacctatcacgtggagctcaagccgcacgacgtgcgcctctgcgaggagttctggggctcccaggagcgccagcgccagctctacgcctgggggctgctgctggtcacctacctgctccctctgctggtcatcctcctgtcttacgtccgggtgtcagtgaagctccgcaaccgcgtggtgccgggctgcgtgacccagagccaggccgactgggaccgcgctcggcgccggcgcaccttctgcttgctggtggtgatcgtggtggtgttcgccgtctgctggctgccgctgcacgtcttcaacctgctgcgggacctcgacccccacgccatcgacccttacgcctttgggctggtgcagctgctctgccactggctcgccatgagttcggcctgctacaaccccttca

SEQ ID NO: 4807 - DNA, 6000 bp, Homo sapiens
atgggtgaattagggcaatttattttttgggctgtttgattcccatctgtaaagtggaaacagtaccaaacttacagtgttataataaagattaagtgagctaaagtatgtaaaatccttagcataatgcctggccactataagtgctatataaatataatattaataatactttttactggttttattttttcacaggctatgtttcacaattgctagtaagcctttgtgtttaccaaaacaaaacaaaacaaaaaacaaaaacgacgaaacgacttttctcctaatatcttagagttattttccttggctcaaggcagtatttctcagcatgtgttccacggatcatttgtatcagaatcacctgagaatgcagatgctaaagtctcacccagatcaaaaatttgaattctttggcgatacttctgcatcctgaaatttcaaaaccattactcttggataacaaagactataatcttcattttgcaaatgagcacatgagacacagggataacatatacttagagaaagccagtctcagtcgactcaggaataagaactggatttctgattttgtgttatattaaaaaactatattgtctgtagttttatttacattatcagaaatttgaccagagttgtgctactttgtttactgagatccattattatttaatctaaaaataacctttaccttataaatctgggaggacaagaacaatgagttcctggtaaatatgcatagactatgattcacacttagctgtaattattccagttgtggactacgtatctgaacagaactcctattttctagatttagagaaagggctcagggaggttgaaaaaaattgtcaagagtcacatgattagaaaatggtagaaccagttagagctgagtctctcaatggccaatccagtgccctttcaccacatcctgtagtcttaatccttgcttatttaaatgatttaaagctgtatttaaatattttttaaaactcaacctatactgctcacataaaatatgatttcagtagtttgtgacctttattttatttaaagatatgttaatgtcacatcttcctctttataatagtgataaatcaatcatataaagacaactaataacccatatgcccattacatactgctttttcatcagtgcaaatttggttgttctaaagcaattagattgacttttcaggctgtgttgaaaaactccttgggcttttccacccatggtcataggtcatgtacccatagttctattaaaatacaataaagctcctacacagtatatatgttcatttagacaacttagctcttaattttgaggcatgcatagggatatttatctctatctacaaagcatgcttatataattgggggagggagataatcatccccgccccacttcctgtcttatcttataaaatgattttcctttgtgtcgattgtttgttctattcttattacatatgaccgttagcatattgcatttatttttttccacttgcctttcctgctaaggagagaatatttgtattcttagtgcttccattcactactccctctacttaaggtaagtttcttcccatcttacacttacctggttcactactacttactacctaggcagttactcctcattcttggggtttcagctcaattgtcacctcctcatagtctttctttcctttatctctttatatatgttctctgctcctgtaccttgcaccctttatcacttcacagtgtttatttcttcgtggtacttatcacaacatgctattgtcttatttatttgtttgcatttttatctctagctctctctctctacccacttggctgtaagagccacgtagacagaagatgtgcctatttcgtcccagtaccaagcacaatgcctgatacatagtagaggctcaatgaacattggttgaatgaatgaatatgtcttatgcaagatggtgtagaattttgttgtctgctttgaggagtgtgtgtgtgtctgtgagtgtgtgtgtcaaaccttgatcccttaaaagaatctcttttggattattctctttactgatagacactaacatagacataggattatctacctactcagttaccttgattccagacctattaaatggaccagaactcctagagcatttggaactttgtgccttatcttgcatggacctagatttcttagcactctggaccgcaatggactgtcttctagagcttgtactctagggtagcctctggccacgggtggctagtcagcacttgaaatgtggctagtgtgaagtgccttgtgctgtgagtgtaaaatacaaatcagattttgaagacttagtgtaaaaagtgtaaaatatatcattaatacttttacattgtttacttattgaaatgataaaaatttggatatattgggttacataaaatttactattaaaattaatttcagtctttttctttttactatcttaatatgctatttgaacatttgaaattatttataaggatcctacttctggttcacattgtatttctattgggcagtgctgttctagatccaactagctcatcccagctgtttggcaatgtaggttgaaggggatccattgaagggaatactataattgcaagagtctctcatattctgcatctttctcattagatatgcacttgggaaaggattggtgccctgggagactagctcaggtgcctcccccgtacaacctcaatgtgaaatcccgaggcccacacacagtttgtgtcccaagacacagaaattttaaatgtcttgccagtggtcatatatcttcctttaaaataaagctagaaccagaatccaggtcttttgattgtgcttagttcatttgattacttacagaaggatctacgaatacaattatgtcttcttttaagttagatactagaggattttaaagaattgttaataagttatataggttttctaaaaggatcaatgaatgaggaaattatacttcggactttagatggttaagtaaatggaataccatagtttatactttgatacattaaataagcagaaactctttctgttattattgccacccatactgtggcagagcactaaaccgggatgacctttacttagcataggagcatacattgcaaagaaaaatttaaacaaaaagtcggaaatgaacatgaaatctacttgtaagtaaatataaatctaataaccactctttgcataactataaaaactcatttggagaccaaccactgcggtttgaaaaactggttgctgtgtcttcttccaaaaaccctcatcactggtgtgtcaggcagacttctcttcttgggtgaggagattgatttttaagttagcttcatcatcatgatcttcccattcattcactaatttagcaactatttagccagagcctactatgtgccaggtagtgttctgggtgctcaaggtacctcagtgaccaatgcagacaaagatttttgctcttttggagcttacattccagtccttaagtattttctcaataggaaggatgacatgaaatagtacagtgaatctaagcagtgcctgcttagaatgccatgagggacatttttgttagttgggaattaaagtaagttggatattttctatttgtgtctttcttggggaatttgaaaatagaggtgcatatggaaagtggagctagctgtgcaaaacactacttttctggtaccagtctacttttggagtgtcagaagacacttaaattctctaataagcgtcaaaacatcaattagattgtgttaagaaatttaccaataatttgggggacttggcatacttgctcagttcttctttcttctgctgggatatcccaacctttagctaaatagaagtcttagttcttatctctcaattccaggaactcccagtcaggatgatttcccttctcactcaacacaggctccttctcattctcccagagctcatgagtcctcccccttgctctctcccttacacatctttacttgcatacatttttacacgttcccctccattctggcccccaagcagagattccttaaatatgacttttttttctctccttaaagcacagctggtagatttctccattactccctcagctaagatgagcctagacaagtatgttttaatcatttctttaactgacaacaagaaagatgatttgataatttgcctaaaatgagcagatgctcaggaggacacgtctccatcctatgtcccttctgtctaatttcacctagaaatgaaaactactcccttctccctcttttccaggcaaaaggctgatttaactaagcatgcaagacgccaacaccctccccctcagtacgtccaagtttccttcgctctgagccaccgaatctctgcttctcccccctctgccgcccaccctacgccacccacgcaggtttccgagtcatccggaacgcgagtgggtgcgaggactcggcaggctgcctcccgcgcccccgccgcccgcgggccgcctcgggttcagcactggacagctccctccccggccccacaaatggcagtcggctgattgacagaggagccgaccaaacagggaacaagacgacttgcagccgccctacaagggtttggttgcggccaagctgcctctttaaactggctttcctcccccgaggagggagcagggagagagggtggagtgtggtttgcggccaaacctaaaggctgcaattaaccagccgcccggccttcgctactccggacagacgaacgtcttaaaggacgtcttcgctcctcgggagtcgcggctgcgctcgcggtgcgggtctgggcgcgcgccccgcgcctccgggcgaagcggtcgaggaggagccagtgccgggaggcgggaacgacctgcggcgggtgagactatggagcagcgtcttcggcggccgcggcggcagcagcagcagcagcttctgaacgcgcctcaatgagagcggcggtggcggcagccgggccgagagacggactcgggctgactccagccgctgggagcgcgaggccatgtaacccgctcggctccaggctgcgaggtgcgtaatccccagccggcccctcgcgcagcgggcacggccagcgctgccacaggtgacttgatttctgcgacggtagcttagccacccggggccaatctcgaaacattcttattttcaagtcctttggactgggtgccatctggagaagggggaagactcctcgaaaaagtctgactgttgagaaactgacgatccaaatttaaaaagtgattcccccccctcccgttccctcctcttctctctgggaggcagatgggagccatggcttaccccttactcctctgcctcctgcttgctcagctgggattgggagctgttggcgccagccgcgacccccaaggacggccggattcccctcgagagaggaccccgaaggggaagccgcacgcccagcagccgggtcgagcctctgcctcggactcctcggctccctggagccgctccaccgatggcaccatcttggcgcagaaactcgccgaggaggtgcccatggacgtggcctcttacctctacaccggggactcccaccagctgaagcgagccaactgctccggccgctacgagttggcgggcctgccggggaagtggccagccctggccagcgcgcacccctccttgcaccgggcgctggacacactgacacacgccaccaacttcctcaacgtgatgctgcagagcaataagtcgcgggagcagaacttgcaggacgacctggattggtaccaggcgctggtgtggagccttctggagggcgagcccagcatctcccgggcggccatcaccttcagcaccgattcgctgtccgcaccggccccacaggtcttcctccaggccacgcgcgaggagagccgcatcctgctccaagacctgtcctcctccgcaccccacctggccaac

SEQ ID NO: 4808 - DNA, 6000 bp, Homo sapiens
tgatattatcgctgagataagcgttttaggttcaaaatatatttccaggagtcctaaaaatatagctccatcttttcagagtcttccatcatcctatgttgttgacaagactgagaatggtctctgtctctcctttcctttgtaggcaacctttctcttcctgctcccacccatggaacattttagaatcttcttttttttttttttttttttttttttggtgttttgaaattttgcagtacctgtctaggtgtggagcagttccccgggcttccttttaatctgtagctctggaatactcttgctattgatgattctatgtgtcgactattttgctcacaccccacccagatgcattctctactgtggttctctgctcttccctgtgccaggggaagctgatggctcctttgctggcagggctccagttgggtttggtcaatgggagggactgacaggagactggaagtggaaggagagagaggttggtagaattcttttctacttccccttgcttccatgctgtctggaggcggtggcatgcctccacactacagaagctcccactgggggcccttcctctgcagtcctctggctgtggtaatgtggttttctccttttgttcttttaactgtagggtggtgattgcttctgtcttctgccagtctctgggtgcctcaccatttcttgtttctttcctttaacgcttcccacacctctgtaagttacctttttattaaaatccctttgtttgacaatctgggggtgaattatgtgtcctgtgcagactatgactgatatgctgcctttcattgtcttgatttttccttcctggaaattttagtaattggatgatgggtcattagtgttaatcatccatgtctcttattttagctctgaagttttccatctttctgtgtttttgctctacattatgggatatttcctaagctggttctcccatcccttctaatgatgtgttttcaaatttcagtagtcatgcttagttttcaaggattctttcttgctttcttagtctgtcttatttcacggcaatctgctcttgttatatggattcagtaatttctctaatttaggcattaaaggaagttttggtctcttaaagttattttctattccctaagttatttcagcttcttttggggtcagttattttgtttattcatcttgacctatctcctttgtgctgttgattttctaaatgtgtgaggatctttggttctctgttataagtactggaaaataaactggtttccccggatagctgatgtggcttccctctgctatagccttccatgaaaaaagtaggacagcttccgggagctagctatatgtgagtggaccatgcttggcagctgcccttcagaatgcacaggttgcgggcagggatggccaaggacatttctcagggagctgtgtgtatgggatgggtctctgagaatggagagcttgatgagttcaggccgtggaagcaacatctacacaagcctggatctgagaaactcaaccatactccctgaaaatggagagtttacatgcagaatgagtctgggggaggcagcactagaagggctgaaagaggaagagagtcagactgatttcagagggacccatcctagagggaccactgccatgactccatggggacatttccaaggggagccacaggaggtttcactggagagttgtgtatgtctgtccagtgtctaggaggtgctcaccatggctgagcttgcagggcctcttaggactgtccaggtgagatgtgtgggtcgtgatgagggtttggagaggtttccagctagaattggtcgggacagcccattagctctggggcagaggctcagggaggtgggcaagcatgcaggacacaggaatgcttatagccacagctctgcagggtgtttcttgcccataactgtgtggagagccattctcatctcaactcatttcttgccacaacatctcccgaagcaaactttgttattagctccgctttgcagatgagaatctggggcaatgcgagacggcttctgtgcccggcttgtgaccagtcaccacactgactctcaatgtggtgtaagcaactgtgaatgggcctgattccaaatcccagcaaatttacagtaaggagggtgcctggggtctatccatcccctgactagctgatcttcagcttcctcataggaccagggggaatactgagcatgcagtggactgaggttcagagaggtaatgtggagcgctgcacacacctgagggagttgtgcgcctgtctgacttccgggtgattcatgaggaacattcctgatggggtgggaagggaacctgtcactaagctatttaggagaatcagtctccagcaggtcacaccagccagccacttttatggcagaaggaaaatcctacctagccccttccccagagatggcagaatgcagcctggctgactggcagagcctctcaggctgtgctccggaccctggactccagcaagggggaagaacagcagctcccagttctttcttacagactgctttcttgaggagcttcaagtgctctggctatgattggtgcagggctctgctgcctccagagggtgctgtctcctttccctagcagaggcaaagggtctggcaggcaactctgggagtattggtttaacctgaaatgtctgctaggaagagctacctacccctctcctgggcattatggtcctgaaggaagagcttggactttggattgaaagtccagccctaccatctacaagttggctggctgagacaagacactctacttctttgaggctcagttttctcgcctgtgagatgggatgatcacaccacaccagttaggcatgaggatggactaagggcaggttcacatgcttctgcctggcatgggagctgtttgctgcttttaccaccatttcagctcttctgctgttctctgacccacaagagctagggttcaggctgcgtgccttgcgcagtagttctcaaatgtgtctatgtggaagcttgcctccaagggcttaccagcaaatccagaccccacacagctgccctgcaagaaggaggtgacagtggctgcgttcttgcctgcacagaggacgggtgtccatagagctcccagctggagttgagcagtttctggtcaagcaatgttctctgattttacatgtctggaagctaccattacaatcaggtcttcttaaatgtcctccctccctccgtcttcctttcttcctttctttctttgtcagatgctgtgtgtggacttgtgctgggatctggaggcggagacaagagctgtgacctagacataggggagtggggaacaaaggtgctcaggcagacaaccaactaggctgctacatctgcctctgcagcagagcatgggagggtggtaggaatttgtcatggcagcagggacatcggagctggggtgcaacagaggagcagccgctttccaggtagtcaagacaggaagcagcatggtccagaaagaagagatgacaggtgccagtctacagcgatggtgagcagaggcctgggggcttggcaggtgggttcgcatcctggatctggctgtttcttagctgagtgactttgggcaagttgctcaaccactgagtgtcactttgcttcatcagcacgatgggaataaaaatgcccacctctcagagctgttgtgatgattaactaaggtagtgtctgcagagtctatgcactacaaacggcagctgccattctagagggaccactgccatgacttcatggggacatttccatggggagccacaggaggttcactggacaggtgtgtatgtccagtgtttaggaggtgctcttgaagcagatctgttactctcaggaggttctctaagcacatatgtgactttgccatgtggggatggggggcagggaattataagctagtgtattcaaaacaggagcagcccttgtaagcaaagctgttccattatagccaagtcatgtgcatctcagctccaaaggagaaagtgaccattctcattgaattctcatcgccacaaccttgggactgcctgagataagacactccacttccagggcccaccctgagttttcactcacaccctggatgcccatctccttccctcaccctggctgacattctcagccacactgccctcccctggtctccaggggctgaatgctcccagcctcagggcttttgccgtggctgtgccatccatctggcctatcgaacccatttgctcacagcatctcaccccctgtaataatttatttccctctttccttgtaccctgtctgtcttctcccccagggctgagagctccagaaggaaccaaggacagggagcctgtcttgtccagctctggtgcccagcaggagagccaggctcataggaggtctgcaagtaatgtttctggacgaacttatgaaaggcaggtctttttatacccatttcatggatgaggaaactgaggcagagagagagagagacaggcagacgcacacacccctagacagagagaaacactcctggagaaagagaaagggagggagagagggagggggagggagggagagagagagagagagagagagagaaagaaagaaagaaagaaagaaagaaagaaagaaagaaagaaagaaagaaagaaagagagagagaaagacagcgcagctccagcctgcctgtatccagggttgaggtgggcgtgagagacacacgcaggcagggctgcagttccgggcaggccttgggggctcaagatgcggctccccagggcgagtgctggggtcccggggcaggcgggcggctggagcgctctcgtgggcgggcgcaaggggcaggctgggcgggcgcaggcgggagcgtagcagccgctccactccgcacgcaggcagcatcggggcagcaggagcaggtgaagcaggcgcggctctgccccgcgcctggtgccccctgggcacaggagtgcggccgggggcggggccgagtgggccccggtacgaaccctccgggaagccgggcgcgctgcctgcccttggcccggggcgcagagcgtcacactggatctggggagcatcctacccccactgtggacctcagtctcctcacctgagacatgggcggccccatccgcaccctgtaagccgcaagccaaggaggtaaggggtgcatctgaggtgtctgggcgctatgggcattaggatatagtagcttttgctgagatttcaggagacaaagcaaagggccttccctattctaaccccactgggagattagcattttgtgtatgattcattaattttcctctgattgactgggaaggcaggctgcagggggtccctgttggggcttgcagctggttctagtttttgtatctggagagctgcctggggacaaaatgcagagacaccattttattgaccttgcgtaataatctaccctccccctcatacactcgccacccccttgggtgtgcctgagggacttgaggtcccctggtcctcactggtcagtgtaccccaagcccagcagccccaggcagatgcccaacaccaccttttcagtgctcctcctcctcctgtcttggccctctctgccaatccattttctatatccaagtgatcttactggaatggacctgaccttgctggtctggcccaccactccagcttcatcatctgccaccctggaacctcttattctgcttacttttcccagcaggctctgctccttcctgcctctgtgcctttgcacatgctgttccttgcacttcgagttccctcctctccctgtccctttggctggttgactcctcttcagcctttgagccctgtaccattgccacctcttctctcacctccctgctccctgctccttctctgatctctcaactcacaggcctctctttcatattggtgttggcaatggcaatgagttccatctgcattcgtgctg

SEQ ID NO: 4809 - DNA, 6000 bp, Homo sapiens
ctgaaaactgaatcggaatgcctgggttccaggaccggttttgtcaatgatgctgtgtggctttcagccctatgccttctacgggtggtgggaggctttttgtcactccagtgacactgcccaggctgggaacagcaggctgttcagggctcagcctggcttctactggggacaggacccttacacttcatatgagttgatgccttggacacttgggctacagtggagctcattctggttctcagatcatttgaggtgtcttttcttagtggttcttctccattctcctctcatcccccaatcaactcgacattcattgccaagattattaaaagggtagctccaataacattgttcccaggatcagaaaccatcagtggctcagaaaccatgcagaggtcattaatggataagctaaagaagttggagaaaagatgatttaaacgttgctaaagaaaagaagaaaatgagcagtagtggaagagcaagggtccacaagccacagtggcatgggaatgtcccatgaaaggagaggaggagagaatggaggtgctctgagggatcagacagagggtggggaaagtcaaggaaaaggctggggatggaaggaagcatgcttgtcatgggatgggcactcctggcttttggagcactcataaaaaggtattgaggctgaggctcctgggatctggccagcgaagatggagaggaggaagagaatgagaggcaagtggtcccatcatgggtggggttgtaggaaatgcctgggatatgattgaatattgtagagaggtcaggcaagagagtgcaagtggcctgggaaagaaggggctggggaaatatagaaaagaagagggaatagaaaaaataaaagagaagaaaaagcagtaagggaggagatttcctggacctttaaggagggctcttcaccaggagcctggaggaggacttaggaaggacttcttagaactgacatacttgtgcctcaccctcgggcccatgtgtatagatacctggtacctctcgaatagagtcacccccttgcctgctggaaaacaatgcagcacagtccaccccataggatccctggtcctcaagggccaagggagatgaagacctcacccagggccccagctccaactcctcccaacccagcctagctggcaaagcaatggaggctgggctgcccgtcccacgcacccggtaccatacctggccttgctgccatcacccatgatatggaggctgcagctgcattgagaggggcagaagccccgggcctgggggggccacgcaagggccaagagccagagcatgcctaatgccaccctcatggctcctggctcctctctggcccaggcaggggcctgtccctggaccgctccgtcccaccggcccagcaagctcagcagctgcccacttgctcgccagccccttacaccccctcctgaggccatcggataaacatggacagactggggattagggaggggagtcccagccgcagcactcagaggcttattgctttctgaatcactcagtcctgagggtaggggcgggggacccccttccatagcaatatccacaggcccagagaggccagggcagggcacagcaaagcaagacaagtaggcagctttccagaggcgagcagccatgggactgtcatctgcaaagcatcccatcccaacaaggccacggacaacacagaccccactggagtgccagggaagatggagaaagaacccccgcctcagtaagggcctttggaaattctttcctgtgacactgtctcatagcaaaaaagcagtgaaatgaagcaactcttcctgatggtgctaaaggcattggaaggaggctaagctctggacccaggcttcctggggtcaaatcccagctgctccattaaggggctgtgaccttgggtgagtcacattatctcttggcctctgtgtccttatctgacaaagagaaataaagttacttcatgcagggtgtttgtgaaaatcaaactcaaattccaaggccttgacagcctgtgggaacagaagctctctcacaagttgtaagtgcccagtttcactggtacttataagaccctacttacagaagaactggacagattcagatattttggggagacatcagaggtgtctctcatgagcccacaaactgtcccaggctgccaggcaaacagctgcctgccttgagtgccccatggatatggactcaacacactactatttcagctgagcccttctgggcattgctacgaatgccaaaggtggagatgtctccacataagggacaagggcacccctctcctcaaggtgccctactccaaggagggccccagagaggtagctcagagaggtcttagagaaggcactttcaggtttttttggagacaggaccccaacctctaataagggcctttggaaattctccatccataaagctttgttttgctttatagggacagggttgctctgtcactcagagtggagtgcaatggtgtaatcatagctcactgtagccccgaactcctgagctcaagccatcctcctgcctcagcctcgcaagtagctggaactgcaggcaaccaccaccatgtttggctatttttaaaaaattattttttgcagtcagggtcttgccatgttgcccaggatggtctcaaactcctggcctcaagcgatcctcctacctcagtctcccaaagtgctgggattacaggcctgagccactgcacccagactaatttcaatttttacttattctctcctaaccctatctcgccccaccatatctactcaagatgccagtggggactgaccagggatgattcccagcagtagacactcagtcgactcattcattcattcttcacatttgaccctgaggcattgttctctggtccagcatgccctacctatgttgtttggcttttctagaaggttccccagtccttcatgcctgtggctccaggcaggcctagaccagtgaggtatgacctgcaaagatatctggggccccagtgcacacataaaatgcctagctcggagccaggtctgtttcaacaatactggcttctcattctttccttccttccaatgcagccagtaggattttctcagtgcttcccagctatacttccacctccccaaacccagccgtcagcttgcctgttcccacatctctgcttcttcctccttgtgtcttttgcccaaatgaactttaccctttaatcttggccttgccctgctttatctcctctcatgaaggcttttgtgatctcgaaggcatgaaaaaaggactgacatatgtattaaccaacaccataaggtagaaattgagacagaaggccaggcagggtggctcatgactgttatcccagcattttgggagtccaaggccagcagatcacctgaggtcgggagttcaagaccagcctgaccaacatggagaaaccctgtctctaataaaaatacaaaattagccgagcatggtggcacatgcctgtaatcccagctactcgggaggctgaggcaggagaatagcttgaactggggaggtagaggttgcgtgagccgagattgcgccattgcactccagcctgggcgacagagcgagactccatctcaaaaacaaacaaaaaaacaaaaaagaaattgagaaagaacagggaacgctctggagggcgcagccataagctcagccctgcagagggattaggcttggatgtaagtgaggactcatgagaggaaaggcctgggaagtgggcattcctggaacagagtgggttgctctaccaggtgagtcagaagatgccattgaaaaatgcctgagcctgaggaataggagatcggcttttgttccagctccatccataaattactgcatggcctcaggcagattcttaactgtttttagccacagtttcctcatctaaaatggaaaggataatggtatctaactcatggagttgttgtaggactcatcagaagatcccctagcacagggcctgacctcactcaatattagctatgttgctgatagtgctctggagcttggtttctttatctgaaaatgaactaagttgtcctagatcagtatttcctggtgtaaattttatcatgagccagagcataacagtgcataaagagccagtgtatcaagaagtcatttgtagcagccaaagctcttagtggggccggcaaggctgggcgggttcggggtcggagactgacaagacggcaggcagcccctctgttctaagacagtgtcctaggacattttttatgctcaggtgctctatgggagacaggaaatgcagccctgaggtttatattcgtgatatctaaccaggacttatataaaggccacagacaaaagacattgacattgcagaaaagtaaacggaagagtccagtggtcccactccaaggcgcataactagttagtggcagattcagaaccagaaccccaaccccattttctggtcccagatggggttcttcctctgacagcaggcgacttcccaagcctcatcctttccccagcgctttggagtatactcatgtgagcctgaggacacacacacaggcaccaggcttgttgggaacagctgcggctcaaatccctcctcctgctcccctcccctggttatgcaactcttttccaattaggctctcagccacacaccatttggattccccgaccttaatcctgtgcaatggggctgaaatgaatgagacagggctccattctggcttcacaaaggctgcattgtccaactcgtgaatgggttccttctgcttgggccaagaggaccatttgcagcggggaggcatccagaaacagcccaaggtccaacataataacctgcatgtgcctccacgcacatgggatggccctttaaaagggagggcctggctgtgggaagccagagacagctgggccactggcagtgagggagagtgaggatggcagagaccagtgccctgcccactggcttcggggagctcgaggtgctggctgtggggatggtgctactggtggaaggtgagccaggcagaacctggggtgcagcgggggcccagtgggttctgaggacccaggccaccagtgtggagctggcaaggagaggagaggtccccaaacccagctgggtgtccggtcccattggctgccttcccctctgtgcccggactcggggggtgttctgacaattgaacctgtgaggtgcagcacactgcccgctgggagcagagaggaagccaggcaagggtcagggagggagggactttgaaaggggacatctgcccaggagatgatcaagagccaggctttaggacttttcatgtccctccagccgggagaaaatttaatccactccttggaaatcctgctgagaatcccacataagatcagtcccccaaaaggctctggggacagacagctctgcctcctgctcttgtgtggctggaaccaagtcccttcagctctctgccctcaatgccttgacattccgaatgggtggttgtaaagattaaatgggataatgggtataaagtgctagcctaaatagactctagggtatttaagttcattcactcccatcctctccagccccaccactattttcactgtgtctactcctatgagcccaagcacttcacctctggaggcaacctgggtctgcgaggtacctacctcaacctagaatccctaagatgctcgctgaggccagagctagagacagtgtcaatcctgaatctgggccagcccaagctaaattgatggagaacgcagctttggttcaaagcagacccagagaaatcatcagcacgttttctcacctaatgagaactgacaatggagaggaagtgacagtcattagattggtcctgaaggctctggacacgactgtctggtggccccagcccgtgtctccctttcctgagaaccctacaatctagcatccttccaggtcctcaa

SEQ ID NO: 4810 - DNA, 6000 bp, Homo sapiens
ccagagcatggttatgcgtctgccaagggcccactactgaatcgtttctaaatagcatacttcctgtccctgctgccctggcctggacctcgaccctctctgcagccccagggcagctctcgggcctcctgctcttgtggccctgctactcccctgaggatgaggggctagaaagcttttcccacctccagccatgccagcgaggtgtgaagagcaggcggcagtcagtgcggaggtgtgggccagggcgacacgtactactgtgcacactcagccctctgcgtctccctggagcaacgaggggcagagcagaggtgatgggccatagactcctaggccaggctgagcagaagggtggctcaggctgatccagagcctggccaggcagagagccgccaaatgctgcccagccaagagcccctgtgggttacatgggagggctgacctacaggccatgggccggggacacaccatctactggctacggtggcagatgggggtgggtggaaggaaggacatcacgtctgcagtgacagctgtcgtgtgctccatcaaccttgccctgctctgctctctgttgcgggaaacacatctccccagtttccttcccaggcttgtgggtaggcctgaccatggtggggctcctgcagaagatgggaggccagagcgggcagtgagggccccatgcccctgctctgctcaccgcacacctctccagcagccagccatgcctcctcatgagtgccctgctttggtggcacccagctggagaggcccagcccctggaatcacagcagccccttcctcctgtggtccttccagccttggccacagcagtgcgctccactggcgctaatctctggggtgcctcagtgtcccctcagatcggctcttccaccacctgttaccaaccaccgaagtcctcccaagcatctacaccatcacctctcccatttaacatgaggatagacacacctcgtgcgtccacacctgagtcacaggtctgggaagtctgagtttctaacaagctgcaggaggggtgcacatcagcagccagtcctccagccacactttgagaagcaaggaccagggagattttggatttcctgatacaatgtgtcaggtgctctactaggcagtgggtctcaaaggtgaacaaatccgacctgtttgcattccaaggagggagacagacatggtcagatgacaatcactgcaaatgacactatcactatccatagatgctccgagggatggacaggaggaggtgaacagctgggcccttggcagtctgggggaggtggtatttgagttgagacccagagcaggggacaggcgaaggtttcaggagcagtgtgtgagcagaggctgggtgaccagaggagctgtgtgccttcggtggtctgaaaggaggccagcctggtctccaggcacggagttaggcagattcagtggctcctcctctctcagcaagagaagactcacctgaactcagctccccaaggtatcaggcctcctcctcccgcaaggcctaatccagctaatccagcctaatccagcaaggtctccaggtgctggcagctggagctctcagacacctccccaatcagctggcagtcacacccagactgcctggcgcctgagctcggctgcttgtcccacaaacaaggctactctgaagcatgcatggaaaaggggtaggagcaagggcaggtccctggggacactgagtcccatgcagtgacagcagccttgcccatgcacgcatagaggaaatggcgtgcctcttcttgctgagcctcggtgtacgtgcttccccctaaagcccacttcttatccccacataccaggtgatgtagtacctccctccacccgcctcgccacgtttgggctctgtctctgtcttaagagctgtggaagccaccaaagggttaagtgtgggattatgtggaatttgtgtttccacctgcctttagggctgcagcaggaagcaatggctggaagggaggaaccagagcaaagtggggccacggaaggggagatgtggctggctaccttagccccactatcagtgcagaggtccctgggaccatcggcaaacccggcaccaagcactgaggtcagcctgcccccgggaatggcaccgggggaggaggagatgcccaggacagtctccaagggagtgggcaccagccagagttgggactgggaggactctgaggaccccttccacacttttccctgcgttgagattcttggatggcacaggcccatgagaccatcaacaatcccaggtctcaagaggccgggccccaccctgagccaagcttgcagaggaggaggagaagtgctgagggaaggtgagcacagccaggcacccaggaagacaggagccacctggtcggaggggagtgatggaaggtcagggttcccacccatcagaccacagcttccagccaggacagcttgggcagcagtagtcataggagacatctggaggctgaggcttcccacgcggccctcctggctccattggatggcaggctccgggcagacgagctgccaggtgggtgtgggatgcaaaggtttggagcaagagcgccatggggagcctccccagtgggacagaagcacaggagtgagggggttgggccctgaggagatctcagtgtcacccgcaacggctgcagtgcacggcccatggagaaaggacattgtcaggtgagacgtgggcttccaaaggccccaggctgggggttccgagtcctctgatctttccctgaggtgctcctttgaggcctgtggcaccctgggtatgtggattcccgcctcatgtgtccacctgacaagcacttctcccctggactcctgtgcctgctccatcacctgcaccctctcttaattagcaggttggagagtggggtccacattgaatgggacgttgtgttgactcagaattgctcccagctgtgaggaattgttaaacccctacattaaaacgcaagcagctggcattgagcctagggacagaaagaaaagccggcccctcagcctcaccctgcccccagggtggcctctgtgagccaaagccctgaagtggaagagcctcaggaggaaggcagtctgagccatgggctggcagctgcaggaagtacagctcccgctcccagtgaggctgctcccacttctcctgctcaaacctggggctccaggagaactgtttgtaaagactgggggaacttctggaagaggagtgatatctctgtccactccagggctccaacactcccagcactgtgccaggacatggcccccacttaggatgaccgctgcccggtcgggctcccctaaacgcagcctctgtggcaggcctagcccgagcagccctccctggaagccgtgtgttcagcttcccttctctccagctcctgctgcctcctctaagacagggcaaggggcaggcccggggtcccctccacttctgacatccagtcaacttggatcaggcctgcaggcctgggtgagttcctgggactctcccaataaggttttaaaaaatctttatactttaaaaatttctgccgggcccagtggctcacgcctgtaatcctggcactttgggaagccgaggtgggtggatcacctgaggtcaggagttcgagactagcctggccaacatggtgaactcctgcctctgctaaatatacaaaaattagccaggtgtggtggcgagtgcctgtaatcccagctactcgggaggctgaggcaggagaattgcttggacctgggaggcggaagttgcagtgagctgagattgcaccattgcactccaggctgggtgacagagcaagactgtctcaaaaaaaataaaaataaaaaaataaaactttcttatcaaaaaacaagcaaaagccgcctcgtgatctgatctcaccctactgctacatcctccttgtgtctccatctgtgaaagggtgaccagccttggttctatgcagggtgactgtgaaaatgccatggctcatgggggccaaacatggtggtagggcccactgtgacaagggtgaggctgggctgcacaggctcagctgcccacaaacagctctgggggctcttgggatggctgaggctgctcttgatgagctcagggaagaaacacaacagagactggtcaaaggagaggacacagccttctgcccaatgtccaagagcccgagcccaggaatctcccttgaaacacacactctcacacacactctcacacacacacatgctctcactcactcacactcacacacactcacatgcacacacactcacacattgacaccactgtcagctcagaaatctcccttgaaacacacacactcacacacatacacattcacaccaccatcatcccagaaatctcccttgaaacacatacacactcacacacacacacactcacacacattcccaacaccatcccagaaatcttccttgaaacacacacactcacgaaccctcacacacacacacacacacacgcacacattcatgacaccatcccagaaatctcccttgaaacacatacacactcacatacacatttacgccatcatcccagaagtctcctttgaaacacacactttcacacactcacacacacacactcacacacactcacattcacaccaccatcatccagaaatctcccttgaaacacacacactcacacacacattcatgccaccatcattccagaagtctcccttgaaacacacacacacacacacacacactcacacatacacattcacgccaccatcatcagaccttcgtagatagacacccagagaccttggtctgagtgagctggcggcatggagcgactgagcatgtgcagctcccacatcgctatataaagatggggatgaactctgtggctgtgagtcaccataactgcgacactcactcatttgcgcttcaccagacacagagcaaccgccagccccaagagcagctccaggctggatctgcgccggacacaggagaaagcagcgggtaggctaagcaggggtgctgaggatggaggaaagttgggaggctgagcacagctgaagtcctgagctccctgtgcccttgacttctctgtgggctcgagcaaggaccatcccaactcaggatgaaccctccttcggggccaagagtcccgcccagcccaacccaagagcccagctgcatggccaccccagcaccacccagctggtgggacagctcccagagcagcatctccagcctgggccggcttccatccatcagtcccacagtaagcctgggcgagcatgtgcatgcacagagccttccctgaccccttcctggtcccctcctggccacacacaggggctttgacagggagatagaaaaggtctgaactctgctgtggggccttgagccattactggacctctctgagcccgcccctgataaacaggctgatagaggagggtgcaggcaatgtccttcctcatggagagcattcaaggaacagaaatgccagccctgaggacaaggggctggaatggccagacctgtccttggctgcactcattcctttcagaggttgctcggatgccccatggagccctccagggaggagggcacaccctgggcctctggatctgccaagcccacagtgaagccttgggtgccttctgccacctccatcatcctagcccaggcccagggccatattccatcaacaccactgctacctggggaaggccgagggcaccctcaggacctggggatgctggcccaggtgctggacaggatgggaaggctccggtagctataggggccactgcggcaggacagagaccaagccaccctctcttccccagaaaggggttagggtgggaggagtctttaaatccctttgtcctgacctgatatggtcatgacctcccttcagtgaccctgggaggcctaagctttctttctaaagggaattccctt

SEQ ID NO: 4811 - DNA, 6000 bp, Homo sapiens
caggggttgcagtgagccaaggtcacgccactgcattccagcctgggcaacagagagagactctgtctcaaaaaaaagtgaaagaaagaaagagagagagagagaaagagaagaaaagaaagaaagaaagaaagaaagaaagaaagaaagaaagaaagaaagaaagaaagaaagaaagaaagaaagaaagagagaaagagagagagaaggagggagggagggagagaaagaaaagaaaagaaaagcatacacagagaaagtcccctgtgcccctctcccctcctgtttggttggaaatgtaaagaggtacagaagccacctgcaatgttggctttctctttagcttagaaacgagactgtccagatttacgcttggtaaatccttgtctcagtttctatggctttatctgagagtggaagaggtaaagaactaataccatgggcaataaatatgactttcacagtgatggatcagccaatgggtatctactgtccagtctccagggaatacgtgaagtctgtctaccctgaggatgccacacccagccctgtgtatgaaagggatttcacggctgtgcacatctggggcccaaacacaaagcggagcccagtgggttggttaaaggggtcacagaggttgcagtgaaacatctctgagaaaaaatggtaacatttttggcttttgccactagatgtgaccccacgacagggttaaaaataagaagtaaagtcttgtgaggtctcaagagcacaggatttctcagcctcagtactatcaacattttgggctggacaattctttgttgtggggaatgtcctgtgcattgtaggatgttagcagcagcgtccctggcctctacacactggatgtcagtagcaatctcccagttgtgacaaccaaaaatggctccagacatgacaaaatgtccgagggtgggggttgcagcaaaacctcccccagttaagatgcactgctctagcggttcagagcaaagactccggagtcagactgtctcggttcaaatcccaatgtttgcaacttgtaggggaattgaatgagttaacaaacacaaaggaaggatggccatatactttatcctccaaaccagggcaatttgagaatgaaaaaggttctaataataatttcataaactggtgctggccatggtggctcatacctataatcacagcactttgggaggccaaggtgggaggattgcttgagatcaagagttcaatacctgtctgggcaacatagcgagacctcacctcacaaaaaataaaaaaaattatctgggcatggtggtatgcacctgtagtcccagctactcatgaggctgaggcaggaggatcacttgggcccaggacttcaagactgcagtgagctatgcccatgccactgtacccaacttgggtgacagagtgggaccttgtctccaataataataataataataatatcataactgggactgtcagcaagcagagttgtgtccataatccatatacagtgttgaccacagagtctgacccacagtgtccactcagtgaccactgtgcgaaatgctttacattaaggaacttcatttaatcttccccaaaccctacgaggtcagtactatcactatcccctttcatatatgggaagactgaaactctaagaagctacagtaacttgcccaaggtcacacagtgagttgtcctgccagggctctggtccccaaaggctagtgcccacatgggctcgggtactgcagggaaatggcactactcaacacccatccggctctgcatgaactgctagctctactaggtaattcacagttccagcattagattcatgacattgtaccttacaaagctgagtgtttaggagttgctgtgataaaaagcaggaactgcatgaaaatcaacatggagcagtgctcaatatgattttgttttgaaaaactgtgcagagtacaacaagtgcacccagcccatcaggaagctattgttgttggttttttaaaaaaaattttttgagacagggtcttgctttgttgcccacattggagtataatgaccatagctcactgtagcctcgacctctcaggctcaagccatcctcccactttagccttccaggaagctgggactatataggtacaagcccccatgcccagctatttttttttttttttttttttttgtagagataggatctggttatgttgcccaggctagttttgaactcctgggatcaagtgatcctccagcctcagcctcccaaagtgctgggattacaggggtgagccattgcacttagcctcactatggttatttaagaatgaaacaacaagccgggtgagtgtaatcccagcagtttgggaggctgaggtgggtggatcatttgaggtcaggagtttgagaccagcctgaccaacatggtgaaaccccatctgtactaaattataaaaattagctgggtgtggtggtgggtgcctgtaatctcagctactcgggaggctgaggcaggagaatcgcttgaacccaggaggcagaggttgcagtgagctgagatggcaccactgcactccagcatgggcgacagagtgagactccctctcaaaaattaaaaaaaaaaaaaatgaaacaataaaatttttaccccaatttatatgtattattattttccaagatagttactaagttgttaggacataaagtcttattaagttgtttggacccaactacttaataaatgaaacgtttctgtttggtttttctttttgcctaggggtgccatgaaggtgcagtgaatggagaaagtttatgagcctctgcactcaacattttgccattggtagaacccaggaggttaatgttggagaaggccttttagtgcaaagagcccaccctggttgtacattctagggaaacctctctgtgtctatctcatcacatcagcctgtgatgtaatcaatctctctccgtctctgtctgtgcttttccctcttactttctctctctctctctctctctctctctcacacacacacacacatacatatacctatagtttcctttccctcacacaaacactaatatcccctgaccctaatcagacagttgccaaaaccccatttgtctgagttccctttatttcaattttttgccctttttcaactgtttcaggaagcaaaccagttctgtttttcaacttgaacctagtcaatgttcaagctgagcatctacttctcaggttagaagtcacatcatcagctcagacctgtttgataccgtgaaaagcagacacacaaatggaccccctccccagacagtacttcagactctggcgcaaccagcctgaagtactcaggtttctttctttctttctttctttttaagatggtgtctcgctgtgtggcccaggatggagcgcagtggcctgatctcggctcaccgcaacctccacctcccggtttcaagcaattctcctgcctcagccttccaagtagctgggattacaggtacctgccaccatgcccagctaatttttgtatttttagtagagacggggtttcaccacgttggccatggctggtctggagctcccgacctcaagtgatccacccgccttggcctcccaaagtgctgagattacaagcatgagccactgtgcccagtcagtgcttagatttcttaagacccaaccttaagaaagacaattagaagacagagtgggcaactgggagaggcctggtaatatggcagagggaagagggggtgaaggtgtgggtggcaggagggtggctggttggggaagtggccactggatcttaggccacaggcatacttttccatctccagcttcctcatttacagaaaacgagactgcagtggtgtgatggaaatgtgtgggacggggacaggtgactggctttcattactaaccagaggacagcttagacaagtcactctggctgggcctcagtttccttatctctaacgggactggattgcccagtgctcctcaaactgtggcacctggggcacattcatagcttgtgtgtgaatctgccagccttgaaatatctgtcttccttggatggcaagtttattaaaaattttggaaggactcactctttttataagaaagcatttatgtcattgttcagaatgcaaaatgtatatgcattttagttacaataactaatatttgataacatttaacgagtaattactgtgtgccaagtgtgcaaaactctaggtgagcctcacaataacctaatggggtattattattcccattttatagattaaaaatctggggtagagggagtagataatccacctaaagacctgttattaagtagtgataaaagatctccactccctctctcccccacaaaaaatatggactcattacaagttgttttaggatctacctccagacccatggagtttctttagtaaagcctgaacgacacaggccaaaataatctccaaaggccagctctgacccttttaaatcaattttagctaaatccgttcacaaaaggcttcgcacatccagtgtccctgaaaaataaaggaggttgggcaggccctgcgggggctcgaggaattcgctaagtgagttttctggcttctggatacactttcaaagggccagagggcacgaggcttccgccttggccgccacctccccggccagctgcggtgttcgcggccagtgttgccgggcacttcctggttcccgcgcgccccgggtgcagctccctgcacccagtgctggcgctcctcagaagggagggggccagaggcgagatgtcgcaaccgcctccctccctctttccccgccttggcactcagtcgcctcccagatgagcactctctcagaccgctgcgggccgccaggcgccgggaatgtcccctgaatgcgcgcgggcagcgggcgacgcgcccttgcgcagcctggagcaagccaaccgcacccgctttcccttcttctccgacgtcaagggcgaccaccggctggtgctggccgcggtggagacaaccgtgctggtgctcatctttgcagtgtcgctgctgggcaacgtgtgcgccctggtgctggtggcgcgccgacgacgccgcggcgcgactgcctgcctggtactcaacctcttctgcgcggacctgctcttcatcagcgctatccctctggtgctggccgtgcgctggactgaggcctggctgctgggccccgttgcctgccacctgctcttctacgtgatgaccctgagcggcagcgtcaccatcctcacgctggccgcggtcagcctggagcgcatggtgtgcatcgtgcacctgcagcgcggcgtgcggggtcctgggcggcgggcgcgggcagtgctgctggcgctcatctggggctattcggcggtcgccgctctgcctctctgcgtcttcttccgagtcgtcccgcaacggctccccggcgccgaccaggtgagcgcccctctgtgtgtgccgggcaggtgtcctgcgcaggctgggaagcggggccccgacggaagctgggatgaggatgatcaagaacaacaatagccatttattgcacttaatcgttgtgccaaatcttgtgcccatggctgtgaagtttaatctcttaaatctcactacaacgctgtgcacacgccctcctaaatgatgtaagtggagtcccccaaattcttgcaaaatgcaatgactgttgcgaggttaattaacgagtagtttaggagcgagacggaactttgggggtgcagggtggccaaacactttgtattgaatcatgattcctcgccaggtgctacaatactgttattatcacacccatttcacagatgagaaccagaggcacaccgaagtgtataataacttgcccagagtattttatccgtaattcgaggaggagatgggctccttccagaagtttacccgtaattcaaggaggagttgggctcctgtccagggttgggttatggtcct

SEQ ID NO: 4812 - DNA, 6000 bp, Homo sapiens
atttcaaatagcttcaggctattatcagcctcaaggcacattttgctaacagatttcgtacacttcttggggttttattaagaaattcccccacatatcccttggcgtatcttccagcagttgtccagttaggctactcacttttatttttaactcattttctagtaaagtcaactcaagaatgtaaatgtctttgccaggctcatggcttgcaaccttggatgggttagatgcctattcatcactgctctgcagactaatttgatatacaacttgaaaccacattcaagtcatcagcaactctcctggggcagaaatggctggatatatagattcggtatcataaataatggctaaagaaaaagactcttcacctgggtcatttatgaagaataggtagtacttttttcttttcttttcttttcttttcttttcttttttttttttttttgagttagggtctcactctgtcacccaggctggagtgcagtggcacaaccacatttcactgcagcctcaactcctgggctcaagtgatcctcctgactcagcctcccaaagtgttgggattacaggcaggagccactgagcctggccaggtagtattttttatggacgtggacttgcatgtctcctttggaaaatctcttacctatgtctcgttttatttactacgaataggtatgatatacatttatctcatgagcctaccttgcttttgtaaagtattttgaaatgtttatgtgaaaatgttgaataggtggtaagaatatggattattgctgtaaattataagcaagagtgaagattgtaactactaaaacactcaattatgtctcaagtgtataaaaatgagaatattttaataaattaaatatcatatatttatgaatcaaagctaaatgttcattaatatcaagtaaatatcagtaaacatgggagatataaaaatgtatgagacaattctggctctcagtgagcttacaatctataagagaagaaaaggggaaaatataaaaattaaataacaacataagaagtatcaaaaggcaacctattgtaaattgccacctgaaatgaaattggcagagtcactactataggtcagaggaaggagagatcattttcagaagcagtgggcagagaagataaagagtccagccacatctccaaggctgaattcgctgggaagcaggaggaggttttggtggagggaacccagtgagaaagtatagatgtacaaaaggaaggagtatggatccccaaaaggaaaaagaatacagaaatgcaagttatggtgataaggagagttctaatatgaaatagggctggaaaggccatttagaattggaccggggagaactgtgaatgttaaattgaagaggtaaggttgctgaacagaaaagcatcttggtcaaagcagcattttggaaatactcctttggttatgatatgccagattaaatggagcagggaggaccagagacagggagatcaaatagaacccatggcaagtcccggtgtggggtgaaggtggggggatgggaaaggaagaagttgagataggaactctgtggaagaagtgcacgacctctcaagtgtgctgatcagccctcattgttggagctttctgtcattttccaaagcattgtgaaatatatgggtttttagaactgactctctttaacagttgccaagtgaagaatgaagaaatgaaggagttttatttaacttacaatatccgatacctgtaaaagttgatacgttgaaccttttcttcttgatcttgtatccttacctaagaataaaaagtgttaggctaaaaaaaaagttaaaaaaaaaaaacaccaatcataaaatgtaggaattaaaggagttctgagaacattttatttttattagacaaccaactctagttgaacatgtactattccaaactcttctgtcagtaaaattgaaggaaatcccccagaattcctgagatccctgtactggtactcctgctagaataaccttctggtttcgagggtttataatttaatgtattatacagaaattcggagaaacttgatgtatctctgaatgagcagagaaaaaaagtttcaggaaagttttccaacaattccaatgtcacgatgtgtttatatatataatgatgatacggcaaagttactggcaatctggcttctgccctgaacctctacgaccaagttctggccttatcgcacacagaaaagcaatgccttccacccttcgggggcatttaaggttgacacactctattccggtaacaccacttgacagaaagatggcaaggaaaagcctcttccccacattccctatgcctcaccctgcagctcagcactcagaactcctttcctgggcagcgtcaatttcaacttcttccaatcccttggctattttgagactgccccttgtgggtccagaaggaagccaggaggccggggacagtggctcatgcctctaatcccagcactttgggaggccaaggtgggtggatcacctgaggtcaggagttcgagaccagcctgaccaacatggtaaaacgccatctccactaaaaatacaaaattagccgtgtgtggcggcacacgcctgtaatcccagctacttgacaggctgaggcaggagaatcacttgaacccgggaggcagaggttgcagtgggccaagatcacgccactgaactccagcctgggcaacaaaagtgaaactctgtctcaaaaaaataaaaagaaagaagccaggagtctcaggctttcagtgacttggataacttggggtgtagtctccttcctcccctttctaacgcctcttgtttcctggccactcctcctcaacctccccaagttggaaaatcagctgataaatcatgggcagggggtgaataaacaaatcactccccagttttaacatactgatgctgaggtttgggcctaaagcaaattcatatgtttgcatttatgtaagagaaagtggttaaaactgcttgattttatataaacttgaaaaacattactttttgcttttgacctggacagctgtggaagtcggtctctccttgcaaggtaaggatatgagcttggtcatattgatgaccatcaacgaacatgatgttcgttacgggcgctgttcttattccaatgctagaaggacctgtgagcattatataacattttcatgcacccttacataaacaattagaagctgtttactcctcaaggactcaattagagatttttttaatttttttatttttttttttatttcaggcctgagctgaggacactacaggagccaaattagagaaggggcttgcagtcctgccatattgcatattcatggctttcttgtcccctcacccccagtataatcctttttgccaggttaacaactcactaatttcaaagcaattcatttgccaactcaaaaaaaaaaaaaaaaaaaaccacagatacaactttaaatgcttttggattttaatcctctggagtatttatatgttttcttgtctcatcccttcaaaactaatctcagagttttgagaatctgggaacttgggcaaaggagaaaacaagcacgcagaccaaggaatctgaaatcgcagttcattacgtcagcataaactgacagtacctttttgtttgtattgacccagctcaaattataaaatcacatgagtaataaaacacaaaatacaggtgttatcattgaaaagtctaaaatgtaattaaacgcgttttttccccctcgcggtggtatcgtttactctgtatctcaacgtttctgtctccctaagcctctcctttcatatcatgagcatacatttttgcatcatgctcacacgttcattagctaggactgaggagtgtgtacgattccaaagggccctcagcgttagctgttagatgcacaaaccttcgcttcctttccacatctactgcactcgaggttcaacagaggatccttgcaagaacagcgcccagagagcattcttgacagatgcgcgcttggctccagcaacccgctctgctgggaagtttcttctaaccactaacacccacctccaatcccccaagctgtcacgacgcatgctggctgggtcccgtcttgacgggggaagggttttacacacaccctgctaggctgccccacatcacaaccaagctcgcagggcaaactcctccaagcctggcggacaagctgtcccaggcgctctggcgcttcctgaacaccaaggtcccctccccgctcaagggagctagcgctctgttccgcagagaaccccggaactgcaggtcgaggggatgcggggggagcgggggcgcaggagggagccgagtgctggaggcaaacggggcgcaggagcgggtgcgggaggcaaacggggcgcaggagcgggtgcgggaggcaaacggggcgcaggagtgggtgcgggagcgagtgggggctgagggaggggacggggccccggggggagccaggcgcggaagggggcgcgggggaacagggaccaggaaccagcgggcgcaggaaggggtgcgtccgcaggaacccgcgggcgcacgggaggcactagctacgcgatcagctcgggactctcaggagccgctcaattgccaacgggaggggggtgcggggagttggaggtgggggtgcagaccagacgggggcgtgcctttgcccggattggctgcaggagcctgacgcgaggccccgggggttggcttggggagtgggagcggggtggggtgggtgctgggtgccggagctgcgggcccggcgcgctcagaaacatgctgaagtcccggcggctcttccagcagcggcagcggctccagcagcagcggcggcggcggcggcggcggcagcggcagcgacagcgctcggctcctgcgggaaaggcgcccggcgcccatgcctccggccccgcgccgcggctgccctgacccggccgcgacctccctctgcgcaccacgccgcccgggcttctggggtgttccccaaccacggcccagccctgccacaccccccgcccccggcctccgcagctcggcatgggcgcgggggtgctcgtcctgggcgcctccgagcccggtaacctgtcgtcggccgcaccgctccccgacggcgcggccaccgcggcgcggctgctggtgcccgcgtcgccgcccgcctcgttgctgcctcccgccagcgaaagccccgagccgctgtctcagcagtggacagcgggcatgggtctgctgatggcgctcatcgtgctgctcatcgtggcgggcaatgtgctggtgatcgtggccatcgccaagacgccgcggctgcagacgctcaccaacctcttcatcatgtccctggccagcgccgacctggtcatggggctgctggtggtgccgttcggggccaccatcgtggtgtggggccgctgggagtacggctccttcttctgcgagctgtggacctcagtggacgtgctgtgcgtgacggccagcatcgagaccctgtgtgtcattgccctggaccgctacctcgccatcacctcgcccttccgctaccagagcctgctgacgcgcgcgcgggcgcggggcctcgtgtgcaccgtgtgggccatctcggccctggtgtccttcctgcccatcctcatgcactggtggcgggcggagagcgacgaggcgcgccgctgctacaacgaccccaagtgctgcgacttcgtcaccaaccgggcctacgccatcgcctcgtccgtagtctccttctacgtgcccctgtgcatcatggccttcgtgtacctgcgggtgttccgcgaggcccagaagcaggtgaagaagatcgacagctgcgagcgccgtttcctcggcggcccagcgcggccgccctcgccctcgccctcgcccgtccccgcgcccgcgccgccgcccggacccccgcgccccgccgccgccgccgccaccgccccgctggccaacgggcgtgcgggtaa

SEQ ID NO: 4813 - DNA, 6000 bp, Homo sapiens
tggtttgtgttcattttatatcaatatttcatctctttctaaagatagtggtggaaaggaccactgcagtctgcaacctctcattggagtgtgtactcaggcatattcatggattaaagacagtagcacagtggaaataacaatggatttgaatcctgacttttcatcaattcattttattctatctattggtgcttacttggagtgaccttaaacaaatatggacctctttgagtctcagctccttcacttgtcaagatggaatcatgatatttatgccgcagggttgctgcaggataggcgatgacgtgcacttccatctgcctttaccatagttctgttttgagctctcccttgggtaccagttacagcatttagtgattcacgttgactctgtcacgaacattccattgctgctgacttccctccagcttgaaggagcaagccatgcagatccagccacaatgtgttctcctggtgggcacactccaggccttgttgcccctggtcaggtgggatcaatcatgtggcttttcatggaggtgcagtgaggacttgtatcaaggcctggatagggacatgcatctcccctccttgctgagtgtgatctcactgccaactggtgtctggggccatgttggaatccatgtttggggaggctcagcctggctgaagctaacaggattggggccctggttactatgggatatcagcgccccctcaaaccatggtccaactgaaggcaggaaattttgcttaaaactagaggaaaatgagctcagtctctttaggaaactgagttaatatattctgagtgtctttctggcattttaacctttcaatgttgcctttaggaattcagaaagcaaatgatctttaaaatatgtgagagggtatataaatgtgtgtgtgtgtgtgtgtgtgtgtgtgttcatttgtttattgatgttggacctagttaccaagtcaccaacatcagtttggtgttgcaaaattgagacacttttaagttacagcccaaggacaccttcctgagaaggtggctgaggacctctggagtgtgcagaaagagccaagccatggagctagaggtactggcttcatccctcaccaactctgtcacttaacttctttgagtctttgggttctcatctggaaaacgtggggcagcaatagaagcttttcttcctgtctttgttgcaagaactaaataaagtatggtaatgtttggacatgttttataaactccaatgtgctaggagaatattaattgacatgttatattgtcaatataaatataaataaatatttatataaagatataaaaatataaatgggatcccgcatgtctagagtctctggtgaggcttcagtgagtgcctccaggccagaacatcaggtcatggttggaggatgtgcccaggtgattgtttggcatccagtggcttaccctgaccatttctcatagagcacactcctgagagcatgaccacagaccaccctcaccagaactatctaaggagctcatgaaaatgcagacttccagaccttctgatttggaaaccccagggggtgtggcccaggaatcaaactctttaaccagcaccccaggcttaccaggtgactctgatacacacaaaagtgtgagaatcacagatccaatagtgaccccaaaacattggctgatttactccacagacagtacttgggcactatcttagtctattttgtgctgatataacagaatacctgagacttggtaatttgtaatgaatagaaatttattgttcatggttctggaggctgggaagtccaaaattcaggggctggcatatggtgagggactttttgctacatcatcccctggcagaaagtggaagagcagagggagggagacacacagggagagagagagagagagaaggagggggtggtggcaaactcatcctttaataaggaacccattcccatgataatggcactaatccacttatgaaggcagtgcctccatgagtcaaacacctcccattgggacccacctcccaatactgttgcattgggggtcaggtttccaacacatgaactttgggggacacattcaaactatagcacaaatagctcctatctcctgccaggagctatttgtaggggacacttccttggcagcaggagagacacacagatgaacagcgtcctctgctgtcatataacaggtatttaatgagacatgtagccaacactaaaatctgtaggctacatgagggggccaagggttgatgatattgctagcattctgccctgtttccttctctgggaagcaaagctaaacgtacacattaccttatgtagtcatcaccacggctctgaaaggtaaataagaaaacctagcctcagggatgttgagtaagttgcccagggtcctatgaaatcagtgagtggtgtgtcgttaaatgtttaaccacaggctggggtgggagaagccctgatctatggagtttgctgatttctataatgcaaaaactcattgtggtggattttaagcaaccaacatgctgtcactgaagcagagatggagagagatgcccataatgggcccttttgagctggtgtgagctggcttcagaactccactgtctgcagctgtcagtcactcagataactgtcaatgagtgtcatctgtggacacacagagaagagagggaatcttgtttctgccctcctgacacctcatttcatgagcatttaataaagtttggatgtttgtcccctccaaatctcatgttgaaacataatccccaatgttggaggtgggccctggtgggaggcgaaggcgattggataatgggggcagagccctcatgaatgggttggcaccatcctgaatgacttctcagtccatgagagatatggtgtttaaaagcctgggacctcccccttctctttctggctttcactcttgccatgtgacatgcctgctcccactttgccttttgccatgattagaagcttcctgaggccctcatcagaagctgagcagatgttggagccatgattgcataccttgcagaatcatgagccaattcaacctcttttcttcatcaattacccaatctcaggtattcctttacagcaaagaaaaatggcacaatacagcatctacaatgtgcttggtactatgtgaaggagataattaagtataatgaggtctctaccttcagggcgtagagtccaccacgtccttgcttggcttactttatctagtggcttgaggcccaggaatgtccagtcaccactggccacaccaggaggctccagaacagggctttctatgtccaggacagggatctgaggttgctgacatggtgcagggggtcactgcagggcagcatctcacagagttgaagggggctgcaggggttctgagagctgcccctgcctgtccatccccaccccttccccacagagtcttggttgagaaccgaagggccacagtccctgcacactttgctgaggggaggcaggggtcccctgtgtccagggtctctgttgcttggaccatgcctgccagctgacaccctccccattttctgaagagttctggcaccttatatcaggcaggtccctcataaactagaatgtgctgcctcaccagtctcagggcagaggggtgtgtggcttcagggctacaggaggcagctgctggaacttggagcaggacaacagagtatccaccatactagggttagctgtctaggctggttgtggacagcctggcttgcccaggtgggagcagtcagggtcagcaaaggcatctcccagctggagagatgcccaggggatgttacagagagcctcggggtccctgcagcaggcttaggattcagccgaagctctggctgtagggcgagggaaagaaggcactgagaatcgagtaacctcagtcatgcagcagctgttcttgggacagacaggctgggacactcacgtcaaggtctgccaggatagcatgcaggcggggacaggtggcactggggcgtgaaggtgtccaggcatcccttccttttctcagagagatttccttgactcagcctgtctttgacacacacggggggatggaggatgttgggggaagggagccacagtgagccaatcaccctgcaccggagccttcggggctggttccctccgagcctgtaagtgtgagtgtgtgtgcgcgagtgtgtctgtgtgtgcaccagtggggatttctgtgatagaagcagccagattccagagacagagagaagaggagggggaagaacaagagaggggagaaaattgggggtgggagagacagacggagagaacagcgcggggggcggggagagggagagaggtggaggggagagcagagagagagagagcgagccagagagcagagagggaggaagagagaaagcaagagagcgggagggtgcgcggagcggagcggagacagagctcgcgggcatggggtgagagcgggaggaagcagaggcagaggcggagcaggggcgcaggtgcctgcaacccaggatcccggggcgctaaaggcttcgggttctaccgcacgctcagtcgctggctccagaggtgctgctgggggccagggttcactgccgcgcgccaggtgcctgcccgtgaggcggcgcggggctcccgggtggctgcgcgcccagacgcctgcccgggaggccgcctgaggctccggggtggccgcgcgccctcctgggagccatggcggctggggccggtggtcgccgggcggcggcggcgccgaggggctgagccggccgcgggcagcgccatggcggcgccgggttgcggaccctgagcgccggcgcggggcgcgcaccatgaactcgtgggacgcgggcctggcggggctactggtgggcacgatgggcgtctcgctgctgtccaacgcgctggtgctgctctgcctgctgcacagcgcggacatccgccgccaggcgccggcgctcttcaccctgaacctcacgtgcgggaacctgctgtgcaccgtggtcaacatgccgctcacgctggccggcgtcgtggcgcagcggcagccggcgggcgaccgcctgtgccgcctggctgccttcctcgacaccttcctggctgccaactccatgctcagcatggccgcgctcagcatcgaccgctgggtggccgtggtcttcccgctgagctaccgggccaagatgcgcctccgcgacgcggcgctcatggtggcctacacgtggctgcacgcgctcaccttcccagccgccgcgctcgccctgtcctggctcggcttccaccagctgtacgcctcgtgcacgctgtgcagccggcggccagacgagcgcctgcgcttcgccgtcttcactggcgccttccacgctctcagcttcctgctctccttcgtcgtgctctgctgcacgtacctcaaggtgctcaaggtggcccgcttccattgcaagcgcatcgacgtgatcaccatgcagacgctggtgctgctggtggacctgcaccccaggtgagccgagcgcagctaaggctctgggaacagccgcgcgggatctcggcgggagtgggaggtccctagccccaggggctcttttccaccgagcctctgtttcttctgagaactcgagggtggggaaagcggcccagctgtggggcttaaggaggtgcttagggtatcagcaaaccagggccacaaaaaatgcgggtgagcccatctatacatcggtttttgaagcatcagggtagaaatcacagacagtcagaactctgttgggcttcttcatgcacattttctgtgtttgtagctttcactttaaatggcacatgggaagtccgtggtctttgttccctattaaagaccttcaaagtgtttgattctggccgagagggcggcctcgatgcttagggagctccttaagagcttttcagacccaagtgtgtcgcttctctgagtctttcccttctcgg

SEQ ID NO: 4814 - DNA, 6000 bp, Homo sapiens
tgaatcttggctaggaatggtctgcacaaattcaaactgacgctggggggagacggctggttgccgtggcaaccagagagccgtttttaattccgcacggtgagtggcggctgctgccgctgtctcgggaggacggtggccctgggtcccgcgcgctctgcggccaggctgcccgctccccggaggccgccatttcccctctcggcgggcttctaagttcaggctctcagagtctccaccaaatggctggaaacgaacaaacgcaaagatctcgaaagtgttccaaaaagaggcaggtcctgcccgagatgccagtggcgtgaggccactgttgctccagagctccgtatttacagcaagctcctcacgcgagtccccggcagccacggcccctccaaactcggggctggggaggggctcaccctggcgagggaagacggggctgggggctcacccctggcgagggaaggcacccatcagcgtcctgagcctcaggcgtcggcctgacctccaactctgttaacctgcatgaggcagcgtcatctctgggactgtttcccgttctcccacaaacagcctgcagaacccaaagccacaagatgcagagaaacgtggtcccctggctgaggccttgcaggcaacacggcccactctctctgggtaggggcgggcccatcccccattgttccttccctacggaggcagcagccgcagctcaggccccaagggggactgtggcaggagcaggcggccacccacgggcgccccacatctcgtgtccatcaggacgtcccctcagagggaggaagcccacatccactactaagagggctgaaggctcctggcgggaggcaagtcttcggccatggccccagcatttcggaggaggtcccagtggcctgcccagttaatgaggccaggtggcggcctggcccctcccagaatagaaccccaaactgacctttccagaagggaggaagaatcgcagagcagtgggaagggctggggggtcccatgcacccgagaccctgtgagcctgggcctcgggtgccaaataaacaacaaagccctcgagagtcgcgcgcctcaggagtggggctctcgttgctgtcgggcggcgtccagcagctgtttctttggaaggtcagtgttgaaggcgttaggatttgcgtcaggaagaactgctcccacccccctgtgccaggcccacctccaccaaggccagctgggctgtgttcagactgcccggccctccacaaacccctccgcaaacccagccatttcttttgagaacatctttcctcccacagtgaggcaggagccacatgcctgcttccgtgtggactgtgagctgtgtgttcttacagttttaaaccatcagaaaaagtcaaaagaagaataacccttcgtggcacgtccatggatgacgcttcgtggcacacaggcccacccctcgctggtgtgctacctgcagtgccgaagccagcaggaggctgccctgatggagaacgtggctggaggggctgcggtggtcggccctgggcatccgcttggcaaggctgctgtctgcagtttcccatcgagcactcgtggagttgctgctgagaaaggggtggtgtagatgcaatggccgtgaccagcacttggccgtctgcgctgtaggccaaggaggcctgcctgggcccacctggctgcagcggggagctgagcctccctgaggaggaaggaatcgcacctggggcagcaacagcagctcctgcctgggtccctcatggccgcgtgagccgcttcctcactgtaaagctcttcacctatgtaactatgtatcaatgtaaacaggaacgtatcctccgcctctgcatctctggtgaatccgggcgatacgtggtgagacaccttaataaacacctagatagaccctgccgtggtgagcacctgcctccaaggggcaagcacggggcattttcctggctaggaattctgtctttctcaccacgagactcttcatggacttacgttttgaaacagcatgtttgggtttgttcggattttaaaatttcattcttctttgtcttatttccatttcctggtcttatctttttttcttttgttttcctctcttggggaggtaagagtcagggaggcaggcagcaccctcacccgtgtgcctgcaacatggttgagacgcttctctcctgccgggactggaaaggtgggccctgtggtcagccggtgccgcagccaaccctgcagtccagaaagcagacgctttgctgatgaacagtgagcagagggccgggggcccagggcccggggcagtgacctctggtggcagggcaagtgctgacatccccgggctgccgggcacacggccgccggctcacctgctgaatgccacccagaggcctgcgtgatcctccaggggggcagctcctcatcctgccacacagcgcccggagacttctggaacacacaaccgcaagtggggtctaacctgcaactggaagagcacgtgactgtctgtgcctcggtttccccatcccacaggcgtgccgcccaggccaccatgtgggactgttcaggagacagtgcccggtccccagcaccaccctggagatgagacctgaagcaggtgccctccaagggcagctccagggaggggctcgcagagcagcgggggaggggccctggggggcagctgtgagtgagcaggagacacccggtgcccccacccctcacaaggccgagccccacagactctgcccaagggcagctctggaacacgtggcagtgccagctccccctggctctctctccttcacctaggttatcactaggtgtggaatggggggggaggggcagccctcccgggtcctgaccaccacgtgcgggggcagcaggacattcgcaagccagtggacctgtctgcctcaagtgccggaccccagggcccccacagcacctggtagccttctgtgtgtcctacccggataccagcggcctccagggctttcccttggacaacctttccctttggagcctgtgggggcccagcccagggcccaaaaccagctaggactgaggtgggcagtgggagcttctctggggcctcccagagcctggctggctccaccacctccctctgcccccacagcaccttcgagaagttcccccgcaaagtccccgtgggactcagggcagggctccagtccgtgtgcagggaaagagacaagccagggccactccccccaccggccggggcctcctctgggccccaactgtgatgtgccaggagcctcccgggagacacaggctgacctgtgctcagtgtggtaccctcacctggagcagtctctgtggtgggagccgctgggtgcaggagtaagacgtcagggcagagcccatggggacccccggcctggggacgtctggggcagaatcctccccttgctgcccgcttcttcccagccctcttgtccaggaccatcacccaggggacaccagggggggctccgaggctccaagggaacggtgtccagggagtcagggcggccaggtcctggggtgcctagagcgtctccagctgggaactagaccgtcgcctgcctggaccctgtgtccctcagctggagttcagggaccagcacagtgtccccacagaggggctctgggaacaccagctagatggggcagtggggccctgagcacatcccgctcaaaagccccataatgagaggccggggaagcggaacgctgtcacccctgcatctaattctgcctctgtgagtcttcatgacaacctcccaatagtacatccttcaggcccctcaaaatccatggcagcagggcctggggaccccctgaacaggcgccagtgtcacagaacctggggcagaagtagccatgcaagggtggaggccaaggagggaacaggtggaggggtgtggggtcacccagggccaaagggggaacaggtggaggggtgtggggtcacccagggccaaagggggaacaggtggaggggtgtggagtcccccagggcagttcctgagactcttgctgaggctgccaccaggccagcacgtgccccagaaaacggagtttgtgacgaaaactggagtggacttggacccaccttgtcgggtaggaggccccttggggcaggatagggacctgtgggatgtgtgcagagcccaaacctcgctgcgggtgggaggctgggctgcgccgcccctggcaccctggcctccacactcgccttggctctggatgcccagctctgtggcccaggatgcaggagggttggggtagggggacagggacgctttctgcacagccacaggccctgtctgtctacaccggctgcggctgccctgctgactcacactcagacgggttcacgacaggtgcacctcggttctggcatatctggacttgagaatgttaaataaaggatggaaaattccttccaaatccattttcttgtgtatatttctgttcctgcagcttctccacggatggagattgtctttgggaataacacagggtcgtgcagtccgcccggcggcgttttcgggcgagggtctggtgctggggagcgagcgcggagcgaggtgtctctttaaatacgctctgcagtgtgacggcggccgcccggctggaagagccatccccaccctgcggcaggagcccgcccgccgccatcgcccgccccggtccccatggttacgcgcctgcctccggccccgggtccccgctgtcgccgcgggaggtgcgcgcagaggcggcggcgctgctggccgggctgggccgctcgtgcgcggggctgtgactcaccggccggcgccgcagccccgcaatctgttgataactcggtcccagctcggccgctgccctcgcgaatggagagcgggtccccggcggggggagcgcagcgcgtctgtctccgggagcgcggcccggccgccccggcagccgcttcggccacagcaggtgggaaggacgcgcgggtctgggcggcgggagggacgcgcggggccgcggctcggcagaaaagctcgcgccccgaggtgacactggccgcgaggaaagcagctccgagtaactttcggctccgctggggcgggaggcgccacggataatccagggcccccgccccgcgcgcccggcccggagctcgagccacatccaggcagagcaggcgccgcggccgggctggggcgggcgggtcactcggtgccggttcccggtgcaaaccccccggcgcgcctctggctttgtgcagcccgagatggttgagtttggctccggagccgggagtggggcgcagattgatttttaaatatggagaaggagacgcatctgccgctggcgcgttcggtccgagccccccaccggtccccaccggcaccgcctccgccagccccaggcgcagcccccaggccgcccgcggaggggagggagcgacaggggccgcggctgctccctggcggggtcggggctgcgagctgccctccgcggggaccctccgcccgccccgctgaccgccgctgtcttcacagatgggagcagctcccggactgcgcccgccccgccgcggtcaccctgaggccaggggcccgggagcgcgacctcctggccgccgtctgggactttgaccttccagaggccatggaggctggcggggagcagggcgccacctgatcgcctccccctggacgcctcctccagcggcgctcacgcttccgcaactttgcagcgctcatggtgagtacgggggtcccgggggtcctgcagctgggggctaggccgctgcgggggggcggccacccgtatggggactcccaggctggaaaagttgtggaatggcgagctggtgaccgggcttccgggctcagtgccggggtgggaggctctgtggagtgggggccggggacaggccgcgtgtctgggcacctctgctccccgcgtgctgggtgctgatcatactaatgagttgca

SEQ ID NO: 4815 - DNA, 6000 bp, Homo sapiens
ttattcaaccaacctttataggacactgacaacgttctggccactcctagacactggaaacaaacaagacgcgatccaagacctgagaagccttgcctgccatcagtgtgacaaggaggtgatcaaggaagtggtttcgatgggcctccgggacgtggaggccgacagaacagtaaaggcaagacaaggggacgtgagccccacctcactggtgatgaaaccaggcctcgccctgcccctcttgggagctcctgcacctctttttttttttttgagatggaatctcaatctgtcacccaggctggagtgcagtggctgcatctcagctccctgcaacctccgcctcccgcattcaagtgattctcctgcctcagcctcccgagtagctgggattacaggcacttgccactgtacctggctaatttttgtatttttagtagagacagggtttcaccatgttggccaggctggtctcgaactcctgacttcaggtgatccacccacctcagcctcccaaagtgctgggattacaggtgtgagccaccatacccagcctcactcctcttctctaattgaggaaatagataggggctcctgggtctttgaatttcatgggccaatataatattaaaaacctattgagggggccgggcatggtggcttacgcctgtaatcccaccactttgggagactgaagcaggcagatcacctgaagtcaggagttcaagaccagcctggccaacatggtgaaacctcgtctctactgaaaatataaaaattagctgggcatgggggtgggcgcctgtaatcccagctactcgggaggctgaggcaggagaatcgcttgaacctgggaggtggagggtacagtgagccaagattgtgccactgcactccagcctgggcaacacagtgagactctgtctcaaaaacaaacaaacaaaacaaaaacaacaacaacaacaacaaaaaccctattgagggaaccataccggtcactgactttttattccaccaagtaaggaattttaaagaaaaagcaaaaccaggtcaacaactaccatccgccatccccattatttcatgaaagaactcaaacagcaggaagggcatggtctcggaatgaaggacagtccatggaaccagattcatctagcagaatgaaaagtgttcttcttcttgtcctcatttggccccaccaggagctcccgcaaatacagatgtgatccttcctcctgtctctgggatgatcactggagcagcggctcagggtcagacccaccaccgggcacaggactggagcctttcagcagaggggctgaccctttgccaaccccacgtcctcctctcacttcggccacctcctggcacccccagcattgccctggtgacagggtgaccctcagcgctagtgtcccgcgatgctgtctgtgacctctgaagctagggcccagagcagcctcccaaacagagataggccactctcaagagcatcccccaggcgctgatagcaacgcctcatccacagtgctttctggagccgcctttcctctcccacccacttctctcacacaccacagctctcccaccttttcttcctcaaactccctggaagatcattcctctcccaactctggtctttaagcctctagcccagaggtcacaattacaccaaccagcaaggcacagttgccagcgcacgcccgtctgaaggagtggctgctgtctagctgtgtggacgttgccctgcgcttcccaggcccccttcaagctgccgggcaggcatatagtaccagcaccatgtttagcgtccccgactgcaggcctcgcctcaactgccttgacaacaatcacatgatttcttggggtggcccacgtccagtgaccaatgtggaaatataaaggcctggttaactttgccccacacggggcaactctgaagctatcccagttccaattacccatggggttaccaaggctattgtaggcctggaccacagcacgatgccgtgcttcagccacacttgcttcctgccttgtctgctgccccaagtgttgaccccagtggtagctccctgagaaacagctggtgtgtttcttacacagcagggtctgcttcctggatgcacgcaactggcaccatcagctcaggtgtgcgattacaggtgtgagccaccgtgcccggcatttttttttctcctttaaaaggactggccttccaggcgcagtggctcatgcctgtaatcccagcactttgggaggctgaggcaggtggatcacctgaggtcaggagttcaagaccaccctgaccaacatggtgaaaccctgtctactaaaaaaatacaaaaattagccaggtgtggtggcatacacctgtaatcccagctacttaggaggctgaggcaggagaatcgcttgaacccaggaggcggaggttgcagtgagccaagatcgtgccattgcactccagcctgggcgacactgtgagactccatctaaaataataaaataaaataaggactggccttcgggatcgctgtctagctatggactcagaaggccagtgccaagcagcaaagctgatcaggaaccccttcatcctgggtggcccgcatcttcccctttcacgaggcttcaaaccatagcacatagttggaaggctgcaagagcagataatttaaggggaaaataaaaactcagatgtacaagctccaaaacataatcccctttacataaacagtggaggtggcgggatgttgtggggaggaaggaacttgaactctgctgggcttctgtgactggtgacaggcgctcaggcatcccagccctgcactgggtttgcacctgaagctcaacaaattcccactgcctgggagcaggaggacagcaaaaagagcaggctgtcttgggcttccattcttatttctacacattctgctctttaggaccctggccagatgggcatgagacagaagcaaaccctaaagtactgctactgttgccgccaccaacagagatcaaaggcagagacccttctgctagggtccaaagtccaaacaggccactccagagaggaaacaggcacacaggcacacacccacgggaggagtaggggcccaggaagcactccctccccaagggcaaggatggggttcccattcgacccagcacatgctcctcacatctgcacagcagggagaccaaacaatagatacaatttcagtgttgattgtcgatgaacttacccagaagttcataatcagaaaaatccataaagaagctctttcaatttcagcatgtttaagtttcatgacttatggtttagtgttgtttttatattggattccatgggtggcataatcttttcagcactagagacctttaaaggtctttctcagctcaccccgggagacaagggctgggtgtcaggaaagtgacacacagggagaagcagaaaatggactgggagtgtgggggccgaggcccagccacgagaaacccaggcggtgcaaggcagagccctgggagcacagaggctgctgtgccgtgggttgctggtgaatgagaagcctcctctgctttaatgaagaacatgcccccccgactcccgctaatcctgccctgccttcatggtccacacaccacaggtgtgcacaggttcatgcgtgtgtgtgagcttaacacgtcagccgcacatacagttgctcagaaacatcttcactgcttcacacacgtgcacacagtcaatgaccaggagcagggatcttggggcaaacctagagcagcttctcaggagttaaaactccagctttgctgtggttcccggaagagccctgactttgtcctaagacagtggttctcaaagtgaagtgctggctccagcagcatcagtatcacctgggaactcgctggaaacgctccgggttctggcttctcctcctagagcgcccagagctgtggggtcctcccttcgggccagaaactccaatcatagtttttatgtaccaacccctgtgctaagtagactttgtgcacattatctccatttaaaattcacaaatgtactgtaagatgcacaccatttttctatatttttcagatggggtagacagagctcagaaaggttaagagacttgcctggagtcaccaaaccaggctcgaactccttctgtattcagaatcactcttcagacgtagctcctgtcctgggctgaaagtcaacatccgccgagagctgggccctctgtaccagccccatctcccccaagtctctccctgcctctgcagccagtcctaaatctttcaagagacaaggccaagcagggggtgggaccaggggcgggagccaaagccccccctcgtgagcaggcagcacctctgccaaggcccccactggccctgccccagagaacggcagggaagctgcagcgagggctggcagctggcagagccctgagcacccagcacccagcccggcttgcagcccaaagcctggagagaggctgctgcgccattgacctgtggactccagagactcccgctgtgcattcctctgatctggaaggtttcctgaattacgtgacgagaaacctgggttcgagtcctaacttgtcaccaacttcctgagtgacctgggctggtcccgtcccctcttggaatctctgtcttccatctcttcagcgaaggggttgatttataagggtgttttctgctctgacactgtgatttgaattctgtgtttccacatgatattcgagaagtctggccggaaggatggaatctgaaatgacaatggttctggactgggctttgtgctcagcccagctcatctttgcctgagacctaggagtggccccaggctctcctgatgtgccaccacgcttggcatctgctcctctccctgcccccatattcccatgctctgaaggggagttctctttcatagcaaatccgagaggagccgaggagccaggtcctttgttccagacccagaagcagccatggggacctgtgacattgtgactgaagccaatatctcatctggccctgagagcaacaccacgggcatcacagccttctccatgcccagctggcaactggcactgtgggccacagcctacctggccctggtgctggtggccgtgacgggtaatgccatcgtcatctggatcatcctggcccatcggaggatgcgcacagtcaccaactacttcatcgtcaatctggcgctggctgacctctgcatggctgccttcaatgccgccttcaactttgtctatgccagccacaacatctggtactttggccgtgccttctgctacttccagaacctcttccccatcacagccatgtttgtcagcatctactccatgaccgccattgctgccgacaggcaagagggtccttggggaagctggggggagcctccccactgagccggggctcagataagggtggtgacatgcctgtgattacacagcaagtttgggtagaaccatgggaatggcttcccaaatctggtcatggtccaaaactatgaatctggaaggcagggggactgtggagctgaagaaggtagactgagggttagacacagagaaggactttgcactagatgcactagacaggttgttcaagtctgtaggggaagtgggcaatgttttagcgaccttctgaagtgttctttcctggagttgatctttgttttgttgtctttatttcactccaaagatatgtcttatacagttttttttttattattccggatagattacacgaggggaaaatgttaagtttgcttgcagttacaatctaatagggccaattattttcccaacgctgctcagggctgagcttcaggctaatgttggatgcttgatcttgccctgagatgggcttccagtgtggctttcttgtggccgtccacgggcatgtccatgcccagagggaaatggtgggccgaggtgcctgggccggggttccaaggcatcagtgtgctgt

SEQ ID NO: 4816 - DNA, 6000 bp, Homo sapiens
cctgaggagccatggtggcatctggctgttggaaagcacacagggcaggtgtagaagacaaaactcactttgggagggcttctgccctgttattacctggccttagacaagtgtcaaacaattgtgctagaaattagctctttgtgctagtagtcaaaactgatatctagtggtttcctgtatatttgggctaactataacgtatcagcatggacttagttgatgtcaaatcttcagatccctttaacgaagcttcctaaaactctaactgctgtccttacttctgtcgtctctgtcttctgttttccacatagtgtcacctattatcatcggcaaagaccatcccctgaagttcctactgagagacaggactagctggatttcctgggccgactaagaattcctaagcctagctggggaaggtgaacgcacccacctttaaacatggggcttataactcagctcacacccgacccatcaggtagtaaagagggctcactaaaataccaattaggctaaaagcaggaggtaaagaaatagtcaaatcatctattgcctgagcgcacagggggagggacaatgatcgggatataaacccaggcattcgaactggcagtggcaaccccctttgggtcccctcccattgtatgggagctctgttttcactctattaaatcttgcaactgcacactcttctggtctgtgtttgttccagctcgagctgagctttcactcgccgtccaccactgctgattgccgtcgtcgcagacccgcctctgacttccacccctctggatgcagcagggtgtccgctgcgcttctgatccagtgaggcgcccattgctgttccggttctcaccattgttcctgtgcggctaagtgcctgggtttgtcctaatcgagctgaacactagttgctgggctccatggttctcttccgtgacccacggcttctaatagagctataacactcactgcatggcccaaggttccattccttggaatccgtgaggccaaaaaccccaggtcagagagcaagaagcttgccgccgtcttgcttgggagtggcccaccaccatcttgggagctctgggagcaaagacccaccagtagcactatggcccaaggttttgtttcctatatgggatggaagcaagagacatttggggtaaggcatgaagatctgtttagcttaaacatgataaggtgtgagttgtaactaaattttctagagctttcttaataaaccatggggggaggggttcctgtatttattcaatctcatttgaacctgcttgtattttcagtctttgcaggtacatctgccattcattcataggcagtgaagtatagtagttgagtggtgtggtgccagaatcaggcagatctaagatgaaattccaaccccactgcatactagatgtgccattatggttagtttcttgacttgagagccagttttctcatctgtaaaatgggtataataataattttgaggggactcaaatgagacaatttgtgtgatgtacttagcaatggctggcatgcctaaagccctaagtaaatggtaactatttttattcattcaataaaaaaaaagaaaaagaaaaacacatgtattgggtatctgctgggctcgtggcatgttgtaggtacaaaatgtatcaagacattggccctgtccataaagaatttacagtcagggttggtggaggcagggaagctaaacacttccgtaatttcaaggtagaaattaataaaagacagaaagattatggaagggacaagtctttgagaacagttgtccttgggttgggtcttgtaggatgtgaagaatgtggacaggtagagttgagtggggattaaacaactgacattgtggagaaaagaaataaaccttaagagaggaattagacaggaatggtgaggatatctcagcacccagcaaagtttggcttgtacctaggaagtaaaatggacagaggtgggaagctagaccaaaaaaatgaggacatatcagaaagggagtgcacactggttggaaataccatgcgaaagcatctggccttggttggatgggctattgaagacttttggagaatgggaggaagtaaaatcccatagtttgctgtctactgtatgaagtattacctttccttcatttatcctatttttttttgtttatttatgctctctcaggtttttggagcattcttagtactggacagtctgaacattagcatgatttaatcatgatgtgctggctgggagagggactagccttaactccagtgaggagaagagggaatgaagccctaataggccacattaaatcttcattccctcttcaaaggacagctgttcacttcctttccaccttgcaaatattgataatactaaaatgcttgcccaactttatctggaatttggcaaatgatccactctttcctctggagggtgccccaatattgaaacttcaaatatccatgtttacatgaccttcagttattgacaaagttgtcttcgtattattacttttactattatatatgataattgaccaatataatgatattgaccagaatgatggctctagttaggaggcctaacaacatcccaaatcctttttcactgactttatcgcaatttcctctgcttaagagattttgaaacaaaagagtgcccctgctcttgggtgcataaaaccctgcaggtgaaaatgatgagaaaaattactgggcaaggtattaggcaggcactgattgtatcctatttagagctctgcaattaaaaaagtatatataatactgagactgggtgcagtagctcatgcttgtaatcccagaactttgggagtctgaagcgggaggattgcttgagcctaggagttcagtcagcctgggcaacatggcaaaacctcacctctacaaaaaattaggccaggcgcagtggcttacgtgtgtaattccagcactttgggaggccgaggtgggcggatcacgaggtcaagagatcaagaccatcctggccaacatggtgaaaccccgtctctactaaaaatacaaaatcatctgggcatggtggcacgtgcctgtagtcacagctactcgggaggctgaggcaggagaatcgcttgaacctgggaggcagaggttgcagtgagctgagatcacaccactgcactccagcctggcgacagagcaagactccgcctcaaaagaaacaaataaacaaaaattagtcaggcatggtggtgtgcacccgtagttccagctacttgagaggctgagaggtgggaggatggctttggcctgggaggttgaggctgcagtgagccatgattgtgccactgcactccagcctgggtgacagagtgagatcttgtcctaacatatacatgtatatatacacacacactggttttagctaaattgattataactcagggaccgtgagcttaggatggacagaggtgcataacattgattacttttgttccaatattgacttttttctatatgagtgattcatttaaatttggagggtggaataaattgatattagtttccagtctaactggaatatctgcagccagaggacaaagtacaaggacttatcagagaggagacaatgaagctccatgctctggaaaaaggaaacaagaggctgagggaatgagatagcttctaaggagggagcttacaaaggcccctcctcccctggctcttgccccgtgggccaggctaatttgcatttcaatgaggacttaatactactgaagattttatgaaacgcctaagcttctcaaatgtttgttacttttgttaccctagctgaaatctgcaattaccagtatttttaaaaaatcctaaaatgaagagaagaggcctgtgggtgttcagtcaaggagggaggggtcaagtctcagtccaggaactactctgtgctgggagaagcagccagatacggcacaggtcgcggtagccgagaaagaaagcgagagaaagggtgagccggggagtcgctgggccagactgaagtgtgcctgtgtagaataactggcaggagagctgcattttctgaccccgggaggtaaaagacgacgccgtccttggcactgagtgcggtgaccaccaagaggagcaaaagtcatgagtctccgacccccaggcccccggctcagctgcctccactccaccctactcttctcagccccagcccagaaagcaggcagcgaggcaggtctttgaaccggaccaggttccttccccaaacacccggatccagagaggggcaggaattccctagtcattttcccctgctcctccccacatcatccgcccgaggggcggcagatccagcggaagctgtccgtggtgctgactcctgcctttggcttggccggacccgctgcccgctgagcgcgctgcagccaagcagggggctcgtgtggcggggccacgggagggtgagggtcctcaggtccgcgaccagctccaggctctgctgttaaatcccagcccgagccctctagcgtctctgccctccgcaacctggccgctaggcaggatccagcctttaagaacgggtcagtcgtgcctctctcaagcccccagctgcattgcaatctcccaccgctacttccttccccgctccttccctcctaagactgcaccggctcctcccgatagcctgacgcttcgcgcctctcctccgccctcctccactgtgcgctcctccggaccctgaccctccaggggccgtgcaagctcctgcagtagagattcgtcctcttcgctgctctggccaggtttgccggcccctcctcccgtttcggattccatcctccccacactgtcctcttcactagttctctaagcaccgagcatggcagagcgcgctccacccctattttccatacatgggagctggagtggggggcggagctgaggggaggcgctcccagtccctctaagaagctgctagcccactgggaaacatttggatccgttcagctcccgcggagaagcgagaccggatcaccgacgtgggcagaggactaccgagggccagcagaaattctgccccttcttcccgcgagtgctttcccgctctccaaaccccactcccaggtaggatcgcgctcctgagtctgcctgcgtggactgcgaggaccgtaaatagaggcggaagcgtttaaataaaccgtatgttctaaccgtgcttaggtttattttacagaggtgagaggacaacactttttgctacttttgctgttgttctgtggccggttattcccaagggaggactcaggcgatgggggaggggcgcggctggtgtaggaggtcggatggagtatggcaagggaagtgacggactttgattacctttgaacaggtggccatggcctcatcgaccactcggggccccagggtttctgacttattttctgggctgccgccggcggtcacaactcccgccaaccagagcgcagaggcctcggcgggcaacgggtcggtggctggcgcggacgctccagccgtcacgcccttccagagcctgcagctggtgcatcagctgaaggggctgatcgtgctgctctacagcgtcgtggtggtcgtggggctggtgggcaactgcctgctggtgctggtgatcgcgcgggtgcgccggctgcacaacgtgacgaacttcctcatcggcaacctggccttgtccgacgtgctcatgtgcaccgcctgcgtgccgctcacgctggcctatgccttcgagccacgcggctgggtgttcggcggcggcctgtgccacctggtcttcttcctgcagccggtcaccgtctatgtgtcggtgttcacgctcaccaccatcgcagtggaccgctacgtcgtgctggtgcacccgctgaggcggcgcatctcgctgcgcctcagcgcctacgctgtgctggccatctgggcgctgtccgcggtgctggcgctgcccgccgccgtgcacacctat

SEQ ID NO: 4817 - DNA, 6000 bp, Homo sapiens
tcaggtcttcttaaatgtcctccctccctccgtcttcctttcttcctttctttctttgtcagatgctgtgtgtggacttgtgctgggatctggaggcggagacaagagctgtgacctagacataggggagtggggaacaaaggtgctcaggcagacaaccaactaggctgctacatctgcctctgcagcagagcatgggagggtggtaggaatttgtcatggcagcagggacatcggagctggggtgcaacagaggagcagccgctttccaggtagtcaagacaggaagcagcatggtccagaaagaagagatgacaggtgccagtctacagcgatggtgagcagaggcctgggggcttggcaggtgggttcgcatcctggatctggctgtttcttagctgagtgactttgggcaagttgctcaaccactgagtgtcactttgcttcatcagcacgatgggaataaaaatgcccacctctcagagctgttgtgatgattaactaaggtagtgtctgcagagtctatgcactacaaacggcagctgccattctagagggaccactgccatgacttcatggggacatttccatggggagccacaggaggttcactggacaggtgtgtatgtccagtgtttaggaggtgctcttgaagcagatctgttactctcaggaggttctctaagcacatatgtgactttgccatgtggggatggggggcagggaattataagctagtgtattcaaaacaggagcagcccttgtaagcaaagctgttccattatagccaagtcatgtgcatctcagctccaaaggagaaagtgaccattctcattgaattctcatcgccacaaccttgggactgcctgagataagacactccacttccagggcccaccctgagttttcactcacaccctggatgcccatctccttccctcaccctggctgacattctcagccacactgccctcccctggtctccaggggctgaatgctcccagcctcagggcttttgccgtggctgtgccatccatctggcctatcgaacccatttgctcacagcatctcaccccctgtaataatttatttccctctttccttgtaccctgtctgtcttctcccccagggctgagagctccagaaggaaccaaggacagggagcctgtcttgtccagctctggtgcccagcaggagagccaggctcataggaggtctgcaagtaatgtttctggacgaacttatgaaaggcaggtctttttatacccatttcatggatgaggaaactgaggcagagagagagagagacaggcagacgcacacacccctagacagagagaaacactcctggagaaagagaaagggagggagagagggagggggagggagggagagagagagagagagagagagagaaagaaagaaagaaagaaagaaagaaagaaagaaagaaagaaagaaagaaagaaagagagagagaaagacagcgcagctccagcctgcctgtatccagggttgaggtgggcgtgagagacacacgcaggcagggctgcagttccgggcaggccttgggggctcaagatgcggctccccagggcgagtgctggggtcccggggcaggcgggcggctggagcgctctcgtgggcgggcgcaaggggcaggctgggcgggcgcaggcgggagcgtagcagccgctccactccgcacgcaggcagcatcggggcagcaggagcaggtgaagcaggcgcggctctgccccgcgcctggtgccccctgggcacaggagtgcggccgggggcggggccgagtgggccccggtacgaaccctccgggaagccgggcgcgctgcctgcccttggcccggggcgcagagcgtcacactggatctggggagcatcctacccccactgtggacctcagtctcctcacctgagacatgggcggccccatccgcaccctgtaagccgcaagccaaggaggtaaggggtgcatctgaggtgtctgggcgctatgggcattaggatatagtagcttttgctgagatttcaggagacaaagcaaagggccttccctattctaaccccactgggagattagcattttgtgtatgattcattaattttcctctgattgactgggaaggcaggctgcagggggtccctgttggggcttgcagctggttctagtttttgtatctggagagctgcctggggacaaaatgcagagacaccattttattgaccttgcgtaataatctaccctccccctcatacactcgccacccccttgggtgtgcctgagggacttgaggtcccctggtcctcactggtcagtgtaccccaagcccagcagccccaggcagatgcccaacaccaccttttcagtgctcctcctcctcctgtcttggccctctctgccaatccattttctatatccaagtgatcttactggaatggacctgaccttgctggtctggcccaccactccagcttcatcatctgccaccctggaacctcttattctgcttacttttcccagcaggctctgctccttcctgcctctgtgcctttgcacatgctgttccttgcacttcgagttccctcctctccctgtccctttggctggttgactcctcttcagcctttgagccctgtaccattgccacctcttctctcacctccctgctccctgctccttctctgatctctcaactcacaggcctctctttcatattggtgttggcaatggcaatgagttccatctgcattcgtgctggtcagcccctctgctctgggagggccatgactgtataagtcatctttgcagcccttgtttctagcccagggcttgacacacacttattgagtgggtgaatgaagcagtgagcattttctggagccctcccagcccagtccttccactctgatcctgctttaggtggttggtttgggatgaatggtgtttctccacaccactggccaagccttgctgatggtcacccagagccttgggttctggcccatttgctgcttctgagtgcagtgcctctgccacaggttcatgcagctgggactgctctttatcttatattgggccctgtgtttggctctggaatagtttattttgccatgttcagccccaaatggccctttttgccagaagaccatagtgctggagaaatcttcctgccttcgagatctggttcctaaataaccagactgtaaactatcaggtgaattcacagcttgatcttttaaatgaccaaatgagactcttttttttttttttttttgagacagagtctcgctctgttgcccaggctggagtgcagtggtgcactctctgctgactgcaacctccgcctcccaggttcaagtgattctcctgcttcagcctcccatgtagctgggactacaggcatgcaccaccacacttggctaatttttgtattttcagcggagacggggtttcaccatgttgaccaggcaggtgttgaagtcctgacctcagaaactcatctttataagtagatcagatgcacagcgagtgacattcatgacagccgacaaatagagtttactgagctctggttgattttggccttgtgctctgcaaaaactgccttaacatagcaattgatcatgtaaaaaatacatatggccatgatatgagacttaaagaatatctcgaatagggttttctgctatagtgttttacaagatggggtccaagggccatgtgcatcagaatcacatagtctacttgttaaatacagattcctggcccccatcctggattcacttaactacatctcctggtggaagggccctgggatctgcactttcaacatgcttctagaatgattctgatgtttactgaaggttgagaactgcaaccctgtgggattaataatgactagagaatctgagaggtgagtcacaatgatgtatgtagtggtatggtgcttcccatgcaaaacatccatcattggcactaacacgggggaactctggagtctaaattccaactcagtcttggcagggggtccgttgtgctgaggaggtcctcggagaagggacagcctgtaccagggcatagagatgtggaagagtctggtgtgcttgtgagctgcacactgcatcaagtgacttgaacatagtcatggagtaggttctgtggagggcactgggcacctgtgactttggccaggtatgtctgtgcacatggtgggtagtaggaagaagctggtgtgctgatgagccaggctttgcatactgggcagtcttcagttttgccaggtatcacctaaaaaacaaggctaccagggcagggaggggctgagaccaggagggtgcactgattgtggatccccgaggctttagctctatcttgaagggaatggggtgccgtggaaggacacaagcaatcctgtgcagagtggcatttattgctgtctccattcagataaaatgtgacaaggggcattctacccatgttccctgaacaattccgtcactaaagtctgcatacagcactccaacttttttatcatcagaacagcctcatcctgaggccggagggaattagtagaacaagttctggcattagatgacctgagtttgtaactgggccctgttactaattagctgtgtgactatgggcaagttgctttccatctcagggtcttagattcctcatctatgaaacggattgataatatctacctctaggaataaactagctaatagacgaaagtgctgagcacagtacccagcatgcaacaagtgcttctaacaaggtagcaatcattggatgccaatgtctcaccatgagccttaggtaatagcccctccagataccagccttgggttggaagcagctgagagcctttctacccggccctgctcctctctggattctaccctgggcatgatccctgagtattgtttgtctgtttgccttgtaggcgtcatccctcaagtgtatcacttagttcaagagtcctggaatcttttcacatccactatgaacacctctcacctcctggccttgctgctcccaaaatctccacaaggtgaaaacagaagcaaacccctgggcaccccatacaacttctctgaacattgccaggattccgtggacgtgatggtcttcatcgtcacttcctacagcattgagactgtcgtgggggtcctgggtaacctctgcctgatgtgtgtgactgtgaggcagaaggagaaagccaacgtgaccaacctgcttatcgccaacctggccttctctgacttcctcatgtgcctcctctgccagccgctgaccgccgtctacaccatcatggactactggatctttggagagaccctctgcaagatgtcggccttcatccagtgcatgtcggtgacggtctccatcctctcgctcgtcctcgtggccctggagaggcatcagctcatcatcaacccaacaggctggaagcccagcatctcacaggcctacctggggattgtgctcatctgggtcattgcctgtgtcctctccctgcccttcctggccaacagcatcctggagaatgtcttccacaagaaccactccaaggctctggagttcctggcggataaggtggtctgtaccgagtcctggccactggctcaccaccgcaccatctacaccaccttcctgctcctcttccagtactgcctcccactgggcttcatcctggtctgttatgcacgcatctaccggcgcctgcagaggcaggggcgcgtgtttcacaagggcacctacagcttgcgagctgggcacatgaagcaggtcaatgtggtgctggtggtgatggtggtggcctttgctgtgctctggctgcctctgcatgtgttcaacagcctggaagactggcaccatgaggccatccccatctgccacgggaacctcatcttcttagtgtgccacttgcttgccatggcctccacctgcgtcaacccattcatctatggctttct

SEQ ID NO: 4818 - DNA, 6000 bp, Homo sapiens
gatagcaacccggcaaggctgcttctcccttagtgcttccttttgcctggtgatgtcagtcactcaccaccttcccaaggccagtggcaggcctgagcccgtccagcacagaggctgctccagagtgtccctggtctccattaccagagatgtggcttgagccagccactgagggctggaaccaacatccccaggctctccctgcatgcctaccacccagaatctctctgtccctcccaccagccttgtgagcctctcaatctccccacccagcatctgtctttctgtcctcatcacctgccatggttcccagggtctgagcctccccatttccccagaggctctcggtcaccgcacattaggcctgtaccagcctgtgcacccatcccctcccctgcatctgtctgcccatcccctggccctaatcagatgtgcggcccctgcagggtggccattgcccagcacctgccctgcctgggggtgctgctgggtgtatcacgccggcacagtcgcccctaccccagctaccgctccacccaccgctccacgctgaccagccacacctccaacctcagctggatctccatacggaggcgccaggagtccctgggctcggagagtgaggtggtaaggatgctgggccctcaccagcttgcgcctggccatcccttcctcaggcagccctggggctctggggaatacataggccctggcagggctgcctctgagactcagggacactgaggacgctggcaccctggcaggaagagcccctcccaacacccccatgaagttcgtaatcctccctgataggcaggggcactagggccagagcggggatggtttgggggttcccaggagcggggccaggattgaacacaggtcttccaactccaggccatccttttccatgctgacactctccctagagccgcagcctgaagagatcagcacatctggctctagatagggctccagagagacaaggcaggagttagcttggagctccttgctcctcagcattaagccccctcctcctgggagacttgaagagctcacgggatgggcatgggccctggagatgggagatgtggctttgagcctcagcttaccatgtgctcactgtgggagcctgggcaggtcacttactccctctgaggctccacgtcctcctctgaaagggaaaagaggcttctcagatcaacgctgtccaggtgtgcccagggatgggtgtcaaccttcctcggggccaggtgtgcccagggatgggtgtcagccctcctcagggcctgcagctctgcttcccctagatgtccccaggaaagctccgtgcgccaccggctcctgttcccaccacacttgggctcctccttaattctacctacagagccctctatgggcctcagcaagactgccgccaactgaccggccagcgatctcctcccactgcccacatccctggggttctcggttgagggactgagagaggagctgtcagaggtccctcctgtaaaccactgtagtgaataacaaggagaaatctaatctgttattggaggcctagaccctcgtgaagaccacccatctattcaaaaatataaatagccactttcttagcaaggtgtgccggtgtgcagatggggagcaaacctgcacacacatacacacaccctaggacaggcatgcacaatttacggggtttatttggtgaccggcaacggtgcaaatggtgtcaggggcctcccgcaatgaatacctgttgggaggatgaaggagggcctggtggggtaagggcaggagcaaagctacggactgtccctctcacctcacagtcactctctcacctccctcagggctggacacacatggaggcagcagctgtgtggggagctgcccagcaagcaaatgggcggtccctctacggtcagggtctggaggacttggaagccaaggcaccccccagaccccagggacacgaagcagagactccagggaaggtgactgggcccggtacctgccaatccacaaaggggtgggggttaggggccagtagcccagggagaggccaggaaagagagacttgttctcatgggcaggggcgatatcctccaggaatcacctgctcccagcacctcccagcttttccttgtctgcctggggttctctgtgactctgagatgctctgagcagggcctgcatatggtctgcacatgtgtgtgtgtgtgtgtgatcatgcaactctgactctgcatggtgctgttggctgtgctgtggcatgataagagtacatgtgtgtgttgatgagggtaggaggtctgcagccgtcagagcatagctcgagcatgtgtgtggccatgtgcccagcacatgctccatcactgtagcacctggcacatgctctgtcactgtaacacccagtgacacgtgactaagcatgccctaatgtgtctgctttaagctgtgcatgtgactgagtgtgggtggtatgtacctctctgtgtgactgcgaggttggacatacctggggaggaaggggctgtaagctgtggatgtgctcaccataaatgccctaagatcaggatgtcacccggaatacttgtggctattaaaagaaggccagctgtcggcccaagtgcctatggaacggaatgttgatggcgattagagaaggccatattctggaacactggaaatgtcgtgtgcacaggctcccaagcagcccttcgccccagctgacagctccccatctgcccctcctgtcacacccacacaacaccctcagctcagctcctgggctctctccagcttccctagctagtccaaggccaaaggcacattcctgcctgcctttcttcctgagtgctgtgcccctgtgcatccaagaacgaaagccctgggctgtacctgcagtcggggagcctcagcctccctcagcattccccccgggggccccgcaccctgtcctggagcccaggcactgtgcatgccataaacgccaggacaaaggcctggcagtgacccccaggctggccaggcactgatgaaagacacagtgcctgtcttggagggataggctcaggggggttgctgggcagccatcaacaatcaccaaacacatgtgataagcgctgccattgaggtgtgagcacgcagggtactgaaagcagaggcaagtccctgaggttccccaggaagatagaggtgaagcagggatctgcaggcagcaggggtggggagtggggggagcactgagctgtccaggatgaggatacagcctgtgtgactgtgcaaacacaggggcacaggggagggagctcaatatgtcctggaacaggatgtctctctgtgaccctgggagcagccagagggaccctggggattggcagtgggggacataggagaagggaagaggaggcggaggtggtaggagcagtgggaaggccccatcagggactggcttaggtgtctccagacctgacctggggacaggaagccctgggagggggttggttagctttgcagggtgaagaccaaagaaggaagtgctgcagggcaggaaagggatgacccatttaaggacagcaggagcgggggtgatgccagagtctccacatgtggaagagaggagcggattggatggtgggggtgaggatgggttcagttgtgaccccgggagtcaagagcccggggagcatcccaggagatgctctgtaggcagcgttaggcgttaccagctcttactctgggatgtggactctgggaaggcccatccctgacccaggacacaacctggcccttccatgcaacctcccccactgctcggtgacccagtgtgtggagggtcatcgggagactgcccccagtgaactgctcctcagctaaacagatgtgtgctgtttgtttgcagaccaaggggctgatccccagccaggaccccaggatgtaggacgcccactggctctccctttcttctgagacacatccagcccccccacgtctccctcatatacacagacccaggattatgctgtgagcctgcaggctttggaagtggccctgtcacccgtgctgcacgggattcacagccccagccccatggcccctctccacacctcaaaactcctgccccataacgtcctccgcatccactttccagctcagcagccgcacccgaggctcagcctgaggggtatgtgcccaggccctcccacttcccgagttgtctgcctctcctcaaatgctgtgtgctgcaattgtccaggcgatgacaatggtgatggctccagagaacacaccagctatttatgagcctctgcccccaggctgggcctgtcactggcataggaaggccagccccgcatctcccactgccaacagctgaagccgagcacagacctccctttgcacgctggaacagttactcacctgtggcttcttcccccagtgtaccgttccactgtggcccacattcttgtgcacgcgggcatttgcaggcacgctctcgcgtagttacctatctgaatgcacaccaagcacatgcgtgcacactctgcgtctgtgattcatttcatgtagtggtctaagctcctcccagggctgtgtggatctgacagggtataggaaaataaaaagcggagaaggtgtcttcagacaaatatggtctctacgtgttggtgctgctatgggagagagaaccagggcctggcctctgatgcctccagcaacttcacttcctctccttcctctgtccccactcttgggactctcactctgaggcccacctcaaactgcaaggagtacagcagagaagggacaaaggccaggctggcctccatccccactcactccccagtgagccattgaactccgcccagaccatgggtaccagctgctctctgactggcttcacatctcccgagggaggcggatggagggaggccggccttcgcctttaagagcactctcctgccacccctccctttccccagaggcgagcttcatcaggcaggagccagaggccagagagacagcgtgcagctccaggtacagcctcccccagctccctggccctgagggtgggtgccttccttctcccacactggttatgccctgctgctgagtcctccccagcctggcaggatggacaaacacccctaggaaagggcataaggctggagttagggatgaatgacatggggctttgcagagagggatagggaatggtatggggaagggatgctggccatggactgctggcctcctgggctgggctgcatgatatagggtgaaggaagtgattaagcagggaaaaggacacaggtcttttcctgacttcttccacttgatagttttgtgactttgggcaagtgacaaaacaaccccgtaatatgggtgatcctaccttgtaccttgcatgtgccaggccccaggagtgaggctagaagctgagaaatgactcacacccaggcctctactgactcctcagggtccaagccagacccctccaagagggccagcaagcagccaacccagttgcctcccctgagcctcagtttctccaaccaaggagccagggtgggccttgatctatctccagaccacataggggcctgaggtctttcttggggaaggggttggcccaaagaccgcactggcagaagtcccaaggtgctgaggcccccatccagaacacactgtctctggggtacaggctgaacatgccacacgtgcttccccctccctgcccctcctggccctgtgtctagcagctgagcaaatggcgtctcctcccttctccctgccccctgccattcctgcgcaaagggcacggggcctggcgtgtggcactggcagctggagctttccatgctgccgtcaagttttccagagcacaaagacaggagagccaggaataactggctgggcccccagagggtctggaggggatgggcctgcctcagacctgctttcagaccctatgccaaggggtgcaggcagagg

SEQ ID NO: 4819 - DNA, 6000 bp, Homo sapiens
tgggtgggtggatggatggatggatggatgagtgggtggatgagtgggtggatgggtgggtggatggatggatggatggatgagtgggtggatgagtgggtggatgggggagggtggatgggtggatagatggtggatggatggagggtggatgggtggatggatgagtgggtggatgggtggatggtggatgggtggagggtggatgggtggatgaatgagtgggtggatgggtggagggtggaggggaggaggggtggaggggtaggtggggaatggatggatggatggatgttggatgaatgagtgggtggatgggtggatggatggatggtggatgggggagggtggatgggtggatggatgggtgggtggatgggggaggatggatggatggatggttggtggatggatggatggatgttggatgaatgagtgggtggatgggtggatggtggatggtggatggtggatgggtggatggatgggtggatgggtggatggtggatgggggagggtggatgggtggatggttggtggatggatggatggatgttggatgaatgagtgggtggatgggtggatgggtggatggtggatggtggatggtggatgggtggatggatgggtggatgggtggatggtggatgggggagggtggatgggtggatggttggtggatggatggatggatgttggatgaatgagtgggtggatgggtggatgggtggatggtggatggtggatgggtggagggtggatgggtggagaggtggaggggtggaggggtggaggggtaggtgggggatggatggatgagtgggtggatgggtggatgggtggatggtggatggtggatgggtggagggtggatgggtggagaggtggaggggtggaggggtggaggggtaggtgggggatggatggatgagtgggtggatgggtgggtgcagggataggtgggtggtggttggcaggcatggacaagaagaggaagaacgaacaaacagatggctggagaatggacagggcaacagagggaaaggaacacaggatggtttcaccttcaaaaaaagaggaaggctggttccaaggagcagcggtccagccttaagcatttatttttccccggaattcattatgcctgtgaatactgacacacggggcggacatttacggatccacatcataaagaagttgttctatagaaattccaaaactggatgaaatattaggaacaaaatcatgttttaagctccccgcaaagaaacattagctgataagtaacaaagaagcagaggagctggaggagggttttccgttccctcctcctggatcagagctcaggccggactctagagggggggactccgcggcagcagctgggctcagaagaccgcactgtgcaggcgcagacgctgggttcagacgccagagcagctcgcttcatggaaaccactgagaaagggaggagaaaactgtgagaacaaatgttttctcagtaactttctcttaaatgaggttaagtatcataaatatacaaattaggttaacaaaacaaatgtgtttgggacttcctcaactactttgtgaaaattattctggttttatgtaaagaaatgaaaggtttagtgctgtttctaaaaatggccattactgaataaggatgcaaaaggcagtgacagaacagtcccgaaatgcctgcggttcccagagcctgcaggagccggtcagcgtgggtgtgtgtgaaagacagacacacacagacaggcagacgcatggacacatgggcacgcggatacacagcgggaggctttgccccacacttcagggtgctgtggcctggtgcgggccagggggtggggactgggccgcttctccccgtcctagcttgggatgtgctgcagtgggaccacctgggagatgctggaccttcctcctgggacagtgaagagcagagctgtgagcccctgcctgcctgccccacccccatccccagcactgtgctggccacagcagcagacacgtgtcatgtgtgctagaaagcctgctcccggagccccctgctcccacccccagccgccttcactcatcaagtgctggccatgaccctgggccaggctcgctcagggacagatggttgggtggagggaggcagcggcatcaagccattggggcagaggccaggggcaccctggtctcctgcacagcctggcaggtggacactggaccttcttggccttcacaaaatggctccacttggccccacgacgctggctgcacctcacaccttggctggctgtgggtttgctctgcaatgggagggctgtgcggcttcttagcccattggctgaaagctgggagaggttccagaatgttctgcaccaaggggcagggcacctgtacctgggcaagtatccagtccaagcatccatggtcacacagacgagaggccccgccctcccctggccacagcatggcgcagcagaagccctgagaactcggctgagagtgagccggcgctggggtgcacgaaggggtctctttgctccgtgggttgtcagctctctgtgtcctgggaacagccacccaggggtctgccccacatcacccgaaggtggctggcaagtgctgaccctgttcagatcacgctggtgtgaggtccccgttggctgccaccaggactggccctgagatgagggttggccccgccatctgcccgggctcccggcacacccggtgctctgggcagctccagtgctcagagaagcctccccctgggtgtgtgggggccaaatcccggcctgtggccccaactgtgcagctgagcctgggccctgagtcccaaatctgccatttccctgagttctctgcagcccctggggctgtcatcactttattcttttaattaactctgcaattacagcctcctgtctctcatgcagaagcagattcgggctctgtggggagacaggagagagctcctctctgtggatgccgcctctcaaacagcacctgcggccggcgtggctgggttttaattattgcaaaaccctttggtggcttttcatctgtttcagaccaaaaccaataaacacattcacttatgtcttgagtgaggccggccccaagggctccgtgtggtcatggcgcacaaggacctttggagaaacctcatcgtgcccttcgctggcccaacccccgcggatcggccgccccgggcctggttccagctcctgccagctgctgtgggaggcctcagaccctgggacccacagctgggaagctggcggggaggccgaggggccgtcagcaggtctcaggcaggcctctggggtgctcacaccaaccctgtcccatgagtgacctcaatggagcgaaggaaggggtgggaaggcggccgacgtttttctagaagcactgggagatgtacttggcgttctgttgtgtttacagaggatgtccatgttttcctggagcagtgtgaggaacctcgcccgcctctgcccagggcaggcgtgggagggcagggggccgtagtgtgcagagccagggggccctggggtgcagagtcaaggggccgtagggtgcagagtcagggggccgtagggtgcagagtcgggggcgtagggtgcagagttagggggctgtaaggtgcagagtcagggggccatagggtgcagagtcagggggcatagggtgcagagtcaggggccctggggtgcagagtcgggggcgcagggtgcagagtcagggggcatagggtgaagagtcagggggccctggggtgcagagtcgggggcgcagggtgcagagtcagggggccatactgcagagtcagggaccgtagggtgcagagactgggggccatagggtgcagagtcagggggcccgggggtgcagagtcagggggcgtagggtgcagagtcagggggccctggggtgcagtcagggggcatagggtgcagagtcagggggccacagggtgcagagtcagggggccctggggtgcagagtcagggggccatggggtacagagtcggggggacctgggttgcagagtcggggggccctgggttgcagagtcagggggcagaggtgaagccacgccctgggatgtttgacctccctgtgccgaggaggtctccccgcagccccaggctcctctccaccagcagctcaccctgcactggggaatctttgagagcacagcttttcttcttctagagacaggatctcaccctctcacccaggctgagtgcagtggggcgatcacagctcactgcagcctcaacctcctgggctcaagagatcctcctacctcagcctccggagtagctgctaatagaggtagacacgaccacgcctggcgaatctttccatcttttattatgtaaacatggcgtcttgctatgttgcccaggctggcctagaactcctggactcaagtgatcctcccacctctgcctcccacagtgccgggatcacaggtgtgaggccctgcgcccgaccagaagctctgttctgacctcatttctctctctatctctgcccgctggcctttgaggctcggaggagctggccctgaggccctcaccactcactgactcgctggcgttcctcgtcactctgccctgggcccttcccacgacttctctcctctcctcttggttcctattcatctttcaaagccgcctcctccaggacaccctgcctgcttgctcctcccttcctttgcctcaggcgagtgcctgtccctggtgacttgagccacagctatttctgtgcctgtctctcctctggggccgcccacccggctcacatcctccgtgggacttcgcccatccgcacaggccagtcacctagtcacctattaggaggcccaaggagcaatttcagagatcaactcctccattgttctgcaatctcggatctgagtgaagacaccccagcctctaaggggggcgcagtggacccaggaaggggcacctgcccggcagatgcgaggccacgggaaccactcgcggctgaaatccagatgtgcttctctgggcaacgtccatcaccaccaggcacagatggcgcacggtgcacactgccgagggggccggacaccacagtcaccagacagccggggcccaaccgctgggggccacacccggggcagatggacgtaccggcccatcgaggccctcatcaacgtcagctttcccggagcaaaggtgctgctgggatctgtggcagcttcccccaggacccaagccccaaagcctgcgtgcagaggcccttccgaggtgaactcacaccaagaagcctcgcagccagggaggagagagcacaggagctggggggcttccagcacagagctgaaccctgtccctcctgctctccctccctctctccctccctccctttctctctgcctccctccctttctctctgcctccctccctttctctctccctccctccttttctctcttcctccctccctctccctccctctctccctctccctccctctctccctctctccctccttccctctctcccttcttccctccctccctccctccctttctcccctcctcgggcctccccactgttctgttgctcccccagggtcagactcagtcgcctgtggccccccagcctcacacaccctgagccctcagtagatgtcatgaaccagtgactttaaaatgaaccaactgactctcaccccaggggccaggcacagcggattccttagcctggctactgctattgctcagggtcactggctggctgtggctgagagtgtccagccacacactccttccccaggatgtggcctcccagctgggggtctaagggggctctggatcactggcagagggagggcagccctgggggcctcgggaagctgtggggtggagcacagggcagggcgatgcaggcctggccccagccctggagaaggagggactccacagctgctctctgggcagcagatgcccct

SEQ ID NO: 4820 - DNA, 6000 bp, Homo sapiens
ccacctacttatctccattccctctgacaccctcgagtccaggccctggattcctgcaccagtctcctaattcatgtgctccctggttggcagggaagctagagtgatgttgggaatgaaaccagggtcgctcctctctcctgcttaagcccttcaaagcttctctatctccgtaacatgaagttcaaactctttgcattgcttccactgccctctgtgatcatgtttctccagccccttctgcccctgcccttgtaaccccagccacattgaattacttgccccaggccttcctacctccagcccttcacacaagctattctgtgaggaaccactctctgccatttcagttagataactcccacttgatctttaggcctctcaatttgggaagcactttctctccccaatttccctgactcactatgtctggcttaggctgcattttttcttcctatgctaactctgattaactgccggggcggggagggggtgggcatctgcctggaatgctagtttgagaaggttttcggggcccaggttagtgggaaagagagctgtgaatggttaaaggtatttgccatggaaggaggagtgggtgcgtgcagcctaacctttgccatccttgatgtaatacttcctatcctctaggtcaagcccactctctccccatgcaatcctctgactgcttctgctctcactgatttcaccttctccaaatgtgtttacataaattagagtcacatgacttagccccgaattgttccataattgcattaggcattatttttgtctcctggtctagactagaagctgtgagaaagcagaaactttttactgtcatccttaatcttctctgacacaactggaaaacaggtgctggtgcgtgagtgcatagctgcttgcaacctttggcttttgatccccactacgctgtagatagccacttgttcttaaatctacgctccttcctgcagcctcgaagcccctgtgcttttgtgctgcctttctgggctcacctcctgtcgcttgccccatctggaactctgctgttgcctgcctgtgccctgccggaacttctcatggctccctccttcacatcgttcaagtctcaattcaaatgtcaccttctcaaagactctttcctgaccacccgcctactcctttgtggctctctagaaccttaccctgctttatatcctttaaatcacactctcacttcctaaaattatttattgatgtgcttccttttttcttattctctgtctttccctatcaccctgcctccccaaataagcttcccgaaggccgtgtttactttgccttgttctcactgtatcctcaagccaggcactgttgctgagtggatggatggatgaatgagtgaatgaatgaatgaatgcctaatgaatggactgtctgcttttgaaattgatccagtaggagaaccctttacctagacgtgcattttctaggcctttgaaatgatggcctttagctctgcaaattcaggagaattgtagatggactcttgctttttgggagaaagctgtgtttattggaaagagaaaaataaataagagaaatgaaatgactgctgaatttctgtgtggaatggtgtgtctgaaaggcaaaggaggcatcttcttgctccccagcctctcagcctcctggaaagagaagaggccatgagaggactgcttctggtggccatatttgttgaaacaatgggccatgtttcacagctgactcaccagaaaggaacaaacaccctctttctatccggctcttagccttggacttgagaatcccctgaagaatgttaagggggtttaatgtttctcagcagaaactgcttttagagaaaggaaacaaggagggaagcattttattgttttccttttggtcttaacaaacaaggcctgttcagtagaatttcttttttctttctttctttctctcttctttctttttttctttcttccttccttcctccttccttccctccttctttccctcccttcctctttctttcttttcttttcttttcctttttctttctttctttctctttcttttttctttctttcttttctccctctctttcttttctttttcttcctttcttccttccttttcctccctccctccatccttccctccctccctctctctttctttctttcctctttttctttatctctttctttcttctctctctctttttttggtgtgatttttattccccaaattctgtttttcagtttatgcttggaagacttcatttcctccaagtccaggtggaaagctacataggccacgattgttatttgtttttaatattttttgctgtgatcaatttggaaaataccaaaaagcagagaaagaaaatgaaagcaatctattaatatattcccagcattcagaggcaacgctctaggcttttgctactctctgaaaattgggaatgcattgtatacactgcttttccatttgacaatataccataatgagtcatgaacgttcttgtgaaattttttttttgctttcttattatacaacaatgcacttttgttatggcaaattaaaaaaaaacaaaagaacaaaactagatagcacagagaaataaattaaaaaaagtataattccaccactgagagataatcactacaaaatttttacccaactattccttaaaaatatattcttaaaaacataattatatctaaaaacctaatttaaaaaaggcaagtagagccaagttgtacattcagtggggcagaaaaatagctttttataatgtaaaatcaagtaaatttcatataccgcgtgattattatgtgataaatacatggcaaattctattggtccagtgaaacctatttaaatcgccttctcccttgccttcctttactatggagcctgcaaagtaaaaaatacccagttcctttgcagttgggagtggccatgtgatttgttctggtcaatgagatgaaagtagatttctgagaaaggcttctttttgcaaataaaaaggcagtcatttacaaaagagaagacttttgtcctttgtatttctctcatttttcctattgcaatgtggacatgacacctggaatgctgcagccattttgaaaacatgaggacaaaatctacaagcagaggacaatatagaaagaaaatagtagaaattattgattattttcatggcaacttctccagctatgagcagtctaactctggaattcttgatgagtaagaaaaatgtctcatacttggttacgccattatttgtgcattttctgttacttgcggctgaatactctccaaactattttgtgatggcatgacattttatcaaatctagcatcattcatgtctgtcctgtatctctccatgctccatgccaaattgtcaactgtcaaattagaacttgggagggtcctgttcacaataatatgcctaatccagcaagttacatatttcagatatttatttcagtggaagttcatatctggctgagtttccactcccttattttttattttattttatttatttatttttgagacacagtctcattctgtcactctggctggagtgcagaggcacaatctcagctcactgtaacctctgcctcccggttcaagcaattcttgtgcctcagcctcccaagtagctgggactacagatgctcaccaccacggacagctacttttttgtattttttggtagagatgaggtttcaacatgttggccaggctggtcttgaattcctggcctcaagtgatttgcctgcctcagcctcccaaagtgctgggattacaggtgtgagccctgtgcccggccttattttatttttttgagacagggtcttactctttcacccaggctggagtgcagtggtgccatcatgtgtcactgcagcctcaaatgcctgggcttaagtgatctttctaccttctgagtagctgggactacaagtgcatgccaccatgcctggctaatttgtcttttctttaggaatgaggtcttgctatgttgcccaggctggtttcaaactcctggcctcaagcaatcctcctgccttggcctcccaaagtgctgggattacagatatgagccaccatgcccaggtcactcctttatttttatgtaggttgcaaaacttttctgtcctcaaaccctgatgagtgaccaactcaccatctccaagtcaaggattgagctttatacatctgtgtatcaacccacagcccagtgccttgtgaatggtggatactcaataaacattcgtaattgaattgtttgattttaactttctgatatcttggttacagaatatgtaagtctttttgagattattgatttagacatctttacagaatccacaaacaaaaaatgttgtttgtttatcaaaatgctaagcagagctattaaaatgatactatcatattcttttgtttaaagaatagtttttagcttcctgtcatccatcagttaattattatcactagcaacctatctcaggctggtggtgagataacacatttggaagaaagattgtgtttagaaagaccttgaaatgattagtgaggaaactatgattctattcatgttgtcttgtcgtgattgcaagtgggatgtggtcaattagtcgagctatgctttatgcatccagacccttataattgaggagctggcattcttgcctgtctgggcaggcaattgctcagcagggagcctcatggccagacaggcaagagggaagagggcaatgtggttgctcaatgagcctttagaacaaattgatccggactgtttgtggttccaaaagccacccagtacttgctatgtggttttccttgtggacaattgggcaatgggagggggtggggacaggaaaccttaacctctgcctagccactcacagcaagatgagaggcaactgctcagtgcgtgtcttcagctcatgccctctttcgcctgtcttggcccatcttcttcagggatgggaaccagcatgatgagggagaagttactcaaggggccgtcttcttggcttcagccctgtggaaggcctagtgggctttggacctcacagccaatcaggtgagtcacttgagcaactgaagaaccaagacagcttatggctgggctccaggatggggaggtcccaggagagggcagagcaggagagaaggctctaaggttaattggaaagaacagaacagtgaaaacccctgagctctttcatgctcctttatcccccaaactattttgcctaaatcaaaggtcaggtgtaatggaccctcctttgtggaaagatcacattaactgtcataagtcattttctaaactgaggtatcaggacagggtccacaggaagtaaaggaggaagatgctgtgttgattagaaaagatcatagatgtctttatgtagtgagccttagaggttgctgaggctagcaattgccctttactgaaatggaaacagcttagagaacgagagtggcatgcctgaggggtcacggtgttgggagaaaagctgaatgttgggagagaagctgaggcagggcttgcgtgtctgacataatgtaaaagagtcttggaacatgtccggggtccagggtctaaaacccctcgtggcctttggaacaccaagctctgtgctaaagggtggaagtctgccctgctgcactataatctaagcccagggcataaaacccctcatggcttggatggaatccagggctcagggcataaaacccctcgtggcctctggaatgtgtctagacttgctgactccttgcttctagcactcttactatctcaagtagcagaacacgttccatatgcttcaaagaaaatgctaaaccatcacagctgcagctcagtcgcttgatgcatcactttctctcaaccctcacaacctcaccacctgtttctctgtttgatcaccaataaatagcatgggctcccagagctcggggtctttgc

SEQ ID NO: 4821 - DNA, 6000 bp, Homo sapiens; identical to SEQ ID NO: 1573

SEQ ID NO: 4822 - DNA, 6000 bp, Homo sapiens; identical to SEQ ID NO: 553

SEQ ID NO: 4823 - DNA, 6000 bp, Homo sapiens
gttttacagactagaagtagaacatgtgaagtttttttatgtttagaaatgagtggataaatcattggtgttagaaacccagaactagtagaaaacaagatggtgaaaggcatttccaactaaataagctaattcatatcctgagaacacatatattgcatgcttgtaatacaatcaatacatattaacaaaaagtcattagatgcaagagaagaaaatgccttcaccactttgtaccaacatttccacagattgcaggaatcattaacagttttcaaattccaggtcgaactgtgaaatacgcatgatacaaaagagagctaaagctcggtacttacaggaatgtagacattctattatggttgtggcatcaatgaagtaccctccacaaagcacacacatcaggtggggatttagctcagtgatcttgattctcgttgttcgatgcatttctgcttgataaaaaatcctgcaagacacagaaataatggccataattcacagaacaagaatggagatcatctagtaatcacaaaccctgaaacactgaatttataaaactcatttaacactgtacagctgggctgtcctaacgtttctacagaaggaatttactcatcagatcggaatcagttctaccaaactgatgcaaaaggatccaactaacattacttctggtctctcagatcattcctgtaggtagaagaaagtctggggtgggggctgggagctgagcgtattagggtctctttcttccatttgtcctccagcccagcagccccaaggctgctgcagacgccacacaatccccgcggatatttaccaaccactagggcttgttccaggtctccgaatttattataaaacttcctcaagaatctgcaagtgaaaatccggggttccggttgttttagacggttccagcaagcagaacctggcacgtttttacgcgacgcgcagggaaaacaattctgccctccctgcatccctggcatttccggagccgggtgctggggccgcaggaggagcacctccagtcggcctgggccggggcctgagcgcggcggacgcccgggggccgggatgcgaggggcggatccggcggcgcccggggctccgtctcgctccggattcggaactcgcctcggtcggggtttccatagcaacttacacttacacttggcatccggccaccgctgcaactccgcgcggagcccggcccgagccccgagcctcggcgggcgtgcggggcggcgggcgggcgggcgggcgggggaggggcggcgcgccgcgggggcggggccggcgcgggggcggggtgggtgcggcgacgccgggggggcggggcagccccacgaggccacagcgctggggagcggggagcggggatcggggaccagggacccagtcctgggcggcggggaccccggagcctgcggcagcgcccgcgaaaggaaaatgcaaaccgcactcccggccatttcggacactccgggggcctcttttcacgtcgacttggtgcgcagagctggtttcagatctcgactctctcggtctgtcctgtctgcaatcactcggtcagaaatttcacgaagggattttttgagaattgccaactgtgcacttagcccgaaaccgtcagggctcaaattgcagagatgtttattgaaccgaacctctttaaaacttccttctctaatgtgacgctctcctgtagattaaatgagcgatacaaagttttggaaaggctgaaaactgaaatctgttttacaagaagaggagagggcaaagcccagtgttttatttggacaaactatgctgggggcaagaaaaagtactttaatcggtacaatagtgacaatatgtacagaaccatgtgaccagcccatttccaacgctaaatcaacagcttgtcaacccaaagcagcgacaggagagaaaaacaaatgtaaaaccccccatacgatgaaatgatattcccaacagatacctctattacaggaaagtcacaatggggaactgtcagcaacaatacaccagccgacagtcagggaagtcaaatacttcgtgtagtattcttgaaaaataaacttcaaccccccttcttcattcatttcagaacctgatataagactaagcttccagacctcactgaagtacattctcaaatcttccttgaatggaaatccaggaccttttgaaacttgcagtaagatatacctgcggttttaattcctaaggtgtattaatgcagtaaagggaaacaccaatcaacacagctcaatggctgaaattaagagctaacctctagaaaatggtaaaaaacaaaacaaagcctctcttatgaaagtgaccacagtggcaactggcgacctctaccagaaaacttcttgtgtgactgactcctcagttatctctggattacttgttttggagaatattgtcaacatattaacataaatctaagcggggcacggaggagttgtaggtagagcaatgaccctaaagagtagcaatatttaaatcaaattatacttggtaaattaaagaacagccttcttggtgcttaaagaaaattctccttgtgaaaccacaggatctttcctagaaagatagcaagctgatatttctgtttgcctgtgaaagcatactgcactaaaaaaccaccgatcacgaagttcatgaaggggctccaataaaaatagctgcctttatttctcctctagcttgcagaaaaccaacaccacacaaagacaagtattaacaaggagaacaatcaaacctcagtggagggttatctaccggttggctttgagcatttaagtcacatgtacttgaccaaaagtctttcaaattcatcttaagtcttaattcacacaattcctctacctcagttcagaagaatttggccacaatcctgtgaccatttataatgctaataaataccactgttacttatataaaaatcagttatgtttttatgccctttgaaagtagtggcaacctaatgaagacttccaaagtgtttgacgtgcttgataagatttgagaaacaatctcttccacctcagaagtgaaaaccttccaggttccaacccagaaactgccagttaagcaaacaaaaatgcaccaaacatatcatggtaaaaatactcaaccgttaaaacttgccattgtaacacactcagttggggctgtcagtttttaggtggaggcctaacaccaggaatgtcaaaatgaaggaaaacagaagcaagttcttatgttaaccatcagcttgcctactgcaatctaagaaatgcaaatgaactccatagccccagttggggttcacagcccaacataagcatgggtaaagttggggttaatttgactcctggggagaaagcctatctgcacacttaacatacatccaagaagttagtgatagagtattaatggatttatcatgtacaattaaatgcttaattttcttacaaaagctttatgtgtatacatgcatacaaagtgacttgtatatggctttaaagatattttactaggcataagactcacacaagtaggttatttcaaacacttctgactacactttggggtagatgtatggaattaactcaaatctaaaaacttataattttgtttataaaatcaatcccagggatttctgatcggtctacttaaaactcaaatgttaacatatagagtctcataacttgttatatactgtcaataatttgcatccttaaatatcaactgtttagtgtagcttataatgtgtttccagaacatgggagttaaggttcctataaaatataggttgaactactcataacgttgtacacaccaccaacctacacttgcatttggataaatatgctcggaattttgcccacattaagggaaggggttaatacatgcttctctttcatatattgaaccgtgaccactaagcccactaaatccttttattgcaagtggtaatgatcaaagtctctctacttgtttacttccaattattaactgtaaatctctgggaaaaagatcatgccatatcactgtcaagcccaagtgactgcgtaaacatatgcaatcaactttttagtgctcttttctaaagcatccctttgccaaatgacctatgctgacatttagcaaaacctgtaaaagatagtggactggagtcatgatgctgagtgcatcctttagtagaagtcgagagaaaagttgcagtctccaaaaggggaaaaaagaaaaaggagaaaaagaagtagtgagaaagcaagcctccagcaaagctaacgtccagtcaccatcttcactccacaaaaagctccaaatttgaaatgcccacttcccagggagcacctcccaagcgatgttcagagcacttatccaagactcccaacacacaccaccttgaaaacttcagcattttaaacacaaatgcaggagaccttggaaacaactgggaaccgccatcttaccagccatccaatctcagacaagtgtccccccaacttaagttaataacattttcgtcggggctctctccagcctaacacccaccttggcgggatggccgccccccacgcaacccgtccctataaaatgggggcgttctctggctgctggagcccctccagagccctttcttcgggagaggagggaagccacttgacccaagcagctcccgatttcaggaacccgtccccgtttcatccaaatctacctctcaacaaagggcgctgcggccgggagagccgccgaggctggaaataccagtactcctctcgggggccatgtgcgtcgcgagggtgcggaggggcgcccgggggagcggggaactaaaacgtggggccgcgcgcggcgcgccggggctgagcgggcggcggcggctggagcggcgccgagccctgctggcggcggcggcgcggcgcgggctgcgggtcggtcccggcgccgcgggagtcggcgggcggcggcgggcgcgcgctcgcgggcgcggggagggcggcgcgcggggccggcaggcgcggggcgggcggcgcggggcgcggggccgggcgcccacgctgtcagcgccctcccggcggcgcggccggggcgcggggggggctccccttccacccgcggccgccccgagccccgcgcggcccccgccggcccccagccccgtcccgggggcgcctcgcctcctacgtacccggaaagagcagccggcgcgaggcgatcgaagcgggcggaaaagacaatgaaagttaaaagtcgttcagcagaaaatgaatgcgagccaagcggccatcttgaagcgagctgcagacgccgctgtcaatgggcaaccagcgcggccccgagcagccgcggccgccacgctcgtctcatgccgcctccggccggcctcctcctgctccggcgcctcggcctcctccggcgcctcggcctcctcctcctccgcctccgcctcgacctccaacgcctcctcctccggggcctcctcctcctcctcctcggccgccgccgcctcctcccgctccgcactcgggggagggcgcgcgcggagggggcgcgatcggttttattctgcggggctgggaggtgctgctaagccggaacggggctcccgcgcccacatccccattgtctcgccccgatctctgcctctcatactacgattatttcatagttgctgtgggggaggcgggcgggcggggggcgccgtgtgtgtgcgtgcgagcggggggaggggaggagggggaggggagggtggaaaaaaatgcaccgctgaaggcagagtggaaactgacaccggctccaaaatggctcggagtccgcccgccccctccccccgccgcccccccagcgggtcacgtgctcccctcattccttaagggcggcctgggaattagtgtcggtgtagtcaggcccgtggccgccccctcccctccgcgccgcgcgcccggccccctccctcgctccgcgccgcggcggcggagacatttc

SEQ ID NO: 4824 - DNA, 6000 bp, Homo sapiens
tcactttcaatttgtcatggtgttttaaatttgctagttaataccattctaagtaaagtcaaaattttaaattattagcatgacttttaccattcctttttatattgtgcaatgccagttttaactggaaatatccgaatattgaacatgcatgtggaattatcaaagcggcacactgtatttcacggttctctcaggaggataccttgacctggccggaagagacaagctgggctccggaaggttgaaagaaggaagagagggtcctctcaggcatggagatgaccccatggagtgctccctagacatgagggttctcctgggggagtgcagacccccacaggcaccctggtgacttggggaacacacaaacacttgaacccatcttctggctccctttcctgtgagctgctgggcccacatgttgtgctccaggcctagggcaggaggttgagccaggcatcctcccacaggcccctgccccaacccatagcagatgggcagcccccggggcactacaaattttgtaccaggacacacgaggtactggatctggggggggctagaggctcacccccgcagagtcccacatgaaatgtgccctgggctgccagtgcaggatggggactgctgccaccatgccccactctgagatgctgtggggtgtgcttgtccccctcccccacagggtgtgcctgtgcccaggttgggggcaggttggcagtggttgctgggtgggaggcagggaggtagaaggtgagtggagctggagctggagctgtgggggcagaggagcaagcagctgagaagcagatcctggacgcagggagatgggaggctccatgctcccagttcacattccactgtcccattggacttcacttacaaaacacagtgacaaagataaaattattaagaatttgaagacagtgactgcagagccttatttcccaagcgtggggcccttctgggcacaaagccctgtgtagctctactggtcacacacctgtgacaccagccctgcatcctggaccacttagaagctcagcttaccaagtctcgtggtcttctagaaggttctacaaaccacagactgccatcttagcctttggctcttactttgttgggaaggttccctttgcactgccatggaaggctgggagctagcagagacctaccttcctgagagattttctagcccagctttcccattttgtggatgaggaaaccgaggtctggagcagggtgtgactggcatataaggccacacatcaggccactggcacagcagggcctagagccccgagacccgaggcccaactcggcatgaaaggtgccagcctctgggaaaagaccagagccccactggtatccgtaccacgctgttcctggctgtggccgcattccagccacagccatctggacccagaagtggtatcagggtttccctccagctctatcacccaggctggagtgcagtggcgcgatctcggctcactgctacttcggcttcccaggttcaagcgattctcctgcctcaccctcttgactagcagggactacaggcacgcgcctccacgcccagctaatttttgtatttttgtagagacagggtttcaccatgttggccaggctggtctcgaactcctgacctcaagtgatctgcctgcctcggcctcccaaagtgctgggattacaggtgtgagccactgtgcccagccgaaaactgagtttttctgtacatgttggtttaataaaaaagtaactggagaactttagcaccaagagtgtgaaggccaatactactgaggaggccccctggctctgtggctgggccacagcccttctgagcctgagggggcgaaagacccagccttgagttgctgggcagtgggtggggatgaggcagagaggatttgaaacaaaagttccaacccctggtgctgtttgaagttccacttcctggtgcagaggaaagacgtctcaccagaggctgaaggcatggaatctactcctggacctgttaccaatttgctaggtgccattaagcaaatcttgtcccctctctgagcccccatttccccatctgaaaatcagcaggtaggccacagtggccccctagggcccacaaagctcaaaagttttataaatctgagctcctggttggctcaccccatcgccaaggtggctagcactgagctcaaggaatgccgatccacacttcctcatttcaaaacgctgctctttccagctctgtgggcttcatctcccctcacaaaggagttcagagaggccgtccagaggcggaacatgcggctgcatttgctgggatgcccaggctcctctgtccctgaatgccatgcacccagacatcaaagtttctctgctgtctgggggaggatggtgcgggaggaggaccaaatcagccacgcgccccaatctggattctacttctattttcccctttccgcatgggggacagagagaggagaagaaggggagagaagcctttgaaaatgtctgctgctccatttcctccccgttcactgctctctgcttagcaattcacctcgccggcgggcccagtgacactcccgtggtgcacctcttagccactcggcaacttttttcccttttatgatattttgggctcctgattgcctgccaagtcaaacctttaacatttaataagcaggaggaaaaaatcctccaagtcggccccgatctaaacagtccccattcctatccctggcctctcctaggccagtcctggaagtagggccagtgctgatggggacctgcccacctgcaggcaagtgtcagccctactcagcctcagcggggctcctttgctaatgcagtcatggggattgcaaggaggaatgaacatacagcattgtccacttggagaagattttgcctagtaattcacagtgatggtgcattcatctcagggggcagtgtagaaggtggcagaggcacaggcatcgcaatgtgattttgagaccctgagaatgaccttgcccgggattggagtgagtcaggattctggaaaggaaaatagttttctgacttccagtgctgtgagactaccttctttcttttcttatctatcttcttcaccatgtgtcttcggggcctggaacatagtagatgctcaataaatattgattgaatgaatgaatgaataaatctgcttacacctctcatgcttcaaacagggaaaggctagattatttagaagtcttgtcggggataataatgagctcagtgaagccctctagttctcactcgagtttctccctttctttagaaatgcagtgtagagctctggaagggtgggtgtggatgaatgagagaagatggaaattgagcggagagtctctgacggccacagtgtcccctctgtgccaagacccctggatgtggcagtgtggggaaggtctgctcagggcagaaaagaatcccttttgggtccttccccaaatgccaaattgtacaccacagcggatttggacttccttcagcctcaggagggccagaggagggacacaattttcctgcccccagggttagctgtccaaactccaacccagcctccctgctctttctcgatccttctcagccagggcatggctgtgggacctgtcaggagaccctcaacccattactgctcctttgcagagcccattctcaggctcccatgtttgcctgcatgcagccctaagccagaacgcaatccttagaagaacggggtcctggccagggagtgggttttaaggcaaggctgaaggcagctgatacggggcaacctccagggagctggtcctagggaaccaagcccctctttccttctaacctttctcccaaagaccactcaggctccctcatgtagtgggtctgtcttcccccaaacccaaaatctgcccccaggaaagggtcagacaactcacttagagggatctgtggctggtaggactgaagctgtctagggaaaaatgaatctgcatttttccagtgttccagggcagaaaccacaggacggcctctctaggggtggggtttcaggcatccaccaccgcgagggtgtcactgcgcaggggcctggcatccctcaaagggtcaaggccttgaccacttcctgtgtccagaagaggtgcaaacacggggagggacagtctggtcagaggctcagggagtggggctggcaggctttggtctctgctggtctcccagcctgcggctgatgcacgtctgttgaattttgcaacagtccccatccctcaaggaggtggtgagtcctagccatgttcttggctcctcttttctgatgggatgagacaggggagagtaacgcgaaaatgtggtacaggatgccgaagtgcttgtcagcgctgggggtataatagggcccccacaggtgtcagcccaggatgcctctatggcctgggtccttggcagaacattctggggagaaactggagcgggaggatgtgttcattctcaactctgtggggcctcgtcacgaaaaaacatttctctctaacttaggtgcttaccctggcaaaataagtgaaaaacagcaaagttgcggtaacgaagtggcactgagctggagagggcctgggctcccccaggtattgtcccctcctgaacacacctgggggaggccggggaagtgggagggggagaggaggctgtgctgagcggtgctggtcctgcccccaggaaaagccctggcagctctcggcggagccgggtttgcagccgatcaatacggcttcggagccgctgagctattattcacgccaaagggccttgtttggatgaagggaaggagggggtgcgcgagttcatggaatcacagtccagagctctgcttcctggcgactgccccctctgtgatgtctgagttcttcatgtagcacgagtaacgagcgattccggatgaggaagtgctttccccatggcacactgggagcccaggagctatggccacaggggtgtttgactggggcagggggccctggagagatgcaccctgtctttccccctctttagctcctcctgaagaagggcagtgatgagctcaagggggcctacttgcccttgctatcccctggtgctagaaaaaccctccatccctcacctgtccaccctctgctacccaacccccaacatatcgtgccccatcctgccatcttgcttttgccctgctcgcctctggtaagctggctccttgttactgcgctggaatcccaatagagatgggaactcactctgcactccccgcatctgccctcctccacaacaggacactaaccctggctcagtcactcatttcaggaagtcctggctccagtgacagactcttgctgcctgggcctggctgctctcatccatcttgggtgcaatatttgtggcttcaggagcttttctgagctgtccacgcagtcacctgccctgtttaacaaagactggcatctgggctgagagccacctgactgctgacattatgtggccagcctctggcaggtgccactggtctgagtctgatgggtcacaggcaaagtgaagccaccagaatatctcttgggggctagtttagagttagagagttactgcatagggtgaggttgagtttgagctagtctcaggcagaccctcaaccagggtcactgggagttggactgaggatggctcttcacagagccagccttccttcctttcttccttcctttcttccttttggaaaaatggctcttggtaccttttctgttgaggtgtgaaggccatcccaagggggacagattgtcatgtggctaatttatcctggattgaaatggaggcttgagatcctccaaagcctggcatgtctgctgttcctacgcccatagtaaccaaagaggcttgaggccaggtcccacctggctcgtgcctgccaggcaggtacctcccacgccgtggctcctgcaggaccatctgtccttggatgggtga

SEQ ID NO: 4825 - DNA, 6000 bp, Homo sapiens
tcacaggatcatttaaggtcccttcagatctaactttttatatgtgatagatcatttctgatggtggtcatgagaatccttcctacctcctattttgtacctttttttaaaggtacactttacctaaaagctacaataaaatgcatacattttgacaaatgtatacacttgtatgtatactgccacaatcaaggtacaaaacacttccatcatgccaaaaagctccctcatgcccttttgctggcaatccccatcctctagcctcaggccaccagtgatctgctttctgtcactatagattagtttgccttatctagaatttcatataactagcataatatatatgctcttttgtgtctggcttctttcactcagcctaaccacattctttttgtaatgtgcctgtaccatcctcccatcaagagtagaatctgttttccagctccttgaatccagaatggccctctgacttgctttgaccaacagaatacaatgaaagtaatgctgtgtgattacttctaccccttggtaaaccactgccatgtaaaaatgcctgaggtagactactgaattactgaagaccatgtggagtgagagggaggtacatggaggaggaccaagttccagacttgtggattaggccaacttggatcctccagccccttaagatacccctaatcaagaccacgtggagcagaaaagagccatcctccctgacccccgcctgtattcctaacccaaagaattgtgagtgaataaaatgctcttggtttaagccactaaatttttgggtggcttgtaacaaccaaaactaaaatgatgagtcttctgccctgtcttccttaaggtccaacagaatctctttcgggccctaagactattagctaactatacaggtgttttccctgaaattttttctacttctctctctttccttttcatattcttcctccctcgggtgtcataaattgcatctgaattcttgtaactctgtttcatgaacttgaaaactgcagtgtgtttttcttccatttcactttacagggttaaagagtatcaaatcttttctctcttcccttcagatccagtgttctggcatttgaattacagcatgttctagagaaaaatagagtgtgggagccaagaaccctcattttatacctaatgagctgtaaggttctgggcaagtttgaaagcttcctacacctgactttcttcatgtaatctcatgagctggtggagagagcataaactgcaaaaacagatgagaaagtcagtcaaaagcaaagtactctttatttccacaactcggacaagttttctgcaatgatatttgcgtgccctccgtgtgtcaagttctctgtcacaggcttgaacatgcaaggtaaggtttgcctatcaccaagaaaacaagataaacactatttctgccttatgggcttttgctggaagtgagatctctctcttccactctctctcttgctctctctatgtgtgtgtgtgtgtgtgtgtgttttatgttgctgttctccacaaacgttttgttgtgggctactgtaagactcgttatggtcaggcaaaatctggatgaaacattctcatggaagggtgaaaggtgaggtttatatgaaaaaaaaatgcacagggcctaagacttctagaaactacccctaacaataaaggaattatggtagtcctcttttcccaaatacaattttaaacgtaaaaatcacactaaaccataaaggtaaagaagctcgtttctaattcgcaccttgataattacttcaaagctttgtttgaaatatcaaaatctttctaatttttttctctcatttttttcttgcatgtctttgtttctgttggtgtcttggaacagagaatctcaaaaaatgatccctgaaccagcagcatcagcatcacctgtgaacttgtttgaaatgctaatatgggggctctaccccaaatctactgaatcattaactcagcgggtagggtctagcaatctgtgttttaacaagcctttcaggtgattctgaaacacttaagtttgacaattactgccgaggacagatacttgggctgcctgttgcagtttatcaaactggctgttcattagaatctcctgggaagccttataaaattatcagtgctgggactccaatgccgtagattctaatttatttggtcaggggtaggccaggaaaccagtatttttaaagtctcctaagtgattctagtatgtctaccagcattgagtatcactagcattttaggtaatctggctttgactcctaggcttgagcaacttgggggacagaagggaggagctcagcatgcttcctcggtttaggatgaagaggataggcagggaagtaaggatagttcagaagaatgtttaaacaagtctgaaataagatacatttaaatgtgaaatgtggaaggggaagaattataattaagccatagtcttcagggaacatttgaggcagtgagcattttaggctgagtaacaggaaataagtttagagaaaaccggtgaaagagagtcagagataatacaactgagataaattaggcttgaatattccttatggggctgtgctgtgcactacaatcccataagctaacattatttactcttaaaaaaaatcctgggaaagaacacctctattttttaaaaaaatatgtttaattttgctattctccacattattttttgttgtatattactataaaattggttatggtcaaccaaagtcttgtgaaggaaacagtctcatggaagagtgaaagctgatttgattataatagctaatagtaggatttgtgaagtaattttcacttacacaacactcaactgaagaaaaccagcaagatcatttttaggctttttaaatattacaggcataaaaaataaacttttagaaatggattcattctggttaaaagttttttttaaaaggatctgacttttaaattgtatttcatcatatatttttgacatgttcatatctcagatgagttgagggactgaagaaatgagtttttaaaaaattggtgaataaagggaaccaactagcaaagaaggtggttgtggcaaatgtaaaaataagaagaaagatgtagtgaaaggatgaaagggccctgggagtggaataatatgaaagaggggacttttgtgttttgttcactgctgtatctacagcatctagaacaatgcctggcacatgaaaaatgctcaacaaatacagtgtacttgttgaataaatgacctccaaggatacctccagttttgtgtaccaggatgcgataattactgggtgattgaggaatacactaaatttttaacttttttatttagagctttccagcagtactgacacaggtgttataaactttccctgccaagatgtggccttttcctaacgaaaagttccaaaggaatggagattgagactggagtagtttcttagaggaggtggctactccgatcctcttcactccaaaataaagtgtactcccgctcacttccctcaaaacaaatccaccacttataaatgtgcaacctgtggggccatttttgaaacgtgtaataaataggaggatgtggccaattttcagctgaaacactccccagatatgcctccaagcactgtgtacaccaccatcttgtaggtgttctgaatgtccccaagccccatgttttgctcacgaggcatgccaccctaactccctgctgctggaaatgagaatatgtctgagggtaacagatgaacagtaataaatggcttccattttcttcatacatttttgatgggctgacctcagagaaccaatccctctaatgaagtggaaggcatcctagaagtgagagctcacttgtttcactttcttatttggaaaatggaatgctggcgtgaccccttcttagctattcctaatgtattactgctccaaaacacaaagagcaggttcagagataacttctccttgcatcattcgccttttggttttatgtttgtctcacaataactttagataatgtgccctgtttcttttttttccactgattcagcaagtatttacaaagcccccagaacactgctaggtaccctgctaggctccagggaacaaaaaattccctgctctccaaaaggagataaaaatcaagtgggcagagaagccaataaacgtgtaaaatgcgttatcataccaggaggttataaatgctacaaagagaaataaaacaggagtatgggagatgggcagtaacaaaaagctctaaatccaaactttactacgctgctgtcaaaaaaaaaaaatattctatgctccccccaaccctgttttgttttttgttttgttttgttttgcccttgcagcttgccagctctaacaatagctgccttttaaatagtagtcactctgagggatgagaaattacctaatgggtccaaaggacactatttgggtgggggcagcactgaaagcccagacttcaccactctgcaatacctggaagcaacaaagctgcacttctacctcctgaatctaaaaacaaaactaaaataaacaatagattcttcactgctgactccaagcccctttcttaggttcggtttcctcccgcttctctgaccaggcgcttccatgggctctgcataaaaattcgaagatgatgggatccccaaatcagctagcagccccacagccctcccgccttcctcccctctctccacgcctcccccaggccggcgatgccgtcagggcccgtgtctgaggcgtccggtggattcagcagaacaaacatcataaaaagattatttgcgagaggagaagacgatgctgtgagaacttggtcccagagaccgtctcagagcagcagaaaaaccgcaggaaacctaaggagcacgaccctgacggcgacggagggggtgcgcgcggacagcactgtcacctcccgccgacgccagggctcaaatcggaacgaagactgggcggccacaaatgccggcttctcctttctttcgctgaggcggagaaatcgcccagcggtgcccggcgcgcctcccgcggaaagcgggcggtgaccattccgacaggccgtccgcagcgctccctttccgcagacaaagctgcctcgaaaggcgctccgcggctcccgagtcaccacgttccattcggcagaagaaagcgaaagcggccgctccctgtcaggcagccagacaatagcggcgggcaggccgctccacgccagcatctttgtttccctcgcgccgggaaacgaagtctccggataccacagaaaccagaagccgataccacagaaaccagaggccgctcttcccgctcggacgtttacagcgggcgggagcgtggcggccacctccgtcttggggaagcggcaggttgagccccgcaccttgctgtgccctctagagcgagcggaggaagcaggcgaaaagctgctgcgagatgttgcggccttgcagacgtctcagctcctcccggcacggcggcctggtaaggcgggaagtagcgccggccccgcgcggaaggaaacgtgcagcgcgatgcggcttagcgcggctttatagagccgaggctttatagagccgcgccccggcgacccctgcggtgactgctgtcggtccgcgttgtgtgtgttctctgtttcggcctccgctgcccgctgcggccttgcccctgcgcctcggagtagccgccgcgggcctgtctgctggagcaaggagacccggaggccgtcccaggggcgagggggtagcggccccggcctcttgggccctcggcctcgcgcccaccgagccctctgcccgggtttggttgggtgtggagcttgcgacgcgcccacttcctgggctgtgcttctgcccgagctgatgcctcgccgcgacgccaggccctatcttgacagcgggtgccagcaggtccaggcctactgacgggcggaagtcggcccggtgccccctcacacgc

SEQ ID NO: 4826 - DNA, 6000 bp, Homo sapiens
gccccagccccagactctgctcctcacagtctgggcagaccccactgtggcaggcactggtggttggcttggaaactccagaggttctgccatgcctctgtgccgccctccacgtggggacacacatgaacacacttgcacatgggtgtgggtatgggtgggtatggagcagcgagggcccacagccccacgcccacagagccctgaggctgcacgctgctgcaggcagggcacctgctgtgtcccagagctgcggggccacggctggggggctcaggggtgaatggcagcactattaggcaggcaggcagggtgtcaggtcagttcggacacgggatgtgtgtgtttgtgtatgtggtggggggtgtgcatatgttgtctgtgcatgtgtgttttgtgggtgtggaccatgtgcatggtgggtgtgcatgtatgctgtgggtggtgtcgtgttcgggtgtgtgtgcactgtgtgcttcagtgtgtggtgcatgtgtatgttgtgtgtggtgcggagtgtgtgagttcgggggtgcgtgtgctgtgtgtgtatgttatgtgtgtttgtgtgtggtggatgtgtgtgtatgttgtgtgtggtgtggagtgtgtgggcttgggtgtgtgtgtgtgctgtgtgtgcatgtatgtgttggatgtgtatgtatgttgtgtgtggggtggagcgtaagggtttgggggtgggtgtgtgctgtgtgcatgcgtgtgtggtgtgtagagtgtgagggtttgggagtgtgtctgtgtgtgcgtgcgtgtgtgatgtggtgcagacttgtctcttcagggccctgcgggggaggcttgcgtctgtcagggtggggtggtcttggggtggggcggggctctgggtctgtacagggctcagcagggctgcagtcaagggtgtctggggcaggcgcagtggttcacacccataatcccagcactttgggaggctgaggtgggcagatcacctgaggtcaggagtttgagaccagcctggccaacatggcaaaactccgtctctactaaaaatatgaaactgcctgggcacggtgactcacgcctgtaatcccagcactttgggaggctgaggcaacagatcacttgaggttaggcattcgaaaccagcctggccaatatggtgaaaacttgtctctactaaaaatacaaaaaaaaaaaaaaaaaaattagccaggcgtggtggcaggtgcctgtaatcccagctacttgggaggctgaggcaggagaatcacttgaacctgggaggtggaggtttcaatgagccaagatggcgccactgcagtccctccagcctgggcgacagagcgagacactctgtctcaaaaaaaaaaaaacaaaacttagctgggggtggtggcacacacctgtaatcgcagctactcctgctgaggcagaagaatcagtgtctgggacaccctgcaggcctggattgcagctccacagggacctttgcccgttctctgggtgactcagccatggtgagaggtcaaagggcaggggggatgccccggacagcccggggccgggacctggtctggtctggttcgggggccctgcttctcctcaggacccccagctggttctgatgctgggcaggggctcttgtctgggcactggaccccaatcccactgccgtgctgcctgggccacccctggtgcccacctcccatgacacacagcctgggggcctgggattcgggtcacggtagcccctagaaaggtggtcggtggtgactgccaagcagcctggctgtgggatccccgtgggtcccctctccaggcaaacggctctgggcaccaaagggtccccaagctacccagaagccacctctctacaagggagaaacaccaggagaggaggggcagggagggccctggcttagaggagggggaagaggaggagggcacctccacaggagcggggagaggggtcccccacacaaggagggggaagacagacacccccacagaaggaaggcagcctctgattccagggtccagcgggagcccgggtgcttccctgagctccagatcacagctcccagggtgacaccacctcagggcagcccctggctcctgcgccccagcccctcccctcccccagcccccttccttttgggcagtcacaggcctgctggtttcagcctggcacctcccctttccttgttccgggtgggggtccctgggtgattctccaccaggccaggggaaccaagaggcaagtgcactcggggccacagaggaggtagagcctggtggcagaccccagaccctcagagggcccctccttctccctcccacccgcacactcccctgaaccaggccccctggagcgcagcacagctgggccccctctggctaagggccaggcctccaggtttgggtggggtggggattggggctcagggatggtggcattacctcctcatgtctggggtccgcgtctctgtagagagtgctcagggagctgcagtggctgatcccagtatctggcacccggcccagctcctcctgcccaggcccaggccaattggggctttgttgctgccgcttggggcgtgtcaggacagaggtcggggccagggatcccaccctgggtagctcaggtgactggctctgcagccgcccagcccactcgggcctggatctgagcggggacacccagctgcctgctcagggcctgccacacgactgaggaagaaatttgcctttaaaaacatgcttgttgaccgggcgcggtggctcacacctgtaatcccagcactttgggaggctgaggcaggtggattgcctgaagtcaggggattgagaccagcctggccaacatagtgaaactccgtctctactaaaaataaaaaaaattaagtgggcgtggtggtgggctcctgtcattccagctactcaggaggctgaggcaggagaattgcttgaacctgggaggcggaggttgcagtgagccgagattgcgccactgcagtccagcctgggcaacaaagagcgaaactcagtcaaaaaacaaaacaaaacaaaacaacaccaaaaaaaaaaaacctgcttgtcatgaaggctgaaccgtgctcacaaccaaggcaacttggaagggtgtcgtgggcagctgtccccagctcagctgaagcacttccttcctcaggtgggcgtgacaaatcccccatccagccccagcccacctgcctgtcacacctgcccctgcccaccacctgcggcagggcgggaccagctcagctccaccaccgtggaaccctcacccccaacgccaccaccttccccaccccttccaggcgctccctcctgtccttccttactgggcacaccagcctgaggagtcttgcacgctgtgtggccagggcccgctccacggggcccagtgccctcattgccttttttattttattttttttgagacagtctcactctgtcacccaggctggagtgcagtggcgcgatctcagctcactgcaacctccgcctcctgggttccagtgattctcccgcctcagcctcctgagtagatgggactacaggtgtgcaccaacacgcccagctaatttttgtatatttaatagaaacgaggtttcgccatgttgcccaggctggtctcgaactcctgacctaagtgatccgcctgcctcgggctcccaaagtgctgggattacaggcatgagccactgcgcccggccctgaccaccttctttagccgtccctggcacaccctgtaaaacaaaaacacaattccaatctccgcctgaccccacccgactgatggaccctccctaagcccagggcattccacggttaacctgaaaactagttcaggccataatgggaagtgggggtcagacaggcctcattgtacccgcctccttttggaattcaggcaaaactgaccagcattaacattaaaacagagaccttaagactaatagaacagactctgacaagaaatagtcccttttattgattctatctgcatatacttggtctccacaacaccttatcttaaccctgactttcccttctattgattctaggtctttagataataacttaactcttttgaccaattgtcaattggaaaattactgaatccaccaatgacctggacacccgccgcctttctggaccaaacccatgtacatctcccacgtactgagtgatgtctcgtgtcccgaacatgtatcaaaccagctgcaccccaaccctctcgggccacacatgttctcaggatctcctgggacggcatcatgggccttccgtcactcatatttggctcagaatcactctccaagtattttacagggtttcactcttttcctcgacaacccccagcgggcagctactgttgggggctctgagaccgccggcctgcagggtatggttctcccgaagctgcatgttcagacacaattggaggccgtgcttccaagggggtggagtgagggccctcaagaaaggccaactcaggaatttccaacgtgacccacagcgtctgagctattgaggaggggtcacccgaagaagccgctgggcttgggtgagaacagatgttcctctggccttcttgcctggggctgctcctgaaaccacctttgcgaaaacctgatagtgaatctgacctaaccgactccaccttgcttctaacctccaacctgtccttgttcattcctgggtgtaggtcacaccaactttgggaggatcttagtttatagtttaatgttgaaacaaagatgaaaacagccccttcctgaacaaacccccttcttgcctggggaccagactgcctttgtaaaactaacaaattagtcacaagattagaaattatggtttaggaaacttctagtggcttgaggtatcggccggagcggccgggtggcgggaggaaccgttacgggaactgaagttgccgattaagcctgatcaagatgccaacctcccaaaagcaccgagacttcagggcagagcccatgggggaaaagctagtggggagcctggccaggattggtgaagtcctgggcaagaagctggaggaaaggggctttgacaaggcctatgttgtccttggccagtttctggtgctgaggaaagatgaagacctgttccgggaatggccaaaggactcgtggtgccaacaccaagcagtcccgggacttcggatgccttcgagagcatgcgatgccttcttgtgatgctctccaggaagctctcaatccccagccctcacccagagtttgtagccgagtcgggactcctcccctgtcctctacaaaggagaagattgctattgtcatactcacgtctgacgcactctgggtcttttgggagttttctcccctaaccatttcaacttttttggactctcactcttgcatgtctcccccttcctttttcactttccctggtgacagttaccagctttcctgaatggattcctggccccgtccctcacctccaccctcactttcagtccatttgatactatttggctccttttttggcagaacagtcactgtccttgtaaagttttttagatcaagaaagtcagtggctttcatgaaaaataaaaaagaaattatgttttaggtgtcaggcaggaccgggcgcggtggctcacgcctgtaatcccagcactttgggaggccgaggcaggcggatcacgaggtcaggagatcaagaccatcctggctaacatggtgaaaccccgtctctactaaaaatacaaaaaattagccggacgtggttgcaggcgcctgtagtcccagctattcgggaggctgaggcaggagaatggcctgaacctgggaggcggagcttgcagtgagcagagatcacgccattgcactccagcctgggtgacagagcgagactccgtctcaaaaaaaaaaaaaaaaaaaaaaaaaggagtcaggcagctggaggccacaagattctaagcctccccaattattcttagggaaa

SEQ ID NO: 4827 - DNA, 6000 bp, Homo sapiens
agaaacaacccaaacgtccatcagctgatgaacagatatagacgaaatgtggtacatctatacactggaatatgatttggcaataaaaaggaatgaaatactgatacatgctgcaacatggatgaacctcaagaatattatgctaagtaaaagaagctagacacaaaagaccacatgttgtatgattccatttataagaaatgtccaaaaatggcaaactatggagatagtaagtagactagttgctgcctgaggctaaagttgggaacagggattaactgtaaatgggcataagagatcttactgcaatgataaaaatgttctaaaactataccacgtgatggtggcataactcagtaaccttacgaaaatcaccgaatcatacacttaaacatgggtaaatgttatatgtagattatgcctcaataaagttaataaaaaacaaataggcatctccttctctataaagtccaaggaagtaactcacatgtgtgccgatgttgaccaccaaatgtttttccacttcagggctagcaaggcaaaaccagcagggtcctggaggctgagcttcatgtaaaagaaagccaggtgttactatggtccaagcactacagcatataatcaccccacagaactcagctttgtctgatttttatatcctgaaaagactggtatacaacactgccacaatgggctgagcctgtgctcctcactacgaccccctatgaacattttcaatgaaattaaacttccattagaatttgtaaccaatccacaggtaggtaacccacaagtgcaaaatcacacactgactaaagtagcacataactggcaataggctacaacaaaagaacactgaactgggtgtcaggagccccaattaaagccccagctatgccattagccatgaccctggaaaatttaccctcccaaggtcagcttcttgtgtgaaacaaaaagatgaagaaagagaatctcaatgaaacactcttaaagtccttccttcgagtttgatcattctattattttatgaacccatattggttttggaggctcttcacctcattatgttttacagacacaaaggaaaggtgctttttccatagtacaggaagcgcctcagaacagcctcgaagtcaggccattcttattttattttttttgagacggagtctcgctctgtcgcctagggtggagtacagtggcgcgatctcggctcactgcaagctccgcctcccaggttcatgccattctcctgcctcagcctcctaagtagctgggactacgggcgtctgccaccacgcctggttaattttttctatttttagtacagacggggtttcaccgtgttagccaggatggtctcgatctcctgacctcatgatccgcccacctcggcctcccaaagtgctgggattataggcgtgagccaccgcgcctggcccgttattttatttttttgagacagggccttgctctgtcacccaggttggagtgcagtggtgcaatcttggctcactgcaatctccgcctcctgggttcaagcgattctcatgcctcagcctcctgaggagctgggactacaggtgggtgccaccatgccttgctaattttttgtatttttagtagagacagggtttcaccatgttggccaggctggtctccaactcctggccttaagtgatccacccgcttcggccacccaaagtgctgggattacagttagtgtgaatcagtttccagcattacataattctagataaaaattcataaagctctagtttctgaatctgaagctataaaaagaatatcaactttttttttttttttgagatggagtctcactctgtcacccaggctggagtgcaatggcatcatctcggctcactgcaacctctgcctcctgggttcaagcaattcttccacctcagcctcctgagtggctgggactacaggaccgtgccaccacacctggctaatttttgtatttttagtagagaaggggtttcactatgttggccagactggtctcaaaattctgaacttgtgatccgcctggctcagcctcccaaagtacaggattacaggcatgagcccccacacctggccaagaatatcaacgcttttatcccaatatgggtatataagcaacagaagactgcctttttaggacaaagaaaattgctttaaatggtaattagcaaaaggaactcatcactctcaagtagatgggctaaaaatacagagtccaagaagtatataaaagcatcacccctagagaaccatacctatttatgagacaggaaaagagggagctatcttgtaaaactggctattgctataacaaatgttgacagggatgtggaaaagcagaaaccttcatacattgccagtgggaatataagatggtgcagtcaccacacctggccaaggccatgtttatattttatttttactgttggtcctaatgactcattgcacaattctcccctgccagaagaggctctcttagcaatgctgctttccaaagaaaagccaaaataacagttactgttcatagaagaaacctctggaataaaggtacttacgaggtttgcgaggctgctttggatgaggagaagatttgctatctctacctgtggatgaacgcttccttccctgcttttcatttaaatcaaagaaaaactgacaggctgattcttcctggaatggccaaaagcagaagattaaatgttattcaactaacctttagataagtagccgaccactcacatacaagggaacattcctgccatgccatacctatctttcttctcagtcctttctgcacactctagggaagcaaaatatcttcccagttctgatgcctgaagtctcagtcatacatcaacacttatccaaactactgccaaattcatctctttggaaaaacgagttaaaatgcaagttataaagtaattcttgcctaaagcagaacatgaacccacctaaattctcttttcttttttctctcaacagggacatagtgtagtcatacaatttcacaggtcaaacaagcctaattcagccttaagagatgagaaggctgcttggaaagaaagaaaagtctgagaaagcagaccgtgcatgctagtaagggaacttgacattccttgctttagtggggaaaaaattaatttgagaaaactctgctattaagaaaatttcttcagagtgaatcttattttcctactagcaatcatcataaaatcacaaattacattgctatgaagctgctagagccttgcctaaagagctaagaacagataatcactttagacaaagactttacaaataaaactgtaaccccaaacgtctgaatccagtttggacaaagaaagacctaatgtatcaaactgttaaccccaaactacaataaaaaacactaagcttagctgaaatctactaagattttctaaacatcatcatgatttcccaaggggaaaaaaaagatttagattctaacgattaaacttgtcttatgtactaaactataactaggaaaagaacacatataaaaatgccaaccctcaatcagaacataccacaggggcaagaatttgctttcctatggatgcttcctgcccagattttctgtaagggttttcagtgacatccggaggctgttttaccagttctgctgcatccattagcttcatgggaacaatactgaacgcgtaaagatactttagagaaaaagaacataatgacattaggggaaatactatttacccaactgtaatcaacctattttactgtgaagatttcacagaaaacatgtgaaactcagtaaaattaaaagaacagcaaccagcccatccatagctcagagagtaaacagtaaatcaaatgccaattcagtggcctctgcaggggctcaccaagggttgacaaagaaatgaacaagaaatcaaagcccccaccctcacaaaccaggagttctcactcggataatggaatagtgacaactgtcactacaaggcccagagggacttgctgtataacccttgaagacaaactgcttctgtctctgagtcccttatctttgtgtactctgtccacagaattgtggcactgccatttatttttcctaatgaaaattacaaacgaacttagtgtttctctctctgatattatacaaattctgctatatatgctaataaaattttcttaggagactagcagtaaagcaataaatattcatataaatatttggaatcttgcactaatgccacagatatcgaaaactttagataagatataaatagatgtttaaacttactactgattagggaaatgcaactaagtaacaattatatatcatttatcacattggcaaaaactttaataaaactttgacgtgggctgggggtggcggctcatgcctgcaatcccagcactttgggaggctgaggcgggcgaatcacctgaggtcaggagatagagaccagcccgaccaacatggagaaatcccatctctactaaaaatacaaaagattagccaggcatggtggcacacacctatagttccagctactcaggaggctgaggcaggagaatcgcttgaacatgggaggtggaggttgcagtaagccgagatcgtgccactacactccagcctgggcaatagacagagactccatcttaaacaaacaaacaaaaactttgacttgatccagtgagaaatatggagggggaaaaaaaaaaacactgctggggtaggggtataaattggaacaaagtttttagatgaatttaacaatgcttgccaaattttataatgtgcacaccttttgacgaaagtataagttgcttatggctgaggctaacatgtccctgagaataaaacagactgaaaatactaagtgttattcagtttgaaagggcaattaaaagaaaaattacaaatctacatttgctaagaattgggcaaaaaagctgaaaataggctggggaatttatgtggaggtcagagtggaagcaggtatgaaagggtccagcagaagaaaacatggctgccaaagtgttttgagtccgttggcaagtttggcctggccttagctgttgcaggagacgtggtgaactctgccctatataatgtggatgctgagcaaagagctgtcatctttgaccgattccatggagtacagaacactgtggtacgggaagggactcactttctcattccatgggtacacaaacctattatctttgactgctgttcttgaccatgtaatgtgccagtcatcactgatagcaaagatttacagaatgtcaacatcacggtgcacatgggggcctgtcgctagccagcttcctcgcatcttgaccagcattgaagaggattatgataagcgtgtgctgctgtccatcactactgagatcctcaagtcagtggtggctcactttgatgctggagaactaatcacctaaagagagctggtctccaggcagatgagcaacgaccttacagagcaagcagccacctttgggctcatcctggatgacgtgtccttgacacatctgaccttcgggaaggagttcacagaagcagtggaagccaaacaggtggctcagcgggaagcagagagcaccagatttgtggcagaaaaggctgagcagcagaaaaaggcagccatcatctctgctgagggcgattccaaggcagcagagctgatcgccaactcactggccaccgcagggaacagcctgatagagctgcgcaagctggaagctgtggaggacatcacattccagctcttatactctgggaacatcagctccctgccagcggggcagtccatgctcctccagctgcccctgaggggccaccctgcctgcacctccgcaggccaactgggccacagccctgatgattcttaacactgtcttccttctgccccaaccctagaaatcactatgaaatttcatgattggcttaaagtgaaggaaataaaggca

SEQ ID NO: 4828 - DNA, 6000 bp, Homo sapiens
ggaatgacatgacagtgcaggttgagtctccattatctgaaatgcttggaatgtgaaatatttcagaattcagattttttcagattttggaatattcacatatacacaatgaggtatcttggggatgggacctaagtctaaatataaaattcatttatgtttcatatgtaccctatacacatagcctaaaggtagtttcatacaatatttttaataatttgtgcatgaaacagtttgtgtctattgaacgcccagaaagcaacgttgttgccactgcagtcacccacgtgaacatctgcggatgattggcatcaccaccattcctgactctgactctgaatttatgggctacccttacaaacaatcgttttcttacacttattcacacatgagtacttaacagtaaaaaatatgacatagcattaaaccagtgaaaacataatgtgttcagggtcactaagcagcccagtggtgtcatcagagacctggatcagccgacagacaacagcaaccacgacagtgggcttccatctccatcaatgatgctgtgttctgattaaacgatactgtaggccgggctcggtggctcatgcctgtaatcccagcactttgtgaggccaaggcaggaggttcacctgaagtcaggagtttgagactagcctggccaacgtggtgaagctccatctctactaacaatacaaaaaaaaaattagccgggtatggtggcaggcgcctttaatcccagctactcaggaagctgaggcggaaggatcacctgagcctgggagctcaaggctgtagtgagatggaatcacgccactgcactccagccagggcaacatagtgagaccctgcctcaaaaaaaaaaaaaaaaaaaaaggaaaagttcactataagctaaaccttgagcctagagcacgtgcagaaccctggagaagttcctacccccaaggcaggagttcgtagctaatagcttcttgggcttttggtgcagactggctggagattggagaagctacatcatgagaaaggggcttttgttctcttttctgggccgaatcaggcagcagcaacttgtaaccatctggccatctgctggtatcttgtagggcagcttatcttgcaaaagcactaggtgctgacgcaggagagttgcaagcaaaagaagactctgcaaaagggtccttcagggcttcgcacaaggggacaagttggtacagggtcctcatcttgcttaccctgcctcgaacacccaccgttctagtccttcaatgagcccatcgcatgctttcatcatggcgcctgcaggtgcgtgttctgctgtgataacagcattatgttcgtcatcactgttagcacaagcaccttggttcagaaccgttttgccattgttcatcatcggtcaatgaacgaacaactggagccacagtatagatgttaaaaacctgtatatccacttcgtccagcatgctgacacactctgaaggtatattttttgcctgcatagggaggtcagacatcatttttttcccacttcacatatggaatacttccatgtcatcaccttgttcatcatcatcactgaacatagtcgcagaccagaggttgtgccatgcacgcatggctgtgtcgttagtcactgagttccaagcattggaaacagcattggcatccttcatgctaaacaccttttgaaaacttccacacccacccctctgttcactgctgctagcgtgcaatgtttccatatttactctccattgatctccattgatctaaggataccctggtcacatggctgaagtaatgaagtcacatttggaagaaagcccatggcataaacattatttttaatgagagtttcagctggaggatgagcagaatggttgtcaaagaaaaacaaaatcttgcagtcatcatccagtccaccctccctacagtgacacaagccactggtccaaaatgtttgtgagactaatcagaaaagatgtccctgattatacatgtaatctcagctactcaggaagctgaggtgggaggatggcttgaggccaggagtgtgagaccagccttggcaacatagtgagacctcatctctagaaataaataaatatcagccaggtgtggtggtgcacacctataggtgtgctgtgttgcccaggctggtctcgaactcctgagctcaagtgatccacccaccttggcctcccaaagtgctgggattacagacgtgagccactgcacccggccaacattttcaacatcattagaccagagagcagagaataagcaaaaatagcacagtgagaagtgcacagaggcggggcttggctccatatggggaattgtcgggacctaccatgggtgtgttcgacctgcacacaggccattttaccaccttttgtgtgcgtgcttgcatgggggaatctgggcatgcacagaaaagatatctctcagctgaaggcggctgggagagtcttttttccccttggggatgctgaataaacagtgtgttatgtgcctgtgttttgattgccacccaccccacgagatcaggtgtggaattttccacttgtggcgtaatgtcagagctcaaaaagttttggattttggaccattttggatttgggatttggagatcaggggtgctcaatctgtatggtactgttcatatgaattttttttttttttttttgagaccgagtctctttctgtcgcccaggctagagtgcagtggtgtgatctcagctcactgcatcctccacctcccaggttcaagcgattctcatgcctcagcctcccaagtagatgagattacaggtgcgtgccaccacaccctgctaatttttgtatttttagtagagatggggtttcaccatgtaggccaggctggtctcgaactcctgacctcaagtgatctgcccacctcagcctcccaaagtgctgggattacagtcatgagccaccacacccagccttaatcacatgaatttttaaaaatgtaagccatcctgtccgttgcacatggacatacacatggaaaaggggcctaagaatgcctgggaatgatgagtaccagtttcaagaaacatttacctgcgagaaagtggaagacggaggaagagaaagatgcaagaatacaaaggggcttcaactttatctgtaatttttttattccaaaaaatatctgaagcaaacattgagcagacatattaagttttgacaggatgaggcagtaggctcatggatatccactatatttattgattgctatagttcgaagtatatttgaaatttacattatttaacaacgtatatatatgtaatgaaatagagttctttaagcataccaaatttacaattttattttcaaattttaaaatttacttttggtcagaatgcagtaaaatgggtactttaacacaatcaatgctagttagaaggtatattgatacaagacttttggaaagcaagatagaaatatttgtttaaaagagaaaaagcctttaaaaatattccctaccagttgactcaatagttccactgtaggaaatctattctaagcgatcttaaattcacaagattttgtagaaagacatttatgacaatgttatctttaatattaaaataatagaggggatgttaaactatgataatttgcagccattaaaaacttttacaaagagtctgtaataatggagaaatctctacttcataaatgtccatagaataaaaaatgctctattgtatacatgctatgcttagcctgcattcaataaaccctcaatatatttgagaatattaaggaatattgttaatttttaaatttgatcttatcatcttgagatttattattaagtattgagagaaattgaataatgtgggatttccccagttggagtaagggtggctattcctgcttagaaaaaaagaatggaccttgtgtggtcactgccggatggtaggttcattattctttctactttttttttttaaatttaagagacaggaactggctgtgttgcccaggctggagtgcagtggtgcgatctcagctcactgcaacctcagcctcctgggttcaagtgattctcctgcctcagcctcctgaatagctgggattacaggcgcccgccaccatgcccagctaattttggtatttttagtagagatggggtttcaccatgttggccaggctagtctcgaattcctgacttcaggcgatccacctgccttggcctccgaaagtgcttggatttcaggagtggccaccgcgctcggccctaaattcttttatttaacttttaagttcagggttataagtgcaggtttgttataaaggtaaacctgtgtcttgggggattattgtacagattatttcgttttcaaagagaatttgcaagtatgtcacaaaagcctcataaacacgttgtgagattttaagaggcaatgaccgaggcttggagatgtctcgtcctgtccaatgtcaccgctagacctgagaatctgcacttgggagcttacagacccggttctcaggcttcacttgagaccccaagaaagaaaaaaacccaccagccaaagaggaggatggcagcctggaagaacctaaggaagcgaggctcagaggtgaagcactgtggctcctctcccccttctcccccctccgccccctctccttctaagatgaggcattttctaggggagcaaagctgcagcaggaattcggcgaagtggcggagctggggccccagcgggcgccgggggccgcgggagccagcaggtggcgggggctgcgctccgcccgggccagagcgcaccaggcaggtgcccgcgcctccgcaccgcggcgacacctccgcgggcactcacccaggccggccgctcacaaccgagcgcagggccgcggagggagaccaggaaagccgaaggcggagcagctggaggcgaccagcgccgggcgaggtcaagtggatccgagccgcagagagggctggagagagtctgctctccgatgactttgcccactctcttcgcagtggggacaccggaccgagtgcacactggaggtcccagagcacgacgagcgcggaggaccgggaggctcccgggcttgcgtgggtaaggtcctgggtccccaccgggcacggcccatgcgtcccggggacaggggtggctgtgcggtgccgcggcggccggcggggctccttccccagcaggggtggggacgctgagtcacggatctgtcaccgctttgcacctctccgagccctcgggggccaaagcaaaagcgaaagcgaatgcgactggcggggcggcaggtcccagagcagcgctcgccacctccccccggcctgggcagcgctcgcccggggagtccagcggtgtcctgtggagctgccgccatggccccgcggcgggcgcgcggctgccggaccctcggtctcccggcgctgctactgctgctgctgctccggccgccggcgacgcggggtagggagctgggagcaggggcgcccgggcgggacttggaagggggccgggacgtggagctggagggaaccgggcgccccatctccccgggccgtgcgggggcgtcggtgccctcgggagcgcggtgcgcgcaggcccaggccggggaggggacgcggcgccgggcaggagggacacgtgccgggagccggggtcgcagggagagcgccgccgctgcgcccgggtcacccacgtaagggagcgggcggcctggctggggtctccgaggccgaggtcaggagcagttctgagaagcccgttttggccacgggagcgcggagccggcggcgtccagcagtttggagacacgggcgagtgcgcttctcccaggcgcctggactgcagggcgggtgttgcatagcacgcggtcctcggaggggtccgggagaaactactcctcccgactcccaggcaaaagtaaattatgtcagtgggagctgggagggtggggaggagctgtgtcccagg

SEQ ID NO: 4829 - DNA, 6000 bp, Homo sapiens; identical to SEQ ID NO: 1572

SEQ ID NO: 4830 - DNA, 6000 bp, Homo sapiens
tgggaagatcacttgagcccaggaggtcaaggatgcagtgagcgtgattgtgccaccacactccagcccagtaacacatctgaccctgtctgcaaaaaaaaaaaaaaaaaaatgatctgagcacctccagtatgcaagtggtgttctaggtcctggggctcacagtaagcaagacccgatgtccacccacgtagagctcccaatctgcaaatactctggtggcctctgccattcacaaccaatcaggtgtgatattttaaagaactgaacagtcatctcatgattaaaacttcaaataacactgtcacgtccacttttgtaagtctccccacctcccagggccctaaatttcttgaatatccttcctacagcatttgatacatatgcaggcatacactcccttttttttgttttttgagacggagttttgctcttgttgcctaggctggagtgcaatggcatgatctcagcttattgcaacctctgcctcccagattcaagcgattctcctgccacagcctccggagtagctgggattataggtgcccaacaccacgcctggctaatttttgtatttttagtagagatggggttcaccatgttggccaggcgggtctcgaactcctgacctcaggtgattcacccacctcagcttcccagagtgctgggattacaggaacgagccaccactcccggccagtcctcctttttagggggaccccgagctgacttctctggctggcaattccatgaagactagggaaatgtaatgaaatttaaagatactaatccattgaggaaaaatgagtagaaggatgcttaatggggaaaatgttataaactattggtccagagggcatatccttttatccttcccagaggcaactacacactcccttctcttccctcagttttcttcccttccttcctggggctcagctagaatcacagggacccacctggcaaaactaaaggaagttatatcctttgcatttatactaccacttactaggctggcagctgatgttgaaggcaagtgtgtctgtgcagtgtatcgctgtataaagcactctctccatgtattatttgcttcttacagcattcctatagaatcccccaatgtgtgcattaggaaactgactcactgcctaaagtcacaactagttttccaaatccaagttttctgttctttcaatccttgctacacctcaaaaataacctgtggcttcttaaaacatgcagatgcttggtcctcaacccagatctactgaattggaatcttcaataataaggcctgggcatctgtgcttataaaaagctgccccaggccgggtgcagtggctcacgccagtaaccaaagcacattgggagcccaaggcgggcggatcataaggtcaggagttcgagaccagcctggccaatatggcgaaatcccgtctctactaaaaaatacaaaaaaattagccaggcatggtggtgcctgcctgtaatcccagctacttggaggctgaggcaggagaatctcttgaatccaggagacggaggttgtagtgagtcaagatcgcgccactgcattctagcctgggcgacagcaagactccatatcaaaaaaaaaaaaaaagttgccctcgtgaatctgattcagagccggaatcaggaaccactggtgtaggacagggtgtttccacactggacagccccgagaaagggccccctgagcgctattggtctctgatattcttcccagacactttcccacagaaaagccaaattcagctccttagggtgagagatcacaccctggtcatctcggtacagcaatcctggagacttctggggcctaagctgcttccttcacggtggccacactgtgtcccctgaccccattatctctatgctcccctagagctcaggaaatcaggaagaaaagtggctcatccagatgcaatgcagtgactgtgaggggctggcatcaggttcaaagtggtcaggaagagggaaataagtgacagggggtgaaacaaataggatggggcagagctcttgccaactgcaagtcagatgatgtctccacatccaaacaccacagaataaatacttaaaatcatgctccagagggatcacaaaacaggctataaacttgtcccacctgcagaatctgctggggcgataaagagagccaagtagtctggataagcataatctcacgcaatataatccagaaacaaagtactgactgataagattttatagctttagagaaagagagaaaaataggctttgctgagggccctttagagctgtctcaagaggcctctgctgcctgtagatcaagggcaaactctttttactagacagtcttgccctgtcacctggcagtagtgcagtcgttcgatcatggctcactgcagccttgaacttctgggttcaagcaatcctcccacctcagcctcatgctgaatagctgggattataggcgcataccaccaagcccagaaaatttttttaatttttaaattttctgtataggctgggcacggtggctcacacctgtaatcccagcactttgggaggacaagctggacagatcacttgaggtcaggagttcgagaccagcctggcaaatatggtgaaacccagtctctactaaaaatacaaaaattagccaggagtgctggtgcacacctgtaatcccagctacttaggtgggtggctgaggtaggggaattgcttgaacccagaaggcggaggctgcaatgagccgtaattgcaccactgtgctccagcctgggcaatggagtaagactccgtcttaaaaaaaaaaaaaaaagaaattctatagagacaaggtcttgctttgttgcctgggctggtcttcaactcctaggctcaggcaatcccgtagcctcggcctccccaaaagtactgggattgagggcatgagctaccatgccccgcctaaactctaatgtgacataaaaggccctccacactccagctcaatctcccacttaggccctctttctccttaggccccaccaagcacaagtcctcaacaccgaacaacatactatttaatgaggccagcattttcccacctgcaagtctttatacacattagtccctctgcctggaataccactcccaccctcagccgcaggccccttcctttcttcaacaaatatttatcgattatccacgatgtgccaggccataaagattaagtattttttctcacagacctcatgagcttagagtccacgaggaaaaaatattagcaagtaattatacaataaagcctgatgcacatgaaggtcagggaacagtatgcttagggaacatccagcagaggcctagcttagttgaggggggtgggaaaaggcagtcctcacagaggaacttttttttttttttttttttttgagacggagtctcattctgtcgccaggctgaagtgcagtggcacaatctcggctcactgcatcctccgcctccagggttcaagcgattctcctgcctcagactcccgagtagctgggactacaggcacgggccatcacgcccggctaattcttgtatttttagtagagacggggtttcaccatgttggccaggatggtctcgatctcctgactttgtgatccgcccgcctcggcctcccaaagtgctgggactacaggcgtgagccaccgcgccgggccggacctcttaacctacatctaaacaatgcctaccaaaggaagtatggagtaaagaaaggtatctcagtattaaaagaaataagttggctggcgaggtggctcacgcctgtaatcccagcactttgggaagcccaggcgggcggatcacttgaggtcagtagatcgagactagcctgaccaacgtggtgacccgtctctactaaaaatacgaaaattagccgggcgtggtggcaggcgcctgtagtcccagctactcgggaggctgaggcaggagaatcgcttgaacccggcaggcggaggttgcagtgagccggaatcgcgccactgcactccagcctgggcgactgctatgtctcaaaaaaaaaaaaaaaaaaaaaaacacgttcaaataagttcaatgtggctggggcagagatgctagagaaagcggtgagaaactaggaaaggtgggtaaggaccagataatgaagacctttgcaagcgttccagtgtgaagcaactttaacatctaaagcagaggtgtcgtgattagaaagacgttatagatctttgtggatctgggcaaaggaagagtccccgagcagcaaagacgctcctggagtcgtccaggttagaaatgacggtggcctgcactagagacgccgcagaaaggactggagaaaaatacatgttagtcggaaaagaaggtagaatctcccgacacagtagtgaccagctggaagtaaagttgagaacggtattggtggtgactcccggtttctggatcccgccggtagccgaggggcgacggccgacccaaagctcacctccccactgcacgccgcccctggatcgagtaccttggtgctttactatttagcacacggaagtgttgttctgttgtccgtgtctccttggagaccgtggagaacagaagggccggcgggggttttcgctttgtactcctggtgcccagccggcgctgcaatccagcagaggagccggactagaaacgcggaagctctgggtgcacgcgcccggcccgggactgggcggcccaaccgggagggcggcgggtcctgcggccacgcaacaggcgttggggaagcagcagagaccctgcgtgcgcgcgggcttcggcctccagattccgcagagtcccgggcccgatccccccggggctggcctcctgccctacgtgggccccgcgcgcccacctggaactcacgatggcgaatccgtggtcacctgaaggcaacagcaccggcgcccagtgcgcctgcgccgcgcgtgcgcagagccctcgcctcccggcctcgcctcgcagacgcgacgggccggggaggaagcgctcggagcagtgcaggtttcgttatcctgtgttaggtcactccggagaggggaaagcggcccacagcgtcgcgcgacccggaaacgacacaacgaggcccaatcttttagactcgagtttaggccccggggtggagtctccggaccgggtccccccacccccgctacaggggcagtgcgcaggcgcgaggtatgtatcgcgagaccatgcggttgcccgggtaaccagacgctcaggacttggaccgtccagttgttcggaggccagcctatagccaatggtatcccgagggctcgctctctccgggcgtttgtgctcccctctctcttctaacccagtttctacctttcagtgctttggaatcttagccctctgtctctattcgcttttctgtatttgccttgcctcagggacgcacaaccccagcccctgtcccagtgagcccgtcgccatggaatccctgcagactccccagcaccgcgaaaatcaagataaaagggagaaggagtatggggtaaaacacatgcctatgggcaataatgcagggaatcttgagcccgaaaagagaaaggcagtaagagttgccttgagttcagcaacagctgcacagaatatcccgtccagtgtccactgtggctgctccaagcaatggagactcaggctaccatcggagtcgctgcaaagtcggggacaagtgatgaagcggccgaataacattttaaagctcaggaatctggatctgttgatctacccttggccagaacttagaagacggcaggttgcttctgacctaatgagcctcctccttctccccgctttttccggccttacttgggcccccttccttttcctctttacgtatctgcctccttttctcaatctcctcactgttggttttgtatcctattttctggtatagtttctgtgatttctttcttttatttattattattattgttgttgagacag

SEQ ID NO: 4831 - DNA, 6000 bp, Homo sapiens
ggagcctccgagcacacattgcattcacactggcttattctgtaaatagtttaaaatatttgaaatgtggttctattaatgaaataattatattgacactttcacacctcttgattttaaggcatgatcatatcacataaagaaatagattgaaacacaatcagaaataataattggtcattaagttagacatgtttttgattgaaaagtatgcactaactggttaaatggtctggcatttctatttttaagtacttcgtacatggctacaactcagacatcatttttttcccctgtggtactctttacttgtttatttttggaaagtttgggccaaatctgttccatctttgacctttgggttcttttcttttctttttagggaaagaactatgtatacctttcccagtacgaagcatacacatatgctcacatggatgataaacaactcgcagacttgcttttctgacaaataaatcagtgctggtagatctttaaaatgtcaaacttctcattcagcatgagacctgtcactgtccatgtgtttttttgacgagtccccagatcttaccaattggcatggttcccgtatgtcagaatgatgaaatgtacaagacacctattcagacttatcccttctctacaattattgcaattgggtattttttttttcctggcttcttggaaggtttactactctcccaggcttttggcctcccagggaggtcaaagagcttggagttagtttgcgttccctccaaaacaccaaggtgcagccaaacctttttccacgacctctcggaaaagtacacagcagctttatgccatctctcaaggactaatcataggcatgcccagagggcagcccagaatagcttactacctctagaaaggtggcttctcattattatcatggctttaaaacctgattccttatagatctagtagcatgaggaactggttttggcatttgatagggttaaaatagtacgacttacttgccctgtaaacatgcatattattttacctccccaaactttaatgtcctcatctgtaaagcagaaagtgaccatattaagaatatagacttatgtaagtcaacagcaagtatgttttagaacacagaaataagaatatacctaattatgtgtcagtaaacagattttttttcccttatctactctatttttgttgttgttgttttgagacagagtctcactctgtcacccaggctcgagtgcactggcatgatctcggctcgctgcaacctccgtcttccagattcaagcaattctcctgtctcagcctcctgagtagctggaattataggcatgtgccaccacacccagataatttttgtatttttagtagagaggggatttcactatgttggccaggccggtcccaaactcctggcctcaagatgatccaccagcctctgcctcccagagtgctgggattacaggcatgagccaccatgcccagcctctcactctatttttgaacaaaaagactaaaaagtttaagaaatatgccaaggaagtaagcaagtgggtacaacatgggataccctggtgatgtgcttctctatgcaaatcaaagcattgtgtaatatatagctagttccacctagtaagtcagcacacaggtcaggtgcatgtctaggatcattctatcaccttctgcctatttagatggttctcatccatctcaggctagcttgcaataggacagatttccaaatttcagcatgccagtgtcaggaaatgattgagttgaggttatttttctaacctcagtgtccaacacagttgtcagcattcctatttgtatgctgcccatgaattcctcattgaaaattactgaagggaacaccactttgatgaacaatagtaacttgatcagagtagcagactctgcgttcaaagcaaatgaacttttaaaatgagaagcaagtcttctaccatctactcctaagtctttacctgggaaaggaatactcaggaaattatccagacgtgacaatttgccagggaaatttttgatagcttatttatttgtattatttttacaggggcatgacaagtaaagatataacattcagatcagtctactgagtgggttctgatgtaagggagacaagaagtccagcttttcagtaagttcagagatttttttctctggatagaccctcaaatcaatggacagactgaccactcccgaaactgccatctacattgctaatcgcaggctagtaactcaaatcagtgagcccagcacctaactcaccttctacttccccaatctgctgtcctagcccactgctaccgttcgctattcttcttttctaggttaataccttgagacaccttgaattttttttgagatggagtctcgctctgttgcccagactggagtgcagtggtgcagtctcggctgactgcaatctcggctgactgcaagctccgcttcctgggttcaagggattctcctccctcagcctcctgagtacctgagtagctgggattacaggcacatgcaaccacacccagctttttttttttttttttttttttttttttagtagagacggagtttcaccatgttggtcaggctggtctcaactcctgaccctgtgattctcccgcctcgggctcccaaagtgctgggattacaggcgtgagccactgtgcccagcctgtcccttttctttagcatttgtggccctcccctcccttctgttaaccagcttgaggtcctcgcctcccagtgcatctaggcaacacctactttgctttcccttccttccaacaactaccccccactccccacccctaaacttttggagccccagaaggtatgtcccgtctctgctctagaactggctccctttgcctcaataaatgttattgttattaagatcctcttcctgaagatccagtcaaccctatttcccaccacttcctaacccaccccttttattccaatcccatgcacaaccatttaatctctgtcttttctaagtattaataccttccctcaacttctccccccacagtgcccaaatgtaagccccgtattcaaaatcctacgtaaatgtacatctgccaccaaatcctcttacatgcttcagaaaaaacttagctcttctgtctctaaacttcatatctgtttaacctcggctccttccggtttcatgctgacctgttttgtttaatgttaacgaatgaccatatgttatgtaaagggatctatactcctttctcttctctgtcctcccctactcaagcctcacgtcctctccgacacaggagacatgggaagagattgacaacacccacggatcagaaccgaaatctgaactcctgtagactgtgaactacaccttctacccccgcagaaagtaaactgtaaattccaacattcttaactgcgccaaacttcatcacaattacacaggatggagatttactactaagtcatttaatatgcccaagatgcctttaagaaagatttaaataaaatctcaagggctgggcaaggcggcttaccctgaaatcccagcactgtgggaggcttaggtgggaggatcgcttgagtccaggagttcaagaccatgttgaacaacatggtgagacccccatctccttaaaaaaaaaaaaaaaaaaaaaaagaagaagaagaagaaggagaaagaaagagaaacaaagaaagaaaagaaattttaaaagtcaactcgaggtggcaggacggcttgaggccaggagatcgagaccagcctaggccacatgagcagactcagtgtcaacaaaaaaaaattagaaaattaaccaggtgtgatgtgtcatctgcagtaccagctaatcaggaggctgaggcaggaggatcgctcgagcccaggagtttgagatttcattgatctatgatagcaccattgcactccagcttgggcgagagagagaccctatctctaaaaagaaaaaaaaaataaataaaacaaagcaaaccaaccaaacaaacaaaaacaaaaaattcacacatgcacacacacaggcgcgcgcgcacacacacacacacacacagacacccaacaacaaaaacaaaaaaaaaccctcgaggctttcttgtatatgagttagctctgccaggaggtggggtggacttaggggaggagagggttgttgcatttcaactttaactctcatcacagacgtgcaaagccgtgaacgctgaggtcaggctgcagaggtgatgaagagataattgctttgcccctcctggtggtggggttggttttcacattctccatccaagctgcgcctttgacacaactggagcaagctctcgctccacctggggcattgcttctaaagcaataaatagcttgaggtgacagagacgaaactgattgtccttgagatgggactgcaatagaaatccgggcagcccgaagaggcacccagcgctccagccaccagctgggccgcccgggagtccctggctctagaccagccgcgaggaggcgccgcgagagagctggtccctgcccgcggccggaggagggctagagcccctgggccagccccccgagccggctgggcgggcgggcgggtgggagcagacgccgggcactgtcaccacgggtgcgccgagcgcaccgacccgggacacgggcagctggggaccgccagattccaccagccccccttgccccgcaggggtcctcggctcgcgctcctgggtagcagccacccaccggggcggagggagatgtcgcccggggccagccgcggtccccggggaagccaggcgccgctgatcgcgcccctctgctgcgccgcggccgcgctggggatgttgctgtggtcccccgcctgtcaggcgttcaacctggacgtggaaaagctcacagtgtacagcggccccaagggcagctacttcggctacgccgtggacttccacatacccgacgcccgcacgtaagtcgcccgacccggggaggtgcgcgcggggacgaaggcgctcccgggtcaggtcccagcggctctgccgcggagtccccccgcagcctgggatccccgtcctgccgcctgcccggggtcccgtccctctccccgccaccagccccttctctcccctgccatgctagatgtgccttgtgaattttgagctagagacatgccacttgcatagaacacgcaagtcctgggtgttccaggtaccaagacgcacgcatcctacaaaggagagaacaggacccagaagacccaagccagttaaaaccgccaccacagcgaggtctgtttatgcagagtctgtaaccattgcgtctgggcgcaagagctgtcggctaccagcagctgggctctgtccttggcttcctcctaccccacccccttctctcatctcactgtacccacagagctccacctagagaagcaggaccgtttgcattcttgcaaaccaggttgcggacccccgtttccaagaggaaatcaagtttgacagtcggtcctcatcataaatacgttcatgccctccacgcctgccccagtgtccccgggcaggaggttacagagactgcattgcatgcgcacggttttgtggcgcccaaagagtgactttctccaactcttttgcagagcgagtgtcttggtgggggcgcccaaagccaacaccagccagcccgatatcgtggaagggggagccgtctattactgtccttggcccgcggaggggtctgcgcagtgcaggcagataccgtttgacaccaccagtaagtgagatttgtccttctaagctgtgggcctgggtttggaagaaccagggccatcccagaggcgacttcccgctgtcttggtgtgctgctcgtttagcttgtctgatatgtccgtattgtgggctatgtgggtctctagagaaatcagttttttcaactctcagttaactgaaggaagacgtttagtgaaccctagagaaaggacactattttgaccctga

SEQ ID NO: 4832 - DNA, 6000 bp, Homo sapiens
aaaggaggagcaaagaactgagcattcagaatataaagggaggagaagtgaatgtcacagaaggagaaaaggttgcacagagatatcttgaaaaacataaaaaacaggagaaaggagtagttcattctgattcttacaaccaccttcaggtggttttggaaggagggagggagggagagaagggagctaagacttcagtgagaaaggctgtggagccaggatgaggaagaaagagaaaggtgagaccatgcgacaggaccggagcagaagtcagcaggtcatgaattatggatgagcagtacactgaacatttggataccaccctcattccatgtaccatgtatggtatcagcaacaatgcaaaatacatttgcatgtgtcttgctgaagaagtcaaagagagtaaaggctgatgagtggaaatcaacagtacagcagacaccattataaacttaaagtctacaacatgccattaatgttatcagtgttctgacctaagggttttatttattttttattattttattttatttttattttttgagacagagtctcactctgtcacccaggctggagggcagtggcatgatctcagctcactgcaagctccgcttcccgggttcaagccattctcctgcctcagcctcctgagtagctggtactacaggcgcccaccaccacgcccagctgattttttgtatttttagtacagacggggtttcaccgtgttagccaggatggtctccatctcctgacctcgtgatccacccgcctcggcctcccaaagtgctgggattacaggtttgagccaccgcgccgggccctaagggttttattttaatgaatgcgtacaaatgtgcataagggttccttaggtaaactctccaactaggtgccctcctccaaacactgagcagcccccagagcagatcctccctgtccgagggctccattgctagcaccccatataaaagcttcctcaccctggttactcagttccactcaaggatgataccgtttcttttggattgcctgctcttcaaaactcttggatttaaatggaatcttgctctccacccaccaatgtggagttgttctgtgcttcctggagtcaccttgccttgttcttagacatcagttacctttgcctcacacctttaactccaggtcagcaatcgtcttcctcactcaaagtccccaattcatctctctgctctgaaatcctcttttataggagaaatgatcagacacccttgcttctccttgtacccaagattataaagacagctgtgaattctttttgtcattttttcttttaaggaatctaaacccaagagaggatacaggagggtgaggattattatatttctttacatgatattgataacagcttatatttaatgaacacttattttgtgccagtaacctaatgtgctaaacattttacataacttcagtgctgttattatctgtctgctgatgaaaaaacaaggttccatggtcagtaagtgatggagtcagactttgaacgcacataaatgagcttcaggcccgtgttcttaaccttcaaccatgtggtcttccctagactggaggcttcagagggaagaatctgcaatttactacatttcgtgttcctatcatcttatagatggctaatatgtaaagggcacatgcagaatattaggggaatgcattctagattagggaagagacaggagttttactagtcaatgaaagatagaatttcaggtctatagaatgtttaccttgggagaggagaagaagagaggttatctaccatatagatctgaaggtcatagattctaaaactactttaattcatctttcctgaagtatttctgaatagagtaagtaaacagaatgagtgccaatcccttggaaacagcaattgatttttatattgcttttcacagagtcaacatatgcagacagtctgacttgcctattgatctgagctagagttgagtgaatgagctggatgtaaaattccctaactcatcactaaaagtcagtcagaccttgaacgacggttactttcttttttttttctaacatgggtgacaatgagcaattgaatgcttagattgggagctgagagattatctttactttgttgagtaataaacacattaattaacaaaacaggaaaatcctgtcaaagaggaagtccttattaagatcatgctggaggccttttctattgcactggaaagattagctgagttcagtggtctttaagaaagtataatcatgaaaatagttacgtccagagctcagagagtttgaattatccttttgattggaagattctagcccagactattttatcctattctaaacttgccaaaaatttcatattgtcaaactttccctccaccccatgccaagttgttaagctttcaaataaacaaatttattatgataaatttcatctctattgatgtaaaggctattggatatcttttcttagcatttagtttaataccaaattaatattttgtatcatcctgatatatgaagacatttacaaatatagaagagaaataattttaatcagttttattgtgctgtaatttacatctgccaaagattatctattttaactatacagctttatgagttttgacaaatttatacagtcatgcaaccacaatcacaatcatgatacagaacattttcatcacccttaaatattccctcatgcctccttgcgatcaatctcctccccaacccctggcctctgatttgttgtctatcaatcagtgtagttttggcttttttagattttcatatggaatcatgtgatatagaatcacttaggaagtagtcttttgtgtcttattgttgtccttgaaaaatatttttaagcaagcaaaatgacttgccacaggttggcagaaaaatatttgcaaaatacgtatttgaaaattcttgtatctagaatatatgagctcttacaatcaataaaagacaaacaacaaaattttaaaaaataggcaaaatatctaaacagacagttcaccgaagaagataaacaaatggcaaatatacataaaaagatgcccaacatctttggtcattagggaaatataaattaaaattgtaatgagatacctatgttgacacaaagacctgttcacaaatgttcataacagctttatttataatagtcccaaactggaaataactcaagtgtttatcaactgatgagtagagaagcaaactgtgggatagccatatgatgaaatactactcaataataaaagggaaccaattaatgatatacactacagcacagatgaattacaaaagcattatgttgagtgaaagaagcagatacaagagacatatagaagaaattgggaaggtttaaaaaaaatttttaaaagcagtgactatttgagtatcacaagtaaagtttttttttgttttgttttgtttttgagacggcatctcgctctgtcccccaggctggagtgcagtggcatgatctcagctcactgcaagctccgcctcccgggttcacgccattctcctgcctcagcctcccgagtagctgggactacaggcgcccgccactaagcccggctaattttttgtatttgtagtagagacggggtttcaccacgttagccaggatgttctcgatctcctgacctcgtgatccgcccgcctcggcctcccaaagtgctgggattacaggcgtgagccaccgcgcccggcataagtaaagaattataagctatggtacataatgatcctctcctcaaagagcctacataagtaagacacaaaataagtaaaacacaaacaggcttgtcctgaaagagcctgcatgggtattaaccaatgcaatggtaattacctagagatttttcttagaagtgaaatttttacagctctccctcaaattcagttttgtctgtgtgctcatggaaagtctgagtgcatcaatagttgattttacaatcgaaatgtagaatattttcatcactctcagtggtttctgtagtcccagcacagagtgagtggggacatcagtgctccatgtcctcaaaccatatatccagctggaagggtgtatagcgcagtgtggaaagtgggaatggattccacagccgtccataggtcccacagggatgataaaaagtaaaaagtacaaattctttgtacattctggatattaacccattttcatatatatatgatttgcaaatattttcttccattctgggagttgctttttcactctgttgatgtattttttgatgcacaaacgtttttaattttgatgtattccaatttatatcttttggttgtctgtgtgtttttctttttttgcccatgcttttggtatcatactcaagaaatcattgccaaatccaaaatccaaggtcatgaatttttgtcctattcttctgagttttatgttatagtttcagattttttgaaccattgtgagttaattttatagttttagctcttagatttagatctttgaacttttttgagttaatttttgcatatggtatgaggtaagcctccaacttcttttgcatgtggatatctagttttcctagcgctgggtaaaggtggaactcctctgcaagggaggtgaggaaggaggggaacagagaaaggtgtagataatgaccagtttacttttgttgaaacctagttacttcttaagcaaagattgtttaagtggatgttttcaaagctgcttgttactgtttcaaaggtcaaatagataatgattaagttgcgcatcacttaaggtagattttgacctctcacaagttgaagagtactgaagatctaagatcatttacatccctctggaagaaaaaataacatagccttctagggcaaagaagaaaaaactcaacagttacaggatattccatggttcaaagtacacctgcctggtttgctgttctccaaaatcccatgctcagttggttggagtggcctcactcttacctgccaacctgggaggttgatgatgaacatgtctttaccttttctttggagtttgcttaccttattaatatttgctgaagtaaatggcgaagctggagaacttgagctgcagagacaaaaaagaagcatcaatctccaacagtaagtaaacacatgggtcattcctgctcagggactaggctaattcctcaccagttttcccaaatagccagataaacaaaggtgcaatttttcttgaggaaaattatgttgagaagcaaacagggaaaaacatttagactgaggtatgaaattactttcctatgcacaaattattatctgtcattttgcaaataatctgtttgcaattgccaggaggtatctctgagaaatgtgcagagaaaaaagtggcagatgagcaggggcagttgggttgagatgatcaaaaagtgaagatgtatttggcctgtagttattcagtaagaaactttgttattttggtttaaaaattgtacttgctaattactgatgcattctctcgtttgaattatataggcctcgaatggctacagagagaggaaatttggtgtttcttacggggtctgctcaaaacattgagtttagaaccggatccctgggaaaaattaaattaaatgatgaagatctcagtgagtgtttacatcaggtaatacactggaaatatattgaagtcattttgtatatccatatacggtgacttaattgaacaagtctagattaatctgtaccttgaatcttttttaattattattttttattaatacataatttgatacattcctataatgtgtaaagttcaaatcagggtaattgggatatccatcaccttaaatatttaccttttcttcatgctaagaacatatgaattgttctcttctagttattttgaaatgtacaatagattaatgttaactatagtcaccctactggtctatcaaacactaggtcttatttcttctatctaactatatattg

SEQ ID NO: 4833 - DNA, 6000 bp, Homo sapiens
cagcggtcaaaaatctgtaataagacatatttggagagatactgaggtcattgattttttcaagtcatttctacttttacttatgtcctatgacttattgaaaatatgtagtctggcagggcgcggtggcttacgcctgtaatcccagcactttgggaggctgaggtgggcagatcacgaggtcaggagatcgagaccatcccggctaaaacggtgaaaccccgtctctactaaaaatacaaaaaattagccgggcgtagtggcgggcgcctgtagtcccagctacttgggaggctgaggcaggagaatggcgtgaacccgggaggcggagcttgcagtgagccgagatcccgccactgcactccagcctgggcgacagagcgagactccgtctcaaaaaaaaaaaaaaaagaaaaaaaaaaaaagaaaatatgtagtcttggttatcatagtcttataaacgtcctccccaaggtatagcttaatgttataaatgacctattgtcctgtagtcctcacaaatctttaacgttacaaaaaccagtcaagcagtctgaaacatcagaaatcatcctttctaaacagagaggtaaaaatgtctcccgaatgaagaaaagagtctttggtgcatcaattttttgtgcgtttctcacagcattcctttttttccttatattgaagatgttcatatataccagtgagatatatttgtatctgctatgtatttagtgtgtatatacatagtatacatgtatatgcattctatatacacatatttatttatatagtgtgtgtatatatacacataatctatgtagagatatagcatatctatgtacactcattcactgttatatatcagtaagaatcttcaatataaggaaaaaaattatggagatacattatagctatcagtatatatacatactatgtaaacaaatatatgtatatatagtttctatacatttatattatatacataatatataatcatgtatatacacaatataatataatatacataatatatatacataatattatataacaatttgcatatgcataattatatggaatgtatatgcatagtatatatatacataatgtataatgtatatatacatacatatatagtataatgtatctagtgtgtatatatacattatatattatatatgtagtatatattatgtatatatgtagtatatactatgtatataatatatacataatatgtatacataatacgtatgtgtatacataatgtgtatacacaatatgtatataatgctatatattctgtacattatgtattatgtatatagtgtatatacatatatattatgtatatatcaaatgtcaggtagactcttgatatttgtgattcatctttctgaatccccaaatccacacttatggaaatcttacacgtttctagctttcccctgaatcatcttttttgtggaaagtcacttgttagccaaataagaaaccttacactccaaatcagaaacttcaactttcaagatttccataggcctggagactttttatatatcgaaacttcccaatcattttttaaaagttattttatgaaggtaaggacattcatgatgatgaataaagaataacaaagacaaaatgagaggcccatgtggagtggactgggtgagtgaggtaggctcgccacttacacaagcttgggagcagcatccggatgtcaacctgagtttacgtttcaattcctggcctcagcagcatttcaaattactacatggcatagatctttagggttgcaagtcaagcctggaaatgttaagctaccaaatgcacacttttccagtagtggttctatggctaataatgttaaggtatcattttcttgtcaggtttctttctctctcaaggatgagcaagataattcatatcttacccacccaggtcttaaattagaaagcttgtggtaaagttccctactgtcaaattttaacactgggctcagaattcccattgcaaatttacacttgtttttccaattaaaatgggcttttgtgagtcccctgctgatagccattggcttgataaaaagtaacttcatttgcagcaagggtgtttagggaacccagtgcaaggctgactcttctgctgttgccttgagcccagctgtgctgaaatattaaactttagtaaattaggtgaaattgcagcttcctggctgatacaataatgcctttttctttttctgcaaaccatgttcagcattagttttctgcacaattttctgcactgagataaaaattggaatatctttcaaatccaggcaactcttcattttctagatgattgtgccatattctacttatttaacaaacggcttaaactttgaaatatgtagaactagatttctgtattattctatcactacctgagtatagcattactttatgtcatactcagatgaagcaactgaatccctacaaatattagttttatataaaagtagaagcctgtttttattcctgattagtacatatattaacagcagtgatgagctatagaaggaaatcacattcctagtcacatttatttttagtttttttgctccattttctctttaaaaataacactagttcttatgtgcttttattcattgactaaacatttattgatcaattattatgtgcaaacttctgttttgtattcaacaagatgtttttagagtaaatccggaattagcagaaagagactagggacactggtatctcttgccttgatatatgttttcttgtgatggaatctttggtgacagctttatttggctgtctggcctggttgctcccaaatggctctcacttgggcctctttcaggtgaagaccatatgcttctaggagatgtcagttgaaatatcatatttttgttgcttgggaaagttaactcatgaaagccttttcaaaattgaagtcatttcaaaagatcttatcaaggtactcccaagatggtggaatccaagggttgcatttggaaaaatctcgaaactatacaaaagtaagagtgaataattttataagcctgcatataaccacaatggaattaaaacctagggaagtggctaagtgggggcttgggcagtcaggatagtttagggcatagagagttgagacccacttttaaaaaaatagagagccagtctgtttcatagtgtcattggatcactctcctgcaacagatgagatactcgtaaatgagatactaaccaatatgatctagaccgtggtttagttctggctgccataagaaggataccataggctgggtgaccgaaagaacagaaatttatttttcacagttctggagggtaagaaacccaagatcagtgtgccagcatggtcaggttctggtgagggtcctcttcctgcttggcagaaagctgccctcgtgctgtgtctttacactgcacagagcagagagagaggaggcaaattccccgctgcctgctcttatgagggaactaattccaccaggaagcctccaccccatgaactaatcaggtatgaaaggccccacctccagataccaccacattagattggggatttgggtttcaacatatgaattttgtagagacacaaacattcagcccatagcagtgttaaaagaaaaacatcagacaaattaaatttagcacagtttattcgagcaaagggttcatgaattgggcagcactcacaaccagaggaggtccagtgaggtccaccccatggtgtgagcagcaaagcctgataggccaaactcagaagcacagtggagaaactgattggctatagctatgcaggctgccttgtggggcctggtataatgagttggttgcccatgattggccagtagccccctgttcattacagcctaatgtaggtttccattgttaggtgggaactcaacgtacagagacagcctcaagctaatggcctcttgcttatttaagagcagtatgcaaacttttcctggaaagtttcaaatggtaaatattttaggccctgtgggctatgccacctctgtcatcactactcaattctgcccttgcagccctagatcatacagccatatgcagtcactgataatacaaagccatgggcatggaggttttccaataaaactatttgcaaatacaggcaggggctaaacgggtctccaggtagtaatgtgctcatgcctaaaggtctcctagcccctcataccagttcgctgtccctctgaatctgggttgaagtaagcacaggttactgcttctgttcagtgtcatgatccacccagcaattccccagtccccagctttcttcatgcgtgggaggatccagccaagcgactgcacagttttgaaagtttttgaagcggcccctttttctcctctcctctctccgcaggcagagttgtggtgtggctgggtggtctgcgtgggcgtccgggggattcgcgggcactcgggacgaggcgagggcgcagaaaacttggagcccaatcagcacggagttgagcttccgcgccccaaccttcaggtgaccccgcgcggcggcggcggcagcagcagtggcagcggcgaccggagcccgcagcagctccgagcgcctccgggaggacaggcggcgagctcggcgaatcgtcatctgccagccgatcgcggcgctccgcgggccggggccgggagcccggggcgagcccgaacgcggcttcttctccgcccgccgcggagactctgccgggtgggctgcgggcgcccctcgctgccgcctgtgaacgctgtgggtgcgcggggctgcggccacggcggcggtggcggcggcggcgggagccgcgagtcggggccgcccgggctgtgcttcgccccggcagcagcggtggcggcggcgcctgtggctcaggatgcggccggggggcgcactgctcgccctgctcgccagcctgctgctgctgctgctgctgcgcctgctctggtgcccggcagacgcgcccggccgcgccaggtaacccacccacccgccggccgcgccccgcgccgcgcgccccgcctggcgcccccggacccccaagccgcccatcgcttcccctcgggcgcggagacttttggccgcggcggggagcagcccacgggcggcgacggcctgagagtggagtgggggagggggtcgcagggaggcgaccctccgaccggtggacggcggctggggagcagagggaccggtcagggctgcgggggctctagcgcgcatcgctgtgggcgaggcagctgtggagcgggacctgccgtcgggttccgcatcaggatctcatgctccccattctggtccttgctgtctcttccttcccgccctaaggctcttccaactctggggctggggacctggcctgggagccggggagtgcgagatctccctgccaggcaaggagcgcgactcccagcctttcagccaacagctcccggcggggtgtagcaacttaagttttctccccggctgtgcaggattctggtggaggaaagcagggaggccacccacggcacccccgcagcgctgaggacgctccggagcccggcgaccgcggtaccgcgcgccactaacaggtacagcggcgcccagcgcgggcggactggggctcgggagctgcgagccgggcatggggcgcggctgcaccggcttggactcgttgggagtaggcaggctgggacggcgcgagtgagtgtaagagtgtgcgtgtgtttgaagagggcgcggggttgggggggggcacccttcacactccctcaaccctctaagcctggatgtgaatggtctttgaatcaagggggatcctccagcagctgcatttgaaaaacgggtgctgagttttcctctcgacaatggtgtgttgaaagcacccccgcccccgaccccgccacctttggagagaagcagctcagcctgtctttatggagggatttggttggtttgctttttcttttctatgct

SEQ ID NO: 4834 - DNA, 6000 bp, Homo sapiens
ctcccagctcacctgcataagcaccatgataaaaacaactagatgtcttcattggaatcttcacttgaatttatcctgtagttatttgtgtaactccttatgttgaacacatagctcattaattttctgccttctttccttaagacatttaaggctacaaatgttcttttttttttttttcccaagacagagtctcgctctgtggcccaggctggagtgcagtggtgcaatctcacctcactgcaatgtccatctcccaggttcaaacaattctcgtgactcagcctccaaagtagctaggatttcaggcgcacgccatcatgcccagctaattttttttggtaattttggtaaagatggggttttgccatgctggccaggctggtctcaaactcctgatctcaagtgatctgcccacctcagcctcccaaagtgctaggattacaggcgtgagccacagtgccgtgccacagatgttctttgaagttactgccttcactacatcccacaagctttgctgcagtttggcgatgatatacttagatttgctttgctttgttgcatttatccattttggggtttgttgagtgtattgtatttgtgagtggttgtttttttctttctgttttaacagccttagtgagatacaattgacgtactacacaattcacctatttaaagtatatttaagtcagtgtttttttagtatttaatatactaaaccgggttatacaatcattgccataatccaattttagaacattttcacatcccctaaaagaaatcttacagtcattagcagttaatctgtaaccttatctactccctatccctaagtaactactaacctactttctgtctttgtaagtttgcctattctggacatatcatataactggaattatacaataggtgatttttttgtgactggcttctttcacatggcatgttttcaaaactcatcgatgtcacagcatatatccacacttcatttcattatattgcagaataatattccactgcatagatataccacactttgtttattccttcttcagttgatgagcatttgggttgtttacaaactttttgattattgtgaataatgctgctatgaacatttttgtacaagtttttgtgtggccatatgtttcttttctctagaagtggaattgttgggtaatatagtaactctacatttagcttttggaggaactgccaaattgttttcctaaggggctccatcattttgagttcctagcggtaatgtgagagggttccaatttctccacatgttcaacactttttcttgtctatctttttgattatagccatcctacttggtgagaagtagcatgtcattgtagtcttgatctgcatttccctgatgactacagatgttgagcatcttttcatgtgattattggtcatttccatatttttgaagaaatgtctattcaacttgtttgcccattaacaaaaaaaggggggttgttttagttgttgagttgtaagaatctttgacaaattctggatctaagtaccctatcaagtatgtggtttacaaatattgtctcctattctcttgtctttttactttgttgataatattgtttgcagcatacgtttaatttctgtgcagtccaatttatctattttttttcttctgtcatttatgtttctgtgtcatatataagaaaccactggctaacccaaggtcactaagatttactccctttttttcttacaagagtttggtagcattaactcatacattgaggtctaggattcattttgagatatttttttcatctgtggttttatgtctttcattacttttgtaaaattcttggctattatatcttcaaatattgcttctgcttcattctctgtctcctctttttctaaggctccagttatacctatcctgggtttattcattgtacacatgcctattaagctgtgttctattttttccatttgtttttctctctgtgcttgagtttaggtattttttcttgctcagtctccaaattcactaaccctctgttctgctgtgtccaggttgctattaaactgatccattgcaatattcctttcagaaattacatttttcagttaaatattttccattgattcttttttatggattttaatactcttaaaattctgcatattttaatccatcttgttcatgttttcttctattttataacctatggctttatttcataatagttattttaaagttcttatctaaacttcaatagttggcttatctgtggatcttctattattttttttttcttgattgttggtcaaattttcctgctcttctcacacctcataatttttttttacaaatgttagacttttatattaaagatctatagacaatatagatgatgttattttcttctagggataaacatagacaaataggatgatgttctgattatctctgtctaatcaaggatgagctgggttgggattggggtgcggtttcagtaagatagttctcttgtggtttctctctcttcttcatgtgtgattcctctgggcttttgatcaagagcctggacagctgctgtttcctctgctctgagattcagttctgcctttgagaggttttaaacgtagatcttcagcctccttctcatacaacttcaaaaatagtgtaaatgtcttgaagggggagaatgcttgtgtatttgaggcaggatccttctaagcagaattagctttctatgcagtagaatatggggtaattttactctgcctatcacgcccagctgctcagcctcctgcaccaccccagaactcagcgaatgtcctgtgggaaaactggctatatgtttggggctcctctatatttccaatccatttcacagctcacatgatggttaaacatctcactggtttctctttttctgtgtaaactccctctgcccaggccaagctggatgagtctatgcccagaattagtacatgtcaccagggaagaaaacagtggatactgtcactcccttagttcagacctcagcaaaagatttattcaattgcactgtaatttttgggacaatgactgaataggtaaagaggccaagctagaagtctaaatatgaatatcactgtggtctttgcaggaacctggacaagcaagaagatcatctcagggtggacaagtgtcattggagctgggcagcatgaatttttgagtaataccttatgtccatgagaagtattattaatagaatccaattctgtttcagcatggccttagaaagaggatgggctatctttagatggagtaagtccccgaggttctcagacaacataaaggtaaaactcaaaagggaaatactaggctgtctgctacaagatcggggtaagaatcccagatttgtggcaatatggcaccagtttcaaaggttttattgcacttaatctaatgatcaaattaggagaaaagatgaatgttactataatatgtaaaagtagtgcttaagatcattaatttcatcttatttcgatgttttgttcattgaataaacagtaacctaatttagggacttggtaaagatgacgttcactttaagaaaactgatataaccaaaaataaactaggctgggggtggtggctcatgcctgtaatcccagcagtttgggaggctgaggtgggtagatcacatcatgtgaggtcaggagtttgagaccaatctggcctacacggtgaaaccccgtctctactaaaaatacaaaaaattagccaggcatggtggcaggagtctgtaatcctagctactcgggaggctgagccaggagaattgcttgaacgtgggaggcagaggttgcagtgagccgagatggtgtcattgcactccagcctgtgcaacaagagcaaaactccgtctctaaataaataaataaataaactaaaaatctgtggtagggggaatggtggtagggaggtagtcacaggattcagttcaactaattgagtgctctcatgtgctatgcattgtgctaagcacacaataataaagtccacacaagagaattgtggtggagaaaataacttgaaaagagcttgaacagaagcaatgcaagactagaaggtgagacattgttatgggagaggaggtttttagcctgtcttttaaaacagaaacatctcaattgaggtctgttttcaaaggaaccccaactggaggtgggctaaggtggataaactacatttctcctccaactatgattgagtcaccattattaactgttaattctaccaggtcattttatggtattatgcctgtaaatcttaattcataattagaagtatactttttgttttggtttcaattccttttctgctctacctctctctacttactagatttgccccttttagaacctggttcaacttgtcctgtcttctttgctgatggactaattaaatgcatggaagccataatcaattaatcaggcttcaaatatgcttttagtgttcgatagctaggggagaggaagacagtagctatttcaggggaagtccacgtggggcgttccagatggacgcgagatggctataaccgtccctgtctctcagcccatgtgggcgcaggtacagctgctccgtgcgcgccagtgattgagaggcatttcacccaggcccagatctggggcgccaggcgtccaggcttccggccacgcccccttcccgcggttgctaggagacatgatgtcaccggaagcgaggcctgggataggctgaggcgaagggaagcctcacccactgtgcagcccaggcgccgggcgctgcctctacagctgtgtgtaggcctgggggcgagggtcttcggaacgtagcgctggctgcggccccgcccgcctacccacccgcccgtccggcagccggctcccgccgcctccgcgctctgtctggggccagccacctggcgggccgctccggtgcgcctgcccgcgcttttcactgacaggcgctgttccccacagccagcgccgcccgccacgtcccagctctcggccaacggagctgcgcggcgggtgacctttccgagcccagcgcgatgacggctccttgctcccagccggcgcagcttcctggacgccgccagctcgggctggtgccgttcccgccgccgccgccgcggacgccgctgctgtggctgctgctgctgctgctggccgccgtggcgccggcgcgcggctgggagagcggagacctggagttgtttgacttagtggaggaggtgcagctcaacttctaccagttcctcggggtgcagcaggtaagcaaggaggcgcgcggggccgggcggagaggggccagggcaggcgtcaggcgacccggttcctcagagacagccggacacgtagggcagggcttggtcaccccgggctctggctgccctcagctcgggtcaccggggtcctcagccttggaaggacgtgtccgtcttccccagatctttactcctgcttcaacttttctagtcccagccccagtgacaggctggacggcgccactagcctagggtggcgatgccttctctctgctccggcgttctggggaagagccttccccctccagctgtgctggaggaagaacgaagagtggtgtgggtagacttttttttttttttaatttaacacctaccttttgccttcctgtccccctgaatgtgagaaagagcagccgcttctcaccctaaactgtcatcttccaccgatacttacctcatccttattcttatttcagctgcctcccctcctcttcccttctgggaaagtaggaatgcactgtggccagtgtctgtgttgcaaaagtttttcttactttgtacttcgtcatctttttagcctgttaggtagatgtttgtttcgctttcgcagtttagaaatctggaggaatttgaagcgtctaaccaggttggaggtgttaagttttttgagcagcaaaggacttgggatgcgattgga

SEQ ID NO: 4835 - DNA, 6000 bp, Homo sapiens
cgagactagcctggccaacatagcaaaaccccgtccctactaaaattacaaaaaattagctgggcctggtggcagctaatttatacaaaaaattagctgggcctgtaatctcagctacttgggaggttgaggcacaagaattgcttgaacccaggaggtgcagagtggccaagattgcaccactgcagtctagcctgggcaacagagggagactctatctcaggctggggtgcaattatgtgcaatggtatctctattagctagctgcataccaccatgcccagctaatttttactttaatttttttgtagagatggagtctccttatgttccccaagttggtcttgaactcttggcctcaagtgatctttctgtctcagcctctcgaagtgcttgaattacaggtgtgagccatggccccttggcctgtctctctatgtacatatacatacacatacacacgcaccgtatgcatatatcttattggttctttttctttggagaactctaactaatataacaggtaaatttgccaaggcagtgagtgcagccagaattcaaatgcaagcactctgaaccaaaacatggttctcttaaatcactaggttcaatgactgcttaatggataaagaaacaacataaaaattatttactcaccaagtagacattgtttgcagactgcagtgaataatacaaatggacaatgaatgggcttttgcttagtgccagtgcatctctctcagcttggacctgatgagtcatatttttgttgatcatgtctgcttttttaacaacctgtaatagataaaataaaagtgatatcatgttattttattttgagacagagtctcattctcttgcccaggctgagtgcagtggcatgatcaaagcttattgcagccttgatttcctaggctcaagttatcctcccacctcagcctcccaagtagctgggactactggcacacatgactacatctggctactttttaattttgttgtagagacaaggtctcactacgttgcccaggctggcccaaaatgagcctcaagcaatacccctgtcaaagtgctgggattacacgtggaagccacagctccctgccttgtttttaaattacagagtgatctcaggtttcaaagttgccatcatgaaaacgctaacagagagaacacatatagatgtcatgtggaccttacactgctatcaggaaagcacgtacaaaaaatagttaagacggtttaaaaaaatcttcaagatagaattgcttatcttggtattaaatggcagaagtatcataatctctttcaagaaggaaaaaaaattaaatattcccagactgccctgcatattaatagaaaaaaaattctgttccactgttctgataacgaagtcaaaagacagttacattcctcataagcccacagataactagcacctgggcgtggagtaactacttaatttttttttttaacttctgattttttgatagatggggatagaatcagaaagaggaagaatgtcggaagtttgcctagaaaaaaaaaatcttaagttggaatgattagaactactgaaatttaacagtcccaaatgctgtcttacagaaaactaattactcttttcaagtttcaaggtaatctgtacagaaacagaactattaaagttggagcactaagaaaaattaaaaatacataaataaataaataaaaataaagttggagcactaaactgaatagtcagtaacactgggatcaattctcaggactgctataagaaaaaaaggcatatttctttcaaagatttattcgagtacttaataaaatcattagtacatgataaattcctgccttaactcctttctttaagaaaactgagggaaactgacaaagcaagctggtaacatgatttttcctatcattccactggctatgagggcatgtgtgttttgttccccattgttgtccagttcgtagacacaaagagggtgggtgctaagcaaatactgactgaacacatggattggtgttttcatttcaactgatcatgactaagtactgtagaaggaaaagtaaaaatctcaggaacatataaagtaaccaattcaatcagatcttccaattctgaaagattagggaaggtgtgaaggggagctaagatgaatcttaatacatgaataagacaggtggagaagagcacaaaagggtagaagaaaagcacttaaaaaggaaccagcataaggccaggcacggtggctcacccctgtaatcccagcactttgggaggctgaggcgggcagatcacctgagctcaggagtttgagaccagcctgcccaaaatggtgaaaccccgtctctactaaaaatacaaaaaattagcccggtgtggtggcgggaatcccaactactcgggaggctgaggcaggagactcgcttgaacccgggaagtggaggttgcagtgagctgagatcacgtcactgtgaaactctatctcaaaaaaaaaaaaaaaaaaattcatagcagggcagggcgcggtggctcacacctgtaatcccagcactctgggaggccgatgtgggcgggtcacctgaggtcaggagctccagaccagcctggccaacataaccaaaacaacctggctaaattcaatctcggctaaaaaaaaaactacacaaatcagccaggcatggtggcgcgcgcctgtaatcccagctactcgggaggctgagacaggagaatcgcttgaacccaggaggcagaggctgcagggagccgagactgcaccacagcactccagcctgggcgacagagaaagactgtcttaaaaaaaaattattaaagacttctcagaaaatagtaatctttcttctggttaagaataaaacttaaaaagttatcagtgcctacagattaatcactcttctgtggtagaaaaatttcgacgattctgcacgtcaaagcaaacaaggtaaacaaaaccactaattactaaaaaccttttggatttagaaacctaactcgccgggcgcggtggctcacgccagtaatcccagcactttgggaggccgaggcgggcggaatacgaggtcagggaatcgagaccatcctggctaacacggtgaaaccccgtctctactaaagaaaccccgtctctactaaaaatacaaaaaatcagccgggcgtggtgacgggcgcttgtagtcccagctcgtcgggaggccgaggcaggggaatggcgtgaacccggggggcggagcttgcagtgagtcgagattgcgccactgcactccagcctgggaaacagagcaagactccgcctcaaaaaaaaataaaaaagaaacctaactcaagccagggtgagactacgaatcacggctttggctttaagtgcctgttgtactaagaccgatgtaatcacctcggtcaagtccctttgcctttggcctcagtttcctcatttgctaacgctgggcagggagaagagagtcaaactttgctgttctcactgggcatctgagatatggagggaagggcggaacagaggcgagacacccgacccgaccgctgatgtcgccccaaaaagaagtcagctcgcagggctctggaggcttcagcaagccaggccacccagactcctcgctccagcaaccccggggcctgcccaagccggtggggcaggaaggagggccgaagggcctaaccccttccttgctactcgttgacttcctacctttactgcatacaatttgccgcctttctgccccagatacactttcccgaaggcgccccggctaatgggcttcactatgctgaattcctcaatggagggcggttttggcactgcgatcctattcacgccctcctcagtcgccgcgcctcctccaggctccttcttgcttcccgcggtgggatccatcgctggacagcatacagcggccccgcagacactgcccctccgcgagcagccactcccgccaactgggttcaaagtgaggctccgcccacgccgcgcgcggccgtgacgtcaccccgccgccgcgccccgccctcgtcacctcccctacgcagacgcggacggagggggcgtcgggaaagccccgacttcgcagccttacactcttcgtgggcggcgaccgcggccccactgacatcattcctcatgagggaggaggcacaaacagttctgggccgaccagaaaaaggacgactgggacttgactctgaatcgcaggatttgaagagatttctcctggcttcccaacgaggctggtgggaagcggtcctcctcccatacacgacctcccaccctcgcgaggcgtagaaaccagttctgactgtacagtaaagcgagggccagggctgaggtctggaagctaatgaaagcacagaaagtgtcgaaactggatgagcaggaagcgagtggcctcccctgtcatctgacgttttcccaggatgtaatttgcctgactgaaacagatcaggaccaacagggagagttttcgatttagtgtgaggaaaagagcactaaattgtagcaaaagaccttattgctcaaggcccagtcagaagatttcataaggaagctgtagaaagtcttaagaggaaatcagccgggcgtggtggcgggcacctgtaatcccagctactcgggaggctgaggcaggagaatcgcttgaacccggggagcagaggttgcagtgagccgagatcgcgccactgtacgccagcctgggcgaaagaacgaaactccgtctccaaaaaaaaaaaaaacgaagaaaaagtccaaagagggtaaaggctgttctccccttaaaaaacagctaaagacctttgggggcgctgctccttgtaaatgtcaactacttccgcgggaaagaacgcgcaggcacttggccttgtgggcgctcacttgccccggaagtactgttgagttagcgcctcgccttccggggcggattgtctgtcgttgcagtagctgtaggaaggggaggccattttccgtttctgggaggagtgaggggcaacgggtcggagaaaaaggaaaaaagaagggctcagcgcctccccgccgggccgtggacagaggggcacagtttcggcaggcgggtgaggtcgctgagggcccgccggagatgttttccttgtcgagcacggtgcaaccccaggtaagccaggcattcagcccattttttttcctcccgccctgcccgtggctgtttgcaaattgcgctcgtggaagcgatttctcagaagggactctagaaatgaagtgatgtactcaatgcgaatcccaggattgaggagtggatcaggggacgacgctgagagtgggccggagacttcagtgctgacgatgaagctgttgagggcagaggcgggatgtgagctcagtgatagagagagaccctggcttatcgaactgattgcgtggaatttctgctagagaatccgtccggcattgttcagtgtccggcgttctggggtgggaaaatgtctgtaccatacattaaagggagcaggtaatgttcccttttttccgactttccagtggctttagtgttcacagcccctatcccctgctctttatttccttttaaatggaatttaaatttaacccaaacatggtataatatttcggatggccagccatgcaagtttttttctcattttgaccagaagtaactaaaatgtgtatttccgagtcgtaaactgtttgcagttaaaattttgattcagcctcatcctcatcgttttgtaaaacaaaaggtagtgaagagaaaaatgatttcaagggttttcattacgctcttgggcaatcacttgtgacaatgttttattcttgcttcattccagtctctttttttgatggtaacattttaatagattttttgagagttcctacagttttgcaaagaaatagtttttaaaacattgagtttttttaaaacataatttttaagaaaatcgacactcttaggttcttgatttaagcatatgat

SEQ ID NO: 4836 - DNA, 6000 bp, Homo sapiens
tttggttatggtgatttttagatatgatttgaagtcatttaagtcctaatatgtaaattggaatttgaaattaaaagttcatttctctttgaagtttatcttaccttgaaaagtagacataaacagcacactctttagttgtgcggtttgatcacgaaagattctgctttttctgttctacctcttgcaggttaaataacatgcagtgaaaatcatgtcataagaaaatatttggaagcactatctgatgttttaaatattgtttttgattaaactaatcaatatacgactcacagttccaaggcaaccacaatgacatttgtttaggcaggtagtctataaaagaactaatcgtgtaagtgcttaaaatagttattcttaatgttttgtggttaagatctcattcaaaccacaacaatgcagatatatatgtgtaagtaaaattctgtctagaattttaggggtttcatgacatcccattcataggcatgaggcaagaactctgcctaagataatatgttgtggggattaatttgagtgttgtgcgggagggcgggagggagttgcaggggaggtgttcttacttagcccaaatgcctttttttaagtgaaaggtatccttcctactccctaatgaatctggcctgaaattgagaagttcctaacttaaaattgcaactgctaactttcctcgagatgcagttaaatgagaaaataaataatattttttaaagtcactagctttaacgcattggcaacacgatcatttcctgtagtgagtgaccctggttcctaaaaataactccagtgctattcaattgcttatattgggcattttttttaattcttatttgggaaggacattctcttccacagctgaagaaactcagtgtttgaaaagagctgcctaaaacactgtttcccgtaggctgttaaaaatgttcagcatctgaatgctggtaaggaatgctcacacccattggaggcaatgctgtgtggacttgaaaaggaaaaaatggggcccctatatatggaaaacaggaagcagaaccagttgaggaaggcttactcatctgtgacccatattcaaagccatagtccagccactgttagttacctagaaaaggaaaagactgaatggctagcctaagctctaagggacacattgcaaatcaggtcaggctgttgtgccattttccaccttattttcaaataagcaaagaaatgaagcctcagtaccgcctggtggatacactgatacatgccatacctagtcaattgctggttgcctgatagcaaacttaattttttacagttcctctggcaatactctgctgtgagtactgaggagtgctcactaaatggaagccctcaagcaaaaaaaaaaaaaaaaaaaaaaaaaaaaaaagttgcaaattcaatacacttccagtttctctgcgttatatgactatttgcatgttatttatacatatggagactgaaaaaggaggaactggcaggactgtctcaccccttcttgtttttcaaaatgtcaataattcccagggttgctttacaccaatacacacagattcacatttttagagatgggtctcactgtgttgcccaggctggactatggtggcatgatcatagctcctgggctcaagtgatcctcctgcctcagcctcctgagcagctgggactacacacatgcaccaccacacctggctaattttagtccttattttttagttggggctgggggtcgggggcgggggtggtctcactacgttgttcagtctggtctcgaactcctggtctccagcacttctcccgcctcagcctcctgagtagcagattcacattttaaaacagtgattttagtttctcagggaaaggaatggagttatttatgattcagaagcacttctatgttagtattataggatgttatcagagacctctattccttccatccctatcccttcatctttttcttttttaatgtttacagaaggagttacattcaaagtaactggaagtgacggatgagaaaaatatatctaggttagtctatagaaacagtccttagaaaagtggctgaagtcttacctagccattgtcaatcaatttgctccaaagccatcacatacatttattatccaatggtatttaaaatccaagtcccatttatcagccagggtactgttattaagaaaaaaaataagatttttttcttaataaaatctcctagtagggcattttcatcacatagcaactgcctaattcttcatactcacccccacgctgcaactcattttccccttattatcaccaatgttgaaattagtcttcacctataaacctggaacctgatttgcaatatatccttatgaatcccctttgaatttctaaaattattcttcttattccttattatctggacactcttatttatagagtgatcatataaattatcatctatactaggacatacttttgagagttaaaaggggtgctaattaataataatataagtcaaactaatacaaacctgggcatccaataatgtctttcttgctgaacaactttgaaactttactttgcaaaatgttagatgaataaagatacattttgaagagcaagtagtagtatcaccagtgacaaaactaaaggaaacaccgactttaattatttgacataataatgacttaagagatggcagaagacaattgataataattgggagacagtgtaggtaaggtatggatttatcttgaactcaagatacttatgatgttctattaggttggtgcacacagccatctggtcgaccttagacacgggaaggcaagcaccccctggttgaccttagacatggaaaggtgagagctatctggttgaccttacacatgggaaggcaagacacatctggtagaccttgcaccaacctaatatgataaaagttgcagtgtggcttgcactattcctacttatcaggatttcctgtttagcacgtatgctgaccaacctttgcttagagtattcataaatttcatagctcactgtccacccattatttgtatgaaatcacaagtagactcgtattcttgaccaatgactgcagtttttagagaacatgtttctttaatttctttttcctcaaaactcatgacttctgtacacaaattgctacctcacacatcagtttagtcaagtgctctagcccagtcctgggagagcaaaaggacccatttattcatttatcagatattatctgagcccctattatctgtccttgcaacagtgcttgacggtggtgttaaaaagctcagtaaattgtcctggaggaactaatttagtttagagttgtgcatatgtaaatctcataatgttcttgtagcaaagactagctagtgcctccaccagtcacgtacagggaaaaaaattctggaaattgtagtgcaaatcaggcacggaccaattatgcttttgaactatacagttttctgtgctgagactgggccaattctgatgaattctgaacaatggtaaaaccgatacctttaaaattcaagaatgttgagttctaatggcagtttgaccattgagatattaatataggaacatcatttagcctcttaagcttgaacatccattaagtgggaaaaatagtgctcatttcctagaggtcttcagattggctaatcaagttttgattttgctggtaagtaatgagcaaattttcttagatgtgatcgcttcattttctcttatattgattggcagcagccaaatgggcattccagtccctaatctcctgcaagagaaacacttctatttcataaatctggtaatttttgagctcttttcccaacagggtgctgcagctcaccaagcggaacccacagcattttctgctaccaggatagcagcttgccagtagcatatactaaattactgggtttcagtatgattttggctggtacagacttcaatcatcgaatcgacatgcgttcagccattctcataatgaatgtttccttctctttcaaacgttgtttccagccccaatctccaaattttttttttttaagaggtgaaacagaaactgtactccttaggaagaaacttttccttctcatccctgttccccataaaggtacctccagataaatctatcaaaagcaggacgcaactcaccaggttttctaaaacgttccccagtctcaccacccttcgtgacacccatgggtttcccaattcttcacctttctcttagacacaggcaagcacattatcactccagaaaagcagtcctggcttagccagttcccttccagaaggaccacgtggtttttggccccatggagccctgcagggtaggggggctcacggtcccgatttgcctcgggactcagggggcttccgagatgcaggatctcccgggctcgaaacgggacatcagtggacaaacgggagcgagggtcgaacgcgcggctccgaggaagaggaacttaaagaacacgggcccagcaggctacaccaggaacgcgcggggctctagggcgcgtccgactcctcccgcccttcgcagaggaggaaactgaggcacggcgactgtctcaacgcagtcccggccctgccccccgcggcctccctcaggcgcgctcccgcgcagccggttcctttgtcccggtcgcacttcctgccccatcctccgcctcctcctagccccgggccgggctgacgcggcgggagaggaatgcgtttccggagggagagggcggcggcggcctcgggagcgggatcagacgcgcagaggaggcggggccgcggctggtttcctgccggggggcggctctgggccgccgagtcccctcctcccgcccctgaggaggaggagccgccgccacccgccgcgcccgacacccgggaggccccgccagcccgcgggagaggcccagcgggagtcgcggaacagcaggcccgagcccaccgcgccgggccccggacgccgcgcggaaaaggtaggggccggcgggcctcgggtgtgggagcgcgggccgcggcctccggtctcctgtgcgcggcagcacttaaagccgccggccgggccgcgccgggacctttgtgccgggcgtgggggtgggggcgggggcgggggcgggggcggccgccagcggttgggggctggggcaggattccaggctagtccaggaggaagtccgcacgccgccacccgcctcgggtccccggcgctggcagcccccgggcgcagagccagcccagccgcgttccgaacgtgagggtcgccggcctgggcgctgtcacgtcggggctgccggagctgcgggggaccgggcccgaacggcccctgacacctgcggtctcccgccgggctgggcaagcgcaggtgggagccagcgaggccacccggggctcggcgtttgggactcggcgctcccctggacgggtccggtgcctttgtctctcgctccctcgcgagctgctgtccttggagcagcgtcgagccagccgtcggcgcccgcgacggggactggtctcctccggctgccaggaggcggccctggggccagcgccgcgggcgggggcggcgggagccgggtagaagttggcttagtggagccgctggggaccgggggtgcggtggcggcagtgcagtccacttccccgtgtttataaacgtcaagagtcgccggtccctgccgggcaccccgggaccaggacgcatggccatggccagcttgtgctcagacccggtccgcgagcctgagagcccggcctgtgtctagtatcattttaccgcgtgtcatttcttaggcttcataaattggatttatgagactcctactctctaagtaacttttatttaatcaaattcgtgcttttgagtccaaaactttgcactcattggtatgatcattagtaagttgcattctctaagcttccgtttcctcatctgtgaaataggaacagtaatatctacattaa

SEQ ID NO: 4837 - DNA, 6000 bp, Homo sapiens
catctacatgtcagtgactcacaaacttaaaatctccaatccaaacatctcctctgaattcctaactcatttgattgcctcaaagacaccagaaactgtacctaaccccaatcaaattcatgatcttccttccaaattagccttttgctagtgtccctttgcttacatgaaggcaatcgcacccatcagtgatgagggcctgaatctttggtaacaccctctccttcattggcttatccaccaccatctgtccagttggactttctcaatacatctggaaagcatccttttccaatctccaccgccagatccttgttgaagttctcctttagattctactatggttacttcaaaactggtctcttcatttcttcccttgctccgcccataacccattctacaggcaactgccagagtcatctaataaaaatgcaaaatgaaattacatcctttgagaataaattcaacaattcttaactgttgtggccattgtttgatatttttaaaaattattttttattgatttaaaattttagctatttacataaaactatgattaaatattaagaggcagccagttttctattctggttgttcaaattatattttaaagattgccctatttaaaacagtcctttcaaattttgaatatgttctctctaatgatgtctctattgatttgaagagtgtttctgttggttataattattttaattttcccaatttaaaagtaatccaatgaaggcaaaatcatttaatattattatctcagaaaaataatacagttttcaaatatggctgtaacctctactctagcaaatgttttgaatctagtgtgattcaaaatttagcattatctttcttcatcttgttggttagtaaatatactgtatcacaaaaacttcacattgtaactttgtgttaacgttttagttggtagtcgtttctccaatatttgaggaattttcaaggtaacttttaaaaggctaaaaaggtagaatcagaaagtgaagattcatttgtttatttccttccttctctgtcagtacaaatcaaggagatggccaaaaatgaggcccagatgacacctcttgcatgacacagtcacttgacagaataaccactaataggcttattttaaacattagttaattaaaattccaacttttaatgtttttccagtttcacttcatctattcatacatctcaaaactaggttagctcctactaaaaatatggagcttgtattgcttttctgaaatttatgggtttgatgttttcaaaaaacttgactagatatgatgcagtttgaactaccaacccgaatctccatattgcatgaatctgaagtactttgagggagttagtggctcaaatggccttctgggagcaatcgatttcatctatttctgacaaagggatgagagcttgatgaaaggaatcgagcagttaccatccagtctactcttactgatgggccacggttccaatccgactcagggagccccagctgaaggccttatttctgcagcacctcctaagtgggagtccaggaaactgggctttgcccactcacagcctctgcagggcgttctgggggtgcggtagaggactcttcccttccctggaactgggtcctaccaagtccagggatttgttctatcaggaagaataatgtgttcaagagaccaaaataaaatcaacccgggaacactgccaaattcttcctctgcctatcacttattctcgtatagagccggcctgtctccacgctggggaattgcaaaaatctaaaactgacccctctcaccacttagtggaatccaacagcaaaggaaaaaggttgttagcaaggacaatttgctctgtaccaacccactggccggcaattctcaatcagtgcggtagggctccattacccagcactgtgagtggaaactaaggagtctagaaaaaccttagatcagctaagagcagagaaatcagaggcagaacttaaatatgacatttccttctgagtccatagtgcatcccttattcactggttggagaaagctggcaaaagcgctcagctggaggcaggcgttttctgtgcgttgaggcgccggaggagccattcccttcgggaaagacaaggtcggggtgggggcagtcgctccggagtgcacgatccggtggctttatttgctggcctggcgggtctaggctggaaaatgcacactcagcagggaaaggggaagagagattggcggcagttttctaaaaacaacacagctcaagtctccctcgtgtgccccctcgctcaccccgccgaggctcagagctatccaaacgggcgctccggagcgagcgcggaggtcgggtccccccaggacgcaggcgggcctccgagactccaggccgccccggccgccgctccctcccggttccccttccctgtcaacctgccaggtcctgagaggcgcctctccctccgagcctggaccgaggtcgctccgggtcaccctaaatctgatgatgccgctcgcccggcgcagccgggggctgggactggcggggctgcacctggggaggcggcgaccgcgcgcgggtagtagccgagagcccaggctgcctctgcggcgctcactcccccggggtctgcgctgggcgcggtcggcgcccccgcctcgcctcccgcctgcccgcctgcccgggcgcagggctgcccatggcttcgacagtgctccttccgctcaacttaggcatttaactcccagcccttcggtgcccacttcccaccccgcgcctcccaggggtccgacagctgagaagaaggaggaaactggcagaggaaagaggcgctcgggggggccgagtttccaacttggcgactgggaatcccgaggcgcgtggggaggagaagacaggcttgacccggggcaagagagtggcgagtgcgggctccgtgggtgcacctcccactggcccgggaacggcctgcaccccgaggggcgcacgtcactgctcccagcccgagtcgcgagcgcgcagtcctggcctggggcccgcgcgccttgggctttctccctgcccgcccctttttcttccgccaaaacctttgaccagagtctccttgccagcattcctacctccctttggccagctatttgtgccaggtaggaatcaggctgtactttggctgtgtgtgtagacgccaatccccaggaggcgtgtgaccttttcaccttacccacaaactccctgggaggtgccccgtgggcactgacccttctccggggcctgatcggtgaccgcaacctgtttcttcccagaaatgtccttgcttttcgcatctacaaacgcttcctgcagcacttctcggaaaaccctcggggacgggcctggggggcatccagcgggctgggggcacgagccgctgtgggaagtgggggtggcaggagctccagggccggcgtgcacgttgtctgtggccgggagcggacactgagagggcgcagcgaagagcacccctcccccgccactctttccctccctcgggatgcacagagaaacgggggccgcccgacccctgatttccacacccctccctagcacctgggctcccagacaaggttgggcggggtcgggcggcgattgcccccctgcttggaaggcgcagcacctcccaccctccggtgttccctctgccccagaggaacgggcaccaaatctcgggaaacaatgaagcctccgcggcgcgcagagggcacccagccgcgcgccctgatgcgggccagggaggccgcgtggggctgcagcccggcctcgcccgcccaggcggtctgtcttcgcttcacaccacagcgacactgctgcccctcgcccggcttcgcggtgcggctcccactccagcccggctttcccctcctcgccctccagctctgggcaggggcgtccaggggtgccccgctgctccccgccacaggtctcaggatggcgcgatgaggagtggcagggggtgaccctgcgttcctcgccgccgagggcgcgggccccgggatttgaagttgcgagaagcagccgccacctcccgggcgctccgcactgcgcggcggcgggatctgcgcctgcaggagctgcccagctctccctctaggggtgcagagcgagcacgcgaggtgggctggccagaccctgcggctggcactgacctccgcgccccttcctccgacgcccgcacccacgcgaccggggcgcagactcccagcgccttccttcccgcggagatccctgcagggtctctgggaaagacagacagacggacggggagagcactcggagggaaagttgttcctcccagtctcctgtcaggcaattacaggcgagcccaagcggggagaggggcgggaggaagcgagggaagggctccggagtggggggaggccgcaggaggggaggcgggggtgcagttggtgaaactcctctgtctcccgctcatcttttcattgctcgttcccctccttcccgcagacacccggacctcccctgggcgccagctccgcggctccaacgggtccagaaacaagccggattttttttttttcttcctggaaattggctttggtgtgtgttgccctacctccctcctccccctcccacccacagcccccccccggccttttttttttttttttttttttttgagacatggcccgggcagtggctcctggaagaggaacaagtgtgggaaaagggagaggaagccggagctaaatgacaggatgcaggcgacttgagacacaaaaagagaagcgttcctctcggatccaggcattgcctcgctgctttcttttctccaagacgggctgaggattgtacagctctaggcggagttggggctcttcggatcgcttagattctcctctttgctgcatttccccccacgtcctcgttctcccgcgtctgcctgcggacccggagaagggagaatggagagggggctgccgctcctctgcgccgtgctcgccctcgtcctcgccccggccggcgcttttcgcaacggtaagtgacaggcagaggcgcgggtgacagcggcgccccggctcccagctgcccgccccggaccggggctcaggcggggcttcccgggatcagccgggaacaaccgactcccgggcgaaggaaacttttatctgggaggagagaagaagaaatgagatcaggcggtttagagcaggaggatttcaggtctttgggctccctcctgacgttgatccttgggctgtggggcttttccttacctctgttacaagacagagctgtctaccttcccagatcagcatgccaattatcttaataatgtttcctcccaaaggcaattagaagagactccctttcaaaaatctgatggctgttgaaagttaatgaacactttaccaggagatcttacttcctggttcctttgctgctcccctaagccgtttcctctggtgggtgacggccagagatatcggtttgtgggttgatgaaactccctcccccgcctttgtacaccttccgtaatctgtctggagtatgactgaaagttacatagtatcaatacaggaatctgacatatacagtgtaaggcaccaggatatctgaaaatccctaagctagttgcagcttccacttagcttttaaaatcactcactgttaagtaaatgaaaaactatactggggtctaaacagtaccatgtaacctaaataatgtgttttaaaatgggatctggttgtaggcatgtttgacttcacactgtaaagtaagtgcaggcaagggtatgcaattatctttacagtaagtcgtcagcaattgttattaactaatgatcaaatatttacttttgtctggcttagatttcaatcacagtaattagaagaaaagaacatccactacttactgtggtatattgttttaataagagaccgcaagtggagggcctcataccaacaggaatttaaatcacatctttatgatgg

SEQ ID NO: 4838 - DNA, 6000 bp, Homo sapiens; identical to SEQ ID NO: 1578

SEQ ID NO: 4839 - DNA, 6000 bp, Homo sapiens
cagccagaaatgaactaggctgagcagccaggcctgggtcatggacaaagcgctagaataggggtgagtaggggagtgccaggtactgtgtggacagggaaggggaaggaagttgttccctccagagggaaggcagagttctggtgctggttgagaggaggcaggggagcaggcctgccaggcaggggagcagcagggcaggaagcagaaaccacgcccaggggcaggagcgagccacaggcccaagcccaccctgccagtcggagtgactgtctgcaggaggagacacaatttggagccagcatgtttcagtgggggacgagaagttctgatccaacaaggaaagatactccctccaagctcctcaaaagaaggggctggaggaaattaagtctgaggccgccatagcagaaccaaagagcagacaggatgctggcaggggaaccctccccctcctcacaaagaaggacctgggctgacctggtgcaatttgcatgaattgagaaacacagtcttccacatgcttctcagcgtggcctttatcctgctatggcctctgtgttcctcagtgatgagagatgacacttccttagacagggatgattcttaaggttaattgaaagtggcctttctcgtaatcatctgctgcaatgaattattaatcacctgcaggcatttgcaggtctttaaactcttggacttcctgcagccctccttggaagtgcttttgccatggaaataaaacttccgcttggccatgaaagacagaacccatgtctgctgctgtttccaggcttcccagctccacagacacggggaagaacaaggtctgaaaacaggaagcagagccagagctgctgccagaccctggatgcctttctgttctggggagctggctccaggccagccaggtctcagagcccccgggcagtggatggaggggaggctgcccaaagtgcctgtggctctttgcctgattcacggtcagcgccacaggagagggtctcctgggtccttgccctacagctgctcactggtgaagaaggaacgagggagccaggtgccaggcctagatccaccacttagtgggtgggccaggaaacctctttgattcagtttcctcatctgaggaggaggtcatgaccctgcagggcagacatgaggcagggctccatgggatcgtgtacatcaggcctgcatctcaatgctcagaacatcaggagcagcaagaaggatgagctccctcctgccacctgcttttatcttcccgtggaggaagattgactcaaaactcagtgggctggctggcagtgtaaggattttgcagatagagctgacaacgtgattttgcagaccccagaagctggtctgcaggaccagggcagggagctcctgttgggccctaaattgtgagcccaggatgtgtatgatgcatggacaatgtgggcagaagctggggcagctcatcccaatggcaagagcccttcatctgccattcagcacagcctcagccctggaggtggatagtggcgatgccaagctgaataagacacggccccctgccttcatggaggccctcggctgccaggaagagtgaggcagcagtctcaggcacagagtcccatattcggcatggtagctgcaaggaccatgaggacaaggaggggatgatgaagggtttcacagaaggcaagatgctgggggttcatcttgaaacatgagcagtggagaaggagggtgggaggggcattgagtatttcagacagggagagagcagcatggtgggagagcccagtgcatacgcagagccgtggaagtagctgcatcagtctgggcacaagcactgcatagagatgggtggtgggggggatgagaatgggaggggagcctggaagacaacagctgggaaggggagtgggtgcagcatggaatctgaagagctgagaggaggcccatgcagagctccagatgagaggtgatggagggctgggcaaggttttttgccatgatagagatggacagaggaggaacagctgtcaggacttggtgacacagagaaagatggggactttggaaaagcacagcatgggggtcgagagatggcagctctgggcctggcactcaggaagtgccagaagggattcccttttcaaaaaacatcccactacccaactccacccccagaacagcctgagtacagctcgggcgcaatcatggaggcagctggtgtggatgccatgccccattggggtggtcaggtgggggtgcatggcagctgggggaaggggtcaagatagctgacgggttccatgtaggggtcccctgagccttgctagctgcctgagtccagtgttgaggcacactgaactctagacagaggaaggggaaatgtaagccacccctcccagggtactgcatggacaacatggtccacacaatggtcctagagatatcaagtcctcatccccaaccccgtgactacatagcaaaaggggctttgcaggtgtgattaagttaatgatcttgagatgggggtggtggttatcctggattatctgatgagcctcttatagagaaacgccacactctgagatgaattcagaagtcctttattagccggcaaccgagagacggctagtgctcaaaattctctcggccctgaagaaagggctagattttcttttatactttggtttagaaaggggaggaggagcctagctgaagcactcttacagaagcaaaacaggcaaaaagttaaaagacaaatggttacaggaaaacaaacagttccaggtgcaggggttttaaatccatcacaaggcgatagatgcgggggctttgggtaccatcaaccggacacaaatgtgggggcttagggtactatcaactgggcaaattcctgggaactgcggatatagcttgccacagtatcttatccattaattgcattctttgatgtgctgggagtcagcttgcacaagttaagtccttgaggaaggggggtgggtaaggggctgcaagtgaaggagccaaaatggagtgtgtctggctctctcagctaagggacagtcaattcaggttaaaacaaggtagggtatcacacttacaagagggaggcagaaagagttgatgtgaaatgacctggagtgggagaggttagaaaaggctgtgctgccggctttgaagacaaaggaaagggccactagctagcagcctctaggagctggaaacgctgggaaacagctcccttgcctccagaaggcacaggccctgccaacccagtttagattcccgaccccccgaactgtgagataacatgcatgtggcttaaactactcaatctgtggtactttgttgcaggggcaacaacaaacatacagacatctaactcagacccgaggccttgggtgggacccaggccccatttcctgagacacctgctcccacagcgacctggggtaagcagaagtgggggaggattctccagacaccccagactgtctccaagtagagcggagatctcgccagttaagcgcacagctgaggacagttactgggtgaagtggcctgggtctccgccttctcatgcccccaccgcccagaccctagaaggggagtggctgcggcctctgcaccctggcgctgagggctcccagacccggcccagtggggcaccccagttcaccaccctcctcgccttaggtgagccaaagcccaggcagggtggagcctcacgcacactgactgccccctaggacaggcacaggtgacgcgggggtgtgggacccaggctatgactctggacataaccttcaaggctgtaaaacgagaaggtccatccccccaaaacacgcactcccccacaaccaccccctccccccccccacacacacacactcccctgcaccacagatacacacattcctttcgctccccactcagacgcctcgaggcctcggcgggggaaccataggggcgcgaccagggcgcgccgaggtgtgaccagagaggacacgcagcgaccttactcccgcctttcccgcaaggcgcgttcgccagcctggactagtgggcacgggccctgcgttctaataatcaccataataataggcgctgggtgtacagaggggacccaggcgacgctggcctccatccgataaccaccgtaacaggggctgggccgcgccgctcctccgctctaagtgctctttacatgcttcttaagttaccggcaggccagccgcccttacgagagcccctcacggacattaacccaattgagaagactgaacccagcttacgaacgttaagttgtcccaaatcgcagggctggcgagtgaggagcctgaattggaacccaggagcttctggaacccgctccagaattgcgctctcgaccggtttgtccgctgagagcgaacgggtgcgcgagcgccgcatccctgcccaaggccatcaggcaggcagcgctggggccggggacccgcgcggagactccaccccgggatccgggaaggctcccccgagccggggtcggagctgcggctggaggggcctcggcttgaggaggatctgggagggcgggggctcagtcctggccaccaggtgtgaggggtcgggtgcggagccctgtgtcagacgcggcggtgaaggctgtagccctgctctccgggatgggggtggtactctcaccccaccctgccccaagccgcagggagcccctggcgcccctggcgcccgggacccgccctggctggagccctgcggtttccgggagctcacggtcggctctgcgcccctccaccgccgggcctgggcctgggccagggacgggctggggcgggactgcggcctcggggcgctgggtccctgcccctgccgtgcactgcgcggctccccgcgccgcagctgggcaccagcagcaccacggaccgcccctgtgctcgcccgacggcgccccgcggcgctttaagagacggcctggcagcccagccccagccgcccagaccggcgagaccagcctgcgggagcagccccatggcgggtaagcgagcctcgcctccccagcccagccccggcccctctgcgacccttccagcacttgcctccgccccgccgcccccgctggggtgcagcgcctgccctgcccggcctcggcgcgctcttggaggggcactgggatggagtagacgctgaggcccgctcttcgcggtcagttgcggcttaggaggtgtggggggtccggccttctcaccaccccacccagtgcagatccctgagacctgaatgccccgcggccgcacgtcaccctaagggaggcacctttttggcccgccccaggtggccagcggttggaacccagcgtctgagcacccccggggcgaagcctcctaggtcccgcaaatgcggacgtgtgagggccagcagcaacggggtcttgcccccttttcctccccacctcgtccaccgcgtcgcaccaactcccctaagcgcgtgctcaccttgatagagggctaggggagggagcgggtgttagagaagagtccagccttgcagcaggttccagggccccagagggtagaggtttgattgcagaccagggggaaggtacctttcagggctttccttaactgactgcgtccacaccccagctcccctcctggcctcaacaggagcccaggggatatggaggttctggtgagggcaggtttgatttctactcagaagcgcaaggaaatggcttctttaagccagaatcccaagggcagggccagctgttttccaaggaaaactagaaggttctgcccagggctctcagaccctggggtaaacggcttctcctctgagagctggcggaacctagccagcagcatccctcccggaacccatccccagcaggcctgctcctatcactcctgagatcaaacccagaggcagggttgctgccctagttctgccccagcaggccagggctgtgagggagagtggctttcccaggca

SEQ ID NO: 4840 - DNA, 6000 bp, Homo sapiens
catttcagatggggagaattttataccagaaaaatattcaattgctatataatctttaccttccacaaaatacttataatccagctagtaaaaatctttgattaatgtttcaaaaatagtttctatcacaaaaaagtaatcacgcatagtgatttcttattgttaaacaccattacttccacgattttatttagcatttctgcagcagatcaggcttcagagaaaaaatgagcttcagtcagagggagtaagaggataaaccatttgattctgaaattttttctacagttctgtattctctatttattttctttatatcaaatacagcaagtatagtttagaaaatcctcaaattgggccgggcacagtggcttacgcctgtaatcccaacactttgggaggccgaggcaggcagatcacaaggtcaggagattggctaacacggtgaaaccccgtctctactaaagatacaaaaaattagccagacgtggtggcgggcgcctgtagtcccagctactcgggaggctgaggcaggagaatggcgtgaacccgggaggtggagcttgcagtgagcggagatcgcgccactgcactccagcctgggcgacagtgtgagactccgtctcaaaaactaaaaaaaaaatcctcaaattacaaaccagtaatatgccaaaacattcattttttgagttggtttagaagttaaaacatcttttttccataaatgtaaggattaatgttaagatgcaatgacttggttcctataacacacacgaagcatgtactcccgtgataagtctaaagaacctaaagaccgcacacatcatttcatgaaaaaccaggagtgttccagtgatggcaaagaagaagagagctctctcctgtagccctgaccctgagaatgtgttctctctccagtttcaggcttcctgaagcctggggaagggatgaaggaggaaaagcaagaggtaaggaaccagtatcttctgctaataaaacattgatcagtccttcttagggcctcagagaaaggactgcttactgctctttgcaatatcacttcgttaagcctttatttcctcacccagaaaatgaagctaacaacacctacttctaagggttatgtggatcaattacaaagcaaaaattagagaaaatattgtgttcagcctcacaaagcactcaatatgttatctctcgacatttccacccagtcttttttttttccactgagatcaataattctccaactttgacttcacaccatttacatttactctcatcagcaacattattcagtacccagtatattttaatcagcaagtcattcaattaatagctatagatacagccaaaaggcacaaaatgcaataaaattcacctgcatgtcaaaggaacattccactttcacaaaaagtctatagcaacacatctggataaacctgcgtcatcacaatgtgaataacatgctgagttctgccaatatgcaggtttgcagatttttttttttcttttttcagaagtggggtctcgctatgttgctcaggctggacgggaacttccgggctcaagtgatcctcttgccttagcctcccaagtagctgggactacaggtgcatgcccagcaaaattagcgatttcagtcaatacaagaaatatgtccaggaagataaagaatataaaatttaaagatactgaataaatatccatttcgctaccccgcctacttgtcctaagataattatatataaaaatttaaataccaagttcctaaaggaatcccaaaaattcaaacaatgggcttttgatacaaatatagtctttgaacattctgttaattggtgtcctgtgccaggtatacagaaaacatttaaacatgcgaaatacagccccaagtattcatttggtacctcttctgcagaaatcttaattaagatccaaccagtgaggactgactgccctcacccctatttgcaactaactcctcctcctttacatgcaaataaggttaatgaaaccacaaactatccagtcacagaagctgaagtacacctgaacatatacctgaagttcaccttcagttccctctcccctataccaagttctctgaaatctacatcctaaattttaaatccatcccttcctcatactctttaaacacatcgcttactagacaactgccatttgtttcttgcaactagtctccctgtctacagccttgactatccagtgttctacaaactacaaatgaccagtcatttttcaatgaaataacacagacaatataagaatgcatcacacatagaaagattaagtattatttcatgaaacatttatttcagttataaatatggcttatttgccaggttacatatatttcttactctgtgtactggataaaatttatgctgtgggttgcagttaggaaagtccaaaagccacttttctaaaatattaaccaaatggtattcccacgcttaaaagctttttagtggtttctccattaaccacagaataaggttgaaattccttaaaatggaatttgagtttcttcataagctcctgtctgccacccagcctcatcagacactcctctgtcatcttatgctccagtcttaccaacttttgcatgtcttattccctctgcgtgtataattctttctcctcttgatttatacagcaaatcttcctcatccttcaaggcctagtgcaagtctacttggtactgtccctaagttcgaagacatctaagtgtacactcttcaccagagaactgcccgagctctgcccagcctcttacactgttaatgaatgcatcctttttgaaatgctctcctttgtctgacacaacacgagccaggctttcctcccacctctacagccgcttctcttcagtctactcttaaactttggtgttcctaaggcttctgccctaggtcacctttactttctctacatgtttatgttatctatgcccatagcatccattataatgtttatgccatgaactccccaatctacttctccagcacagaaatatttcttctcaagtatcccattctttcatgaatccatccccttccctattgccagcatccaggcctaagctacaattatttccaacctagattaactccttaactgagtcttgatgctccacttgagttccttttcaatccattctttattttccacacaccagccacacagacttttcaacaaataaataagtctaatcaagtcactcccctactaaaaacccttgagtagcttatcaatgcccttagagttcaaaatccttagcaatgtctacatatccaatttgatctgacttttctgtaccaccctgcagcctcatctctcacactctcttgcgttcactctatatatcaattgcactcctgtttttgttttgttttgttttgttttgtttgaggcggagtttcgctcttgttgcccaggctggagtgcaatggtgccctctcggctcactgcaacctccgcctcccggatgccagtgattctcctgcctcacctgcctcagcctccggagtagctgggattacagttgcccgccaccacgctaggctaattttttgtgtttttagcagagacggggtttcaccatattggtaaggctggtcttgagctcctgacctcaggtgatccacccgccccggccttccaaagcgcagggattacaggcaaaaccaccgcgcccggcctccattgcactcctgaaacacttcttacttcctcttcatctaactcctactcattctacagtcctcagaataagcatctcatcttctggaggactattttcgattccataaattcagttaggtaaaacaatctgtctttcatctatcagaacatccattaccttttattatattaacttttgctatcgtctatctctccagatagattttaaggtatgaaggcagaggccaagtttctctcattcaacactgtataccagggacgggtacaatgccagcttagactaatagctctgcaccctgggacccagaatctgcacaagtgaagttgttttcttcctatctagaggctgaagcgccctactgttttacatacacaattagatctccttgacgactaaggcaatttctcaatcaaacctgaagaagcaaacaggtggtggagtctcctgccattttccgccctgtgagtgactgctcatcagagtttctcacatcaatcgcactgggaaaaatgcggccccattcacccactagtggctttggtagctcagcaagtggacctcagagtgatgatgcacacaagaccagaaaggagtgactggagtccctgagaccagaaggttcgggccgaggcgaaggacaaagatttttattttcccacgtaccaagcgaggtggcgctgcctctgtgctgtcccgcctgccctgggacgcaggctggcgaggacggtgggaccctgaactgcacgtgagcgtccttggggtcgaggacgcgcctctgcctgctgggaaagctccgggcgtccgaagcagccggcgaagttgtagcggcgccccagcggggtcgcttggtgcagggttcacagccggggcccgcattcatgctgggaccagcagcgcactgtccccgggccggccccgggcggagagcctcatttcactaacctgagagagatggactgcgcgtccttctcagcgcctgcctgcaccattccctctctgccgctgcctgcttctgcaattgctgatccgccggcctcccaagtcaggccgtaaacactcgcctgctttctctcttccactggcaccccacctgcctcaatgcgccgctttgattcgggattcgttcactttcccaccaccggaaagctgccgtcaggcgcttccagcttccggggcgcacattgccgcaaagcggaagtgtggcgcttaacgggaaccggcgcccggaaggtcagcgtgtgaagtaggcgctggcaacgcggggttacccgctgttattgaggagtaacggcccagcggaccacccaggcttgaggcagcggcgggaaccactcggtttgctgcgataccatggaaggaggcgggggaagcggcaacaaaaccacagggggattggccggctttttcggagccggcggagcaggttactcgcacgcggatttggctggcgtcccgcgtaagtatggggcctagcttgcgattatttctgactggttcttgcgtctacactaagttgcgcgtcccatgttttatgttgttgttttttttttccttgctggcatttacaagcttaagtaccagtggtggggttagtgtatctgcatggctgctctttcaagatagaaaggcctaaaaaagggccacggatctcctggggaagctgtccgtgattgacctggactcgcgagatgatgcatgttttcttaggtttatatccaagcctcctacgttttgtgtgtggtgggccgtgtgattgacccttgattaagagtagagccgagctttgggagtaaatgtattccaaatagcaagcccgtagttaactttttagtacacagcgacatattctgagcctccaagtagccgtcagggcagaatattcagtaatattgtttgtaagtgagaaataaatatgacttgggacaggctaggaaaccttctttaggagctaggaagtaagctgaactttaaaggtgatatatagacatgaagaaagaagccaggtaagaattatagaaacggaaataggcaacatcaaggtatacagaggcataaatatcttgcctttgcctctcctcggtcttgtgaaaatgttttccagaactttggtactttgtaactgtggttgttcaactagataaatacaacttggacctaaagataggcagttggtcgtggataaagcctttacgaaagtactttctttttagagaatccttgtaatatttctctaggtattttatactaaggaacaacaacaacgaaatatg

SEQ ID NO: 4841 - DNA, 6000 bp, Homo sapiens
tgataaactgcacatatctaaagtgtacagtgtgttggcatatgtataccctgcgtaaaactatcactgcgatcaaggtgaaaatcagacccatcatccccaagtgcccttttgccccattattagtttgcatgtcctagaattctatgtaaattgaatcatacaatatgtatccgttttttggtcagccttattttactcagtataattattttgagatccatccatgtggtagcatttgtcaagagtttttgtttttgtgtttttcattgctgagtaccacttcattgaacagatttgtccattgacctaccgatgaacacttgggttgtttccagtttggggctgttataaataaagctgttatgaacatttgtatacaaaaaaaggtgaaattggagatggaccttgaaatattagtaagattaagtggccagtgggaatctggggaaataggattcaactagacaagagggttaatgaatataggtagggttgttcttgttactctctggaagagattaaaaacttgggagctctcaagtggtcatttcatggaactgaaggaaaaaagccagaaaccacagggagagaataaatagaaatgcagaggagacagagggagactttctgggttcctttcaatactccagttcctggtttccatctcatcccgaggctcagctgcatccctgatctaccctggtatcttcaaataaattccaagttttttgtcaatgaatagaagccaagcagttattgaagccaggaatcctagccaggtacacaggaatgagcacagaatgttgagtattatcagatctaagcctcggggccaatacttggaatgacctttgttgtcttcgactagcttttttggttagccttggtttggaacccaggttggccagaagagtttaaagagctaagcaggggctcctaaggtcttgctcctgttattcaggctacgtggctctggatcacattgagacaaatttccatggatagaaacaaaagtctccttgcttccagagcactatttgaactttgactacaggtggttggtagtgatacctatagtatctcccatttaattccccagtttagactgtgcagaagacaaatggatcttgaagaatgactgtggaatgtcataaatgtaatcagatggggactccaatttcagctgctctcccagaagtagtacctttactggggcagattaacacattggtatgcacctggggcagatctgacatttggtatgcacttatttacctggctaatgccttttcctccataccaatttgcaaggtccatcagaagtgatttgctgttacccaacagggccaacaatatgtcttcccagtgttgccacgggctccattagttctcttgctcactgccataatagtctgaagtgatcttgattgttctgacattccacaaaacatcacactggtccactctattgatgacattatgtgagcatcattggatcccatgagtacgaagtagtaagtactttagatgccttagtaagatgtatgctagagggtgaaagagacctacagagattaaggtggtgagagaagcccaccttctcaatggtgagtgatggctactgctgaaaggtccactgaataaaaccacattttaaatcaggtagtttaccttctaaaggtagaaaagtcattcatttggaaccaaaccacctacttcagaatagctgttttggtaagtgaagcatttgcttcagtatttgctcttagtattatttttaacaagatttctaatgacagattgtgacttggaggtgattcacttttgtttcctagttgtcttgacagcaacgtaattcatgatattctgagtacttgagaatccaaaaattttacaatccaacaatatgatgtttattaaaattttcctaagaaatacactggtaagcaaggcacagtggctcatgcttgtaatctcagcactttgggaagcggaggcctgtggattacttgagctcaggggttcaaggccagtttgggcaacatgatgaaacagcctcggccaaaaataaaaaattacctgggcatggtggcttgcacctgtggtctcagatactcaggaggctgagggtggaggatcactggagccctgtaagtcaaggctgcagggagctgtgatggtgccactgcactccagcctgggtgacagagtgactctgaagaaaaagaaagggcactgataaaaattctttaggattggatggactaaagagggagaactatttttattcaatttttttttttggttacaaataatagtgacttaaggaccataactaaatataatttcaaggaggggcaactcttagtgtctcttataaccacttcacacagaatttacttttactgctatggtgatttctctttagatttctttctgtatttatttacgcttttattttttatgtatggtgtatatatctatgactttttctctctgattttatgaaactgaaattaaagtggaaatacttctatgccctgcttttttccatgtgctatatatatatcatcctaaaattacacatggaaaaaaatttaaaaggattttattatgaaacatttcaaacatatagaaaatttgaaaaaaaaaattatgccagtaccttagacacacgatttacattcaagaagtattaatattttgaaaaatttagttatctttcatgtgggggtggggtgcattttaaagtacatcaaagaccagatgcttacttggacctttgtttcaggaagtccagagcttacagcatattctggatagcactggagagaaaccaacacgggagagaaagcagccagcagttttctggcactcccttagtttgaaaaaatttacatcacaagaaagcaagccttcctttcaccttttaggtgcaaactgataaacataaccagtagggctactatacttcacagagccttgctcccagtagatactcaaaacatgcagttgaactgaatttcagttgttattttaaagccgtgcttgaaaagcgtatgtgacaaatgtactttcctaatcttcctgagaagagcagtactgtgtcttacgggcgaaaaaaccagaggagccaggagtggagggtgcaataaaacgcctgcattggggcagattgcctcattttgaatccctgactcctcactgtgctttggggaaaactatggaaattttcactgcctagcttattaaaatggactgcttagctgaaatatagaggcgtccatgacaactacccggagggctttgttaatcatattgcaggactccacccgcagtttctggttctgtaggtctaggtggggccgaaaacgtgcatttctaacaaattctagggtgatagtgacgcggcaggtcccgagacaacaggaaacccaagggactcgaggcaggcgctcaataaatattcactatgaacctcagcaccatcgaagcggcccaccagcaggggccgcggggtatgcgctgcagggaagagcacggcctctgtccaatgtccctgccggtacatcactcctctgcagggactaggttagaaccgggaggcagccagagcagcgctctcgctggataacggaagaggactccctcgccaacttccgcctctggggaaaagcggggaccctccgccacctgagttctgttgtctcgatttcgccgcagtttgcttctggcccgggcgagaacctgtcctctgggcaagccaggggtcggtacaggactcctataccccaaggcgaggcggaggcaggtgccgagcggtggccagagtccggcgcccaaagcccgatgggagggcgtggcgggggaggacggtcccgccagctcccaggtcggttccgagcgcccgcggcccgatggccgggcggaagatggctgcccggagcgccgcggacagtcacgtggtacgccgggcccgtagccgcgccccttcccccgctcgccaagtccccgaccccgcgggaggcacggcctcgggctgcctgtaggccaccgaggtgcggcgcgggccggccagggacggcgggcatcggggcgggaaggccagctctccccgctgtccatcctaacttgggcgctggggcttcgctcggggagcagaggaaaaccttccttcaggcgacttgcaccacgtggggctactgggcatgcgcgggctccgaccccggcctagccgctctccgggttttcgccgcagctcggaggggcggcggaaggtgggccccaggcggggcggggcggctctgacgcagtcggagttttcacctcgcgcggttagagctcttgcgcctccgtcgcgctcccaggcgtcgccagaggctttttttttctgttgtgggagaaagatgagagtctatggttagaggtttgaaaatgggccgaatagtcaggtcggccgtttcctaggaatgatccattgggcattaatcccaagtgtcgcagcccttgggcttggtgggaaaaagaatccagtagtagttcgcaaactcgtgcctggcttccagcaggctgagtttgcgttccctgctttgtgaccagctctagcggctcccgtctccggccctgccccaagggatttaccgtcccagattgtaaaatctggctcccgctaggccttacttagtgggcccctaaaaacgctggggaaagcgcccgcctcctcagtttcccattacttgaaagtaaaattcaaggggcccaaactgcgactgtcccttggttcggggtcccgctcggtcccgggaggagccccccgcggaccccgcccggccggcccgcccccccggccgcagtgaacacccggaggagcggagtcgcgtcgcgcgggaagccgggccggctcgggcagcggactgggcatgctcggcagcccgggaggctcgcggtggcaagtcgaaagcgttcgcaccagcggggcagcggctgcgggcggcaggcggcgggcaggtcgggagtgagaaggaccggcctgggctgactgctctcccctcgcgcctagggagccggtcggagagcgcgattggggtgcggagccccgacgctgccctgccccggatttcattccgcggcgggggctccgcgagcggaattccggcggctgccgtgactccagtgcaagtgagtcgtggggcagggacagacagccggcctcacggttgcgggggccgatcggacacctgtctcgcgggcccggccttatgccggggagcagcgggcgggctgctctggggcgagggggcgtgagcgcagcccgcgcggtgccgcgcgcgtacctggcgggcagtcctccagagctgctgctcccgtgggtggtcacagcggggaggtccggcggccgggatccgggctcggagggggcgggccgccggcggggctccccggctaagttggggcggggaggaaggaggaggcgtcagtgggcaccttttcagagctactgcgtgcgggctggaaggctgcctggtgtcggattggggcgatcgggaggcggggagcctttgggcagtagcccgcccggggtccggagacccccacccaggggccgactccaatcacggctccacccccacagcctaggtggcggtgtgacagttggtaccttcggtccagatcgcagccggccaggcgcccactatttcgggatccccccaccgtagcccctcgatgccccctgacgacaaaacaggtgggaccccccctccccgaggagcgctccccttctctccaggccgcgtaacagcccgccaggctcgcgggcggctctgagaccccgcagggctgcccccgcggggcggggacgtttaggggcaaggcctggaggggaatcggcgcagcccagaactggacagtctctccaggacgccgcttttccgtgacagagggggtctgcgctatcccccagcgacgtgtcaagggcaaaacagcagcagcagcggc

SEQ ID NO: 4842 - DNA, 6000 bp, Homo sapiens
taaactattttgtaaagtctaaattcttctccttaggaaaataccagaagtattcctaaggaaagtataagatagctctaaataataaatctgttaaattaaaaaagtattttacaaatattatctgcacttctctttagttttattttccaggtttcaaataattttagattatatgaaatattcaaataatttgactttataatacctaatctcactcaagcataaaaatagtccctatttgaaagcccaacagaaatgcttagaaataagtttcttgctctaaatttaatactctttaagaattatattttaaaagatgatgtgaacagttcaacatctttacatattttactaaatcacattgtatatttattatacacctataattttatgaaattagttatttcttggagcattgcccttaagctactgtattatatcccaaattgcttttctcaaataacagtctgcctgttggaaactcagcagagacaagtattaaataaagattatactgttccttatccctcaagttgtcactataaaacaggtaagtgctagggttaaaaaaagtgaaagtagatattgctggcaagaaactaaattaactatgtctaccttgaattctgacaataaaagggtgtcagaataaaaaacaaagctatgcaacatgaaatcatgacaaagacttattggtgtgaatacagatgaccctccagttgccaagtccctggttaaggtctttttgtgattataaccaacagctttgaatctcaactctaaatgactgctgacaataagtcgtctagaatgactcgatcccaggcaatttggtgagacactgcttgtaatgagcaaggctattttgataatactgcagaggccttcattcagtaaaactttaacctgggttttaaaaaaatgccttctctacctctctttactttgcagttcctattgactccaggactcagccctcatcctgaggatagacaaaatcctcttatgtcttcctttctcaaagacatatatttgagaataatatatgagttagtattggtttgctatatttaacccgatactttgaaatgttccctaccaaaacactggaaatattataagaaatattatatttagttaatatatacatttgccagagtaagtcaatggcataaacagtattttaattctcttgctggtgagagaactagctttgcactgtagcaaactctgtatatatatatatatatatataatctactatgaaaacaagtcaagattccaaaaaaattaaatacagaaaaagaaagtttgtatctttgactagatatttgcttttcattgttcattaaataccagtgcacagatgaactggcatgaacacaaatgtttatggtaatcttcacagctgtgtgtaggatgtagctaatttttggcatacagtagagcattatgtgtttctatatcattgctttgtggaatgtaaaaaatacttttttatgaaaaatactcacaaaattctaatacaattagatgaagatttagaataaaacacagaatatatatttgtgaaccaacatgaagaagcaaaaatctgctaaacatattcattttctttttttttggaaggggaggtgaatgacaagaagatggtgcaaaaaggaatttaagaaataaaaatccatgaaaacagacataagggaaagattcagcatggtctctacaataatcatcactttatattcatcatggcattgccagtatttatgaatatggacatgtttgaatgcagttattaacagggaatgtatactatttgtcttcaactttaaaattttgacagctggcaggcgcggtggctcacgcctgtaatcccagcactttgggaggccgaggcgggaggatcacgaggtcaggagatcgagaccatcctggctaacatggtgaaaccccgtctctactaaaaatgcaaaaaattagctgggcgtggtggtgggcgcctgtagtcccagctactccggaggctgaggcaggagaatggcgtgaacccaggaggcggagcttgcagtgagcccagacagcgccgctgcactcccgcctgggcgaaagagcaagactccatctcaaaaaaaaaaaagaaaatttttttgacagcttattttgtttattaccactttttaatatgtttcataattagtacttcaagagctatataactatccttaaaattatgtaatgaaatttatatatccatttttctatagttgatagatttaatgattcatttttaaactgtattatgtgacttttaaaattttttaataaaattctaatcatcaatgtttaaatgttttaaatgttaatgttttcaatgttcaaaatctttctaaagcacctaatacaatctctttccgtcgtaaagtaaactaaacctaatttcatgtatctatgattgacagctatgatttaaagagcaactcctgtgtatcagactttgtggtagacagtttacatttcctctctcatgtaacagaccactctgtatgagcagtgtgtctagtccacatgcacctctgtgaattttagagaaagcatctttagacaaatgaatagtggatagcatggtgttgcctttgtggaaagaaaaaaaacggtgcctcttcctcagacccacccctaagccagagcacaaaggctcacaagcttttgtcatttggttacatggcactttatcccactcctccccagccaccttaactcaagaccttgattaagggtggtaaaatgcaagttcagaaagttaagcgtcttaaaccaggattctacaaatatattaaaattagaaactatctgtcaaaaaataggtattttgttaaagaaaatatacatatacatgcaatgaaacatagatgataatttaaacctatatgtgtttatagaagtgaatgttcacgatatattttaagagaaaaaaggaagttaaatgtcatattcagagtaggattcaagtggactttacaatgcaggggaggtgacagaatattatgcaacacttttttcaaagaaaatatcatctctagtagtaaatattacagtgactccattttgcttactgtgttttcaaactggttaaaacttaacctttattcatcccgaagtaaatattgcattttcacatttcattaaatatgttgttctgaaaactagatattgtaatttacttttgaaaatgaaaatcagctgttgtcattgacaagtgttcaattagtaataattgaattgctctgagaagatgaggaagggataaaattttctgttttctagctatatttctgatgtgtcatcagagttatcattgaacattaccacgaatgaggctgaattgtcattagaaaaataactacacttaataattcttatggttactgaaacaatcttaaaataccagctgctctattcaacaaatatcaatatatggattgctccacaggtgagacatttagtgaaatgaacagaaaaacttctcacacaaaatatgctcattatttaaacatgtatcaataaagttatctttattaacacatcaattttaaaatctaaaaatatcagttctaacaagtgtataatgtattcacttattacaagtcctcattgactcccactgatctgtggttttaaggaagcaagtaatttagtttgtttcagtggtacataaaataaaaacaaatgggttccacttgaggctcaaggggttcatctataattatctgatttacttctacacgtgttaatgtttaaaatgtataacacatttggcttgcctcagattatttccatattcttaaagatttttccctccctctggaaaactgagcctgcaagataagtccattttgttttaaatgagatgttattttctgcaaatgcttgtgcataaatacggcaacatttctggaggcatggttttctttttcttcttagagttaatgtatcatcctagtaaataatccacatggttcattaagaaaacatgtgttctggggcttttgtctgtgatagtcttcacctgtcattttcaaccagcctcagcctatctgctctgtcacaatcactactaaaatatgttcctaaattgcttgtttctagatccttccttctcatatgctcaggtgaacacatgggtgaaatttaatatggaattgaaatatgtactatgcaagatagattccttaagaaatgtttctctgatttatatgacataattgtattttactagtttacctgtccatctgtaaaactttgttttggagatttcatatattacaatgtttaagaaatatgctataatgttttgtatagtatatttcttcgtgataaccttatatactaccagtcacacgtgtttgtaaaaatctaaagagtacttttggctcctacagaatgtgtgaagttgtgaaattgtttttttgttttgttttgttttgtttttatgccccaaagatgtggagggcttcatataagagggtagatttaatgagagagagagggagagacagagagaatgataaaagaagcttaagagattattttatcttgtcaacgacattgttattgaatgtaagctgctaaacttcttagataaagtaaaacagtaaaaacaaacacacaaaacagaacagagaatcatcagacaggctgacgaacacagtacaataaagcagccagtaccgatgatcagtggacatcaatttgtcttttgggctgtagcacctgctactaattggtgcaaagcgctcaccagtcagtgcgtggtttagcgcactcagctgtctcctgtatgtgctgcgagaagcaagatagctaattgctgttgcttcagtgccagtgaaatcaacgtgctgagctaatagcgacagatagagggcagacagattcctgctagcagcttagtgttagttgcttgtggtaactaaggcaggtggcatacatctcagaacgtggagaatgatggtatgctttctgagttaacatgttgaactgttttgcttttctaaaaattttcctagtaacattttcttgatgatatgagagtggatatcaatgcctcacagaaacaagaggtggaacatgtgaatgaatcgtcttggaactagattatgagcactggttctttttaaagggatgtgcaagaggcagccttggcaagaaaacttgctgcataatcttacatggactaaagatgaaactttaaaccgcaagtaagttcttcccccgcccttctcttatttttttcaaatttaaggcagcagtgaaccacagagaaagttaagatgttctttcagtacaatgatctctgtcatgatgctactttctgtcatgcttgttgaaagaatagagtagtaatgattgcaagtgattatttgctggaagagtgaacacaactgcctgtcctttcattcttcctgattactgtctggtattgtaattttgtttagatgacaatgtaatctttacaaagacacaagcttttgaattataactctggtttgttatttaaaagaatttttagtcctcaaccacttcttctacttcctccaacctgaaaaaatacagaaaaatggcatcagaattgactttttgtttttctgtgtgcaaatattgatgatttgttttatgagtggttgttgctggaggttatagttggcagttgagttaaagtagctaattctgcctcacaatgaacagtattttttgtcttttgtgagtatactgatatttttactgtggatgttttagtttattagaatatttacttcctttgtgcgtatctggaagcattaaccatttagaatttgaatctaggtcaactgtatccttctaatacagaattaatgctagatagtattaacagctttcccactttgtgatgtggcctttactttaaaaaatatactttggtagctatagagtgggtgggccctgaataacaagtttcag

SEQ ID NO: 4843 - DNA, 6000 bp, Homo sapiens
gtatgcgccaccacgcctggttgtggctcatgcctgtaatcccagcactttgggaggccgaggcaggcacatcatgagatcaggagttcaagaccagcctggccaacatggtgaaaccctgtctctactgaaaatacaaaaattagcatggcatggtggcacgcgcctgtaatcccagttactccagaggctgaggtaggagaatcacttgactccgggaggcggagattgcagtgagcagagatcgtgccactgcactccagcctgggcgacagagcaagacttcgtctaaaaaaaaaaaccatagttggagaccgggcacatggctcacacctgtcatcctagcactttgggaggctgaggtggtattacttgaagctaggagttcgagagcagtctgggcaacagagtgagaccttgtctctacaaaaaattaaaaaacaggctgggcgaggcggctcacgcgtgtaatcccagcatttcaggaggccaaggtgggcagatcacctgaggtcagaagttcaagaccaacctggccaacatggtgaaaccctgtctctactaaaaatacaaaaattagctgggcctggtggtgggcgcctgtaatcccagctacttgggagactgaggcaggagaatcacttgaaccctgaaggcagaggttgcagtgagttgagatcgtgccattacactccagcctgggtgacaagagtgaaactctgtctgaaaaaaaaaaaaaagaaatttaaaaacaaattagccagacatagtggtgcatgccagtagtcccagctacttgggaggctgaggtgagaggatcacttgagctctggagtttgaggttgcagtgagcagtgagctgtgatcttgccactgtacttcagccagagcaagagaccttgcctcaaaaaaaaaaaaaaaaggtggggggtgcggggctgggggcagtgattcatgcctgtaatcacagaactttgggaggccaaggtgggtggatcacctgaggtcaggagtttgagaccagcctgaccaacatagtgaaaccttgtctctactaaaaatacaaaattagccaggcctggtggtgcatgcctgtaatcccagctacctgggaggctgaggcaggagaattgcttgaacctgggaggtggtgattgcagtgagccgagattgtgccattgaactccagcctgggcaataagagggaaacttcaactcaaaaaaagaaagaaaaaagccatgaggttgggtgagatctctaagagcaaataaaatcatagaagagacccatagactaagctctgggacactagaacatctgcaaatgcacgttttgcagaggcacatgcacagaaaaagaaagagatcagtatctgtaaagggaaggctggagtaagtatttagaaaaaatatgataggtaatttctgaaagggaggataaaagttcagtacaactttggtcacaaagattgggaatgagttttgtccaggctggaagtgatgtggggtccacagtaagagagaagtgcttgtaaatggtggttaacaaataagagtcttggatacagtgggaccagggagatgaacctggaagtttcctcagagtttagggcagagacttgaggttggtaggaagcagagcacagtggaatttgtaaaaagtaaaatagaggttcctcttcaaagactttcctcctcgtctaattaggaataaataataacttctctttttttttttttttgagacagagtctctctctgtcgcccaggctggagtgtagtggtgcgatctcggctcactgcaagctccacctcctgggttcccaccattcccctgcctcagcctctcgggtagctgggactacaggtgcctgccaccacgcccggctaattttttgtatttttaatagagaaggtgtttcaccgtgttagccaggatggtctcgatctcctgacctcgtgatccgcccacctcggcctcccaaagtgctgggattacaggcatgagccaccgcgcccagccaacttcttttaaaagcaaaatttattcaaagacctgtgctaacattcttaaatatctgctagccataataaaaaaatcaatgtactttatgtttttagctcccacaatttagtctaaatatttgccctggcatgctggtccaagcaagcattaggtcataacctgtttctcttccttatttaaaagtgtttttacctttctcaacattccacaagttacttcctccttcccttgttcccctctacctttgcctcttttaaaaagttctaagttactagccaatcgaaacaaacaaaaaatgtgaggtcctgttccagccaatggaaaccggacacagcagtggggtagacgcgtcaggtcataaatgaccctgtctcctttgttcggtgtactctcctggcaaaactgctggcgagtgtaccctttctgcaaaaagtaaaaatggccttactaaataaattaaatttatgttcaagtgctatttatttacggcaccaaaaaacaaatatttcaaacaaattggagaactgagtggaagacagattcaggattgcctggaaaggcagaactatttgtgaaatgtgtagggccgaaaagaaagaatcacctgctttagcaaatactatatatatgtgcatattatatatgcatatatgtatatataatatatacatatatgtatatataatatatacatatatgcatatataatatatacatatatacacacatatatacatatatatacacatatatatacacgtgtgtgtgtgtgtatatatatatatatatatatattttttttttttttttttgagacggagttttgctcttgtcgcccaggctggagtgcaacggtgcaatctcagctcactgcaacctccgcctcccaggttcaaccgattctcctgcctcggcctcccgagtagctgggattactggcacccacaggcacccacaaccacgcctggctaatttttgtatttttagtagagacaaggtttcaccatgttggccaggctggtctcgaactcctgacctttggtggtccgccagtcgtggcatcccaaaatcctgggattactgcatgagccaccgccccaggcctggttgtgtgtgtttttttttttttttttttttttttttgcagaggtggtaggggaggaatggaagcttagtgggggatttagggagggcagaaattggtgttcagtgaggagctctgacaaggcagagctgatttggtgggagatggaagcaagtcaaaacatgcctgaaaaagcgagaagccgcaggttagaaaggctgcatcttggccgggcgccgtggctcatgcctgtaatcccagcactttgggaggccgaggcaggcggatcgcgaggtcaggagatggagaccatcctggctaacacggtgaaaccccgtctctactaaaaatacaaaaaattagccgggcgtggtggtgggcgcctgtagtcccagccactcaggaggctgaggcaggagaatggcgtgaacccgggaggcagagcttgcagtgagccgagatcaggccagtgcactccagcctgggcgacacagcgagactccgtctcaaaaaaaaaaaaaaaaaaaaaaaagaaaggctgcatcttagggaggtcagaatacagctccgagagcagggcgcagaggctcacgcctgcaattccagcactttgggaggccgaggagggcggatccgatgaggtcagcagttcggaccagccttgaccaatacgttggaaaccccgtctctactaaaaatacaaaaagtaaccaggggtagtattgcacgcctataatcccacctactagggaggctgaggcaggagaattgcttgaacccagggggtggaggttgcagtgagcagagatctcgccactgcactccagcctgggcaacagaacgagactccgtctcaaaaaaaaaaaaaaaaaaagcgcgataggcgattactggtcagtggtcaatataggtcaagggacgagacaggagagagctttctaaggttgtgggcctttttattttttatttttttgaggcgtagtctcgctgtgtcgcccaggctggagtgcaatggtgcgatctaggctcactgcaatctccgcctcctgggttcaaccaattctcctgcctcagcctccccagtagctgggattacaggcgcccgccctcacgcctggctaattttttgtatttttagtagagacggggtttcaccatgttcgcctggctagtcttttttttttttagacggagtctcactctgtcacccaggctagagtgcagtggcgctatctcagctcactgcaacctctgcctcctggattcaagtgattctcctacttcagcctctcgagtagctgggactacaggtgcccgccaccccgcccggctaatttctgtatttttagtagagacggggtttcaccatattggccaggctggtctcgaactcctgactttgtgatccgcccgcctcagcctcccaaagggctgggattataggcgtgagccacggcgcccggcatccaggctagtcttgaactcctgacctcaagtgatccgtccgcctgggcctcccaaagtgctgggattacaggcgtgagccaccgcgcccggccaggttgtgggttttaatgggaccatctcactgcctaccgtttcctttttccgtccgaacagaaggggcctgagcagtgaactgacagtggcaacgccgggtgaggcgggatggaggagtttacgagcctgggtgacgccctgttccgcgtcctggccccgcccctcccggcagagccccttggcgcgtgacacaggccccgcccttgctgtacgccatcagccggcgccgcgccgccgggtgttactttgccccgccggcggggcggtcagcctcctgtcaccgcctgttccggctatggtcccgtccggtgttctgtaagttggcaacctaggctcctgacgcgaccctggtcctgatggcggcggcgacggccgcggcagccctggcggcggccgatccccctcccgcaatgccgcaggcggcaggggccggagggcccacaacccgcagagacttctactggctgcgctcctttctggccggaggtgggtccatgccacgaagagccagccgcgctctgagtggcgggggcaggactgtgggcaagtgggatgcaagcggcctctatgacattcctggactctggctgcttcaatgttctgttagatgtctgccctgacctgctgtaacctctttctagtaatcacttgactaatgacagctaggttatggggagtgggacctttggcactccggcagaggctggggaggtggaaggtctgaatcaggcacccattcttcagggctggataacagggaaaagaggaggatcccttacagagaccctggggttttagtgagacatgctgggcactcctttcttttataaaaaccgtgagtgacccagtgtagacttggattttgctgtttgcttaaaggaaaacaaatattggagatcagctttttaatgactactggaaaattgtgcaaactgtctacagccaaaactggttccagtgattctagtaaactgtgacacagtacttgacaagccctattattgatgtgactttgggatcaaaaagttcatattgtctcttaggaatttcctgggccttcaagctccacccttccttaattacttctctgggttgtgtaggggtgggttgcccctccacacctgtgggtgtttctcgtaaggtggaacgagagacttaggaaagaaaaagacacagagacaaagtatagagacagaaataaggggacccggggaaccagcgttcagcatatggaggatcccgccagcctctgagttcccttagtatttattgatcatttgtgggtgtttctcgaagagggggatgtgtcagggtcacaagacaattgtgg

SEQ ID NO: 4844 - DNA, 6000 bp, Homo sapiens
tgtagccacacagggaagttcagtgacctcgttaaagtcacacagcaagtttgagtgagttgctgagattaggacaggggtcttggatttaggcatttccctcagacaatcttcccctaaccccttcccgcatcggagctttctgggtcccatccttcgccaacctccaagcccaagttggggctgtgtcccatgcacccaccgtggtggtagaggtgaggcggtgggataagatggggcactggtctgtggcagtgacgatcagggtgtagcggccgtggctgatctcgtagtccagctctttggcagcagtgatgacaccctgggggacacagggaagggacaaggatggatctaggggtggtaggtctgcagcaccctctgaccaatttgggaagtaggccctgacattggagctgtgatggggaaccactgccaccccctagcccaggctccactccaccaaacttttcatcctcccacactgagtgcccccacagtttcccctagactgcatctttgctccatccccctccagtgtcactgaactccttgccaatccctggataggtttcgccccttgtcttgatcctgccatcagctgctgaccatgtgtctgtcgatgcggaaggtgttgacgatgttgcctgcgacgatggcataggtgactgtgccgttgggaccctcatccaggtccagtgcctggatggtgatgaggctggtgttgagcgtgtctgggccctcatccagcagcacctcatagtggggctgctggaacatgggcgcgttatcattctcatccacaatggtcacgtacacgtgcgtggtggcctgtggaaaagagtgggtcacgtccttggtcaggtggccagagggaccaaggtggatccagatggctgttctcctgggctgaactcactccatgtgactcaaacagaaagggcaaggagaagaaagcagggggtgggtcacaggctggtagagagagaaagctcaaaaactccaccaaaagccaagtaaggtaactgctctgtccaagatggcactggcaccaccactcctatgtctgcgacccccagcagacatcactaatcaatcacagaactgctgaggccagatgcaaacttgggatccttgttagcacagtggtctagtgattaagactggcatatgggatgaaccctggtagtcaccccagctcagagctttacgagggcctgtgtcttattgagcctatatgtcctgccagactacaagaggcaagaatgtgaggcactcggcccaatgccatatttaaccttcatctattgttcatgtaaatgaaagaaatacatattttcagcatttccagaaggaggacattgggtttgtggcaatttcgtgggcagaacttgttgacctgtgaaaaataagactcacagaacataacttcattccaagaacagcttctacaacatactctcctgtgatcggccatctctgccaatgcttgagtcaattggaccacaagtaatattcagctaatcagaactcggcaatcagcactcaagaatcaactagaaatggttcttgctcctgcttcctgcctttctccacctgggaagatgtcccctgtggactaactgccttaccctggctcccttgctatccagcttcctgctgggtgtggccaatgggaggccctggctgaagatgaaagcagtggggagaaagaggcgggggtgtttcttccacactccctccattcctcactgcggttctgcccatggctgtgtttctcctgcttggggacaggggtccccctttcatagcaccagctttcactgggctccagaacatcacttcctcttctttccctttggacatgtgagtggtagtggcttcctgtggttggtgctagtctctgggtgctttaccagccttcctaaacagtccctgtattaaactctcttcagttgaaccctttctgagtgtgccatctgtttcctgccaggaccctaactaatacaaatcataatgagtgactaatataaaataataaggtgttaatcactgcaaaggtgtctgggtagagagaacgtgactaggccattgccaggccagagaacagaaagcaggtggtacagacaactcaatgtaggcaatttgcatatggttttttccttgggactggctggctctggagctaccactggaagaatggacagatgggcaggggatctggacccaagaaggctgtcactgcccctgaggaggcaatgattcctctgatatgcagctctggatcttgggggtggagggcattgggtgtttgctgaaacggtttccaaagcagatagggttggcagccttgaaaaggagctgcgtggccttgggcaggtcacatcccctctctggaccttttctgtctgtttaataaaggacctggcttgatttctaaagttgtttctagctcagggagtttgggaggtgagtttgggaatgtgggaaatgtcagcatcccctccccaacagggaggctggaattcagcccctttcctgcaatgtggtgctcttgtattcttgccggcaagtaaggggactcaggaaggctcaaggctgggcccctcaccagtagagagtactcacagctgcctccaggccctgcagagccacaagatggacatggtggctttccttgacagtcatctttattcgaatatttggggccttcaccactatttttaatgaaaacaagcacaaacacatgatggagtgtgcaggctgcaggggctgggagtggagagtttgaacagagttgggccttggagcccctcctgctctgagaccaggtctgggcttggggagggaaggtgggtttgacttcctctggtctcggagggaggagaaagtcagtgctccaaaggccctctcagctgagcccttcctgtcctgccctggtgttgaggaaacagtgcttgaggtttctggaccatggtccttgggcaatgcctgtgtctcaccctgatgcaaccccaggaggctcagtggtgggcagtgtggtagggagaaaggaagtgaaaaggggggagggaactgggcccagctcagaggctctatccccctggggaaggggttggcagggcaattgctcccctttctctaattccaggccctccccggctgctaggccctggggaagagggagtctggtttcaagggtgtcctgagcaaagccagtccaggaagggttgagatggggtggtgctctaggatcttgcccttaagggacccccctcacttgccagaggatgtcagggtgagaagggcccggtgtccacctgatctcagttggctttgtacctcccctggtggaagggagctcatgctatgccagcaggaagggccctgggctgccttccaaggtggggtcacaaggccaggagcatgcccaaggacctgggttatgtcctgccagcctctggggctcccatcctggggagttcactggctccagggggactgggcctgcacaagttcacttagtaataacatgatgcctcagccttcctctgttgtagccttccctgcccttagagcaagggctaagggcctccagagagcccgtgacttggatcaggccacccacaaggcccccaggactcctggctcccattgagtcctgataccctggttcctgacccagtcagactctgagtgtcctctgcctctcagcctaggagtcacctattaacccaagatccctaaagtgccagaaaaacccctggaagcttcagctagactggggtaaactgagtaaaatggctgtgctcttccactcctgtgatccctggtcctggccacgatcacctctgctcctccatcacacaatcactcactcactcattggtttgtccattcagataaaagtgcagtaaaaccttctccacgcccagctttgtgctagggtctcagaaacatcagagagaggtttgtagtttcgctctggagggcagaacagccggaagaagaaccaactgctggttatctcaggctggaggtggtagctgaagggggtgtggacagtaaggatttgccgggaaaaaggaagggtcaggacatttcgtgaagtgggaggacttgagctgagccctgagggatgagaagaattaggaggggagagacattccagtggtgccagcagtgctgggtgtgggtgcaagagcagaggcactagaagttagggtgcatcagagtgtcctgcagatatccaggcaccagggagggagggcgggtgcacagccaggcggacagctgaggcctctgccggaggggagcttgcaggatgtgctgtggggcacgccaacaggtgttgcctgcatatctgtgtgtgtcccggggtagggatgtgctgatcttggcgtgtagtcctgcacctgttctgtgtgtgtgtgtgtgtgtgtgtgtgtgtgtgtgtgtgcgcgcgcgcatgcactcagggtgcctcaggctctgaatctacagttaaactggctccagcttgcctagctcttcacaatgtcagatttcattcattcactcatttactcactcattccacagctgggagtgcctaccacataccaagccctggtctggctggaggatgtagggtacaagtctctgtccccagatcactcaaaggctggtggctgagggcagatgcaagccatggtaacgtctatcacgctgttagaggtagatctacttcttaggctgcgcagcaataataatttctctccaaaaggactgggggacggtagaacgggctttaaactgccgatcaagtggagctgactcgctgggacgcacgctggctccccacccacggggccggcctccgggaagcccctcccacgcggccctcggagaggcagttcccccacacggccccccgggggcgctgcgcgaagggggcgggtgcctggagcacggcgctggggccgcccgcagcgctcactcgctcgcactcagtcgcgggaggcttccccgcgccggccgcgtcccgcccgctccccggcaccagaagttcctctgcgcgtccgacggcgacatgggcgtccccacggccctggaggccggcagctggcgctggggatccctgctcttcgctctcttcctggctgcgtccctaggtaaggtcgggggaggcggggcgctgggaaaaagctgggagaagacagcagactggagtgggaactgtgggatgggggcgtcctgggggccctctcagcctgtgtgaccgtgcaccccactccacccaccgcccagaggctgctgggacccctaggcagggtgcagtggcaactgtgccaagtgccccagctaggcatcgggcacatctgcatgctctgacagctgcccaagtggcaggcagggctgtcccctgagggctgcctgtccagcccttccctgcccagagaacccagggcacaggtagcttctgcaaagaaggagaggcacagggtgggggcggtcagtgtgttctggtggatatcactggcttttgacagctggcatctttctgcccctctagtctcagggctctagtgttgcagaggacacagagggcgtggtatgctcagccagtgccccatgccctggtgaaacccctggctgagccttggtgggcactgggcactggtcacggtgggtccactttcagacacagaggcagcactgcccacctggtccctattctaagggtctgatggcccaggaataagtggtcagctgattcctgccatcctagcaaggctgccactcagggaccagtgtggagtactggggaggatgtgggacactcttcagctcagctatgagccccttctgggtccctggataaattacggcatctctctggcctcagtttcctcagctcaaacacagaagcccacacagggaagcaccattttccccttccaaagtccagactgtcagcatgttcagatagtatcctggccccaacacaggggctcccgg

SEQ ID NO: 4845 - DNA, 6000 bp, Homo sapiens
accagggactataatgtttaacatgacctgagcaaggcggggtgtctctctttcctggcctttggactgagagggacaaataaaaagtcaaattagcctcaggaccaaaagcaagacatccagtgtgactcagatttgtaagaaaggcaggggctccttagaccagccttcagggtcagttcataatcccttctgaaacagcacagcctttctgaaaacaaacagcttagggaggccctgtgtggcggctcacacctataatcccagcactttgggaggctgagctgggcatattactggaagttaggagttcgagaccagcctggccaacatggtaaaacccctactttttgcattttgttaatctccactttttgtattttgtgaaaatacaaaaattatccaggcatggagatgcatgcctataatctgagctactcaggaggctgaggcatgagaatcgcttgaacctgggaggcagaggttgcagtgagctgagatcatgccactgcacttcagtctgggcaacagagtgagaatccatctcaaaaaaaaaaaaaaaaaaaaaagcaaaaggaaacagtggccgggcacggtggcttatgcttgtaatcccagcaatttgggaggccgaggcgggcagatcacctgaggtcaggagttccagaccagcctgaccaacaaggtgaaaccccatctctactaaaaatacaaaaattagccaggcttggtggcatgtggctgtagtcccagctactcgggaggctgagacaggagaattgcttgaacctgggaggcagaggttgcagtgagccaagatcgcgccactgcactccagcctgggcgatggagcaagactttgtctcaaaaaaaaaaaaaaagaaaaagaaagaaacagcttagggaccaagatgagcagcagaggggggcaaggagaagaatgcaaaaataaggcataaagggcccctaccacaagcagcccgcttctccacatcgttactgatctggaccctgccaatcaagccaaagcactgacccacaatttaaataggactttgtcattttatatgaattgtaggaaaagagaagggctcacccgtcagtagttggccagtcacaatccagttccctaacacaagaaaatgacagactttcttttctacttgattgccttcttcacagtgtgaagtagagtcatgcaccacatcataacattttggccaactacagacagcatatatgacaatggtcccttaagattataatggagctgaaaaagtcctattgcctagtgacattcatagccatcataaggtcatagcacaatgcattaccttttctatgtttagatacacaaatacttcccattgtattcggtatggtaatgttctgtacaggtatgtaacctagaagcaacaggtcataccttaaaccctaggtgtgtagcaggctataccaacttaggtttgtataaggactctatgatgttcgcacagtgataaaatcacctaacaacacttttctcagaacatatccctgtcattaagtgacacatgactgtatcttgtagtcagcaggagaagacaggcctcatgataggaaatggaagaggatacttcatgattcttagcaggagacaggaagatggaaattgtcgtgctaggtcaacaaacctcagagaggctgtttgaaaaggatcccagcatttatccatggacacattagggacctatcaatttgtagagaacttaaatttctccaagtgtaggactgtcttatcaaggagggtctgtaccaggccagcatggagtcgtaagggtttgcattggaaagggaaaaatgggaatggaaaggaaggttggatgtgaaagaattttccaaggagcatgtatagctgaggaggccatgaccttgcttctttcttatgtgtgtatttatttattgagacagggtctgactctgtgcccaggctagagtgtagtggggcaaccatggctccctgcagcctcgacctcccaggctcataatcctcctgggtagctgggagtacaggcgcatgccaccacacctggctaatttttgtaattttttttagtagagatagggtttcaccatgttggccaggctggtcttgaactcctgacctcaggtgatccacccacctcaccctcccaaagtgctgagattacaggtttgagccactgcgcccagccacctttactctcttgaatccattcctgttgggttttcacccctaccacacactaaaagccattttatggtcaggcacagtggctcacacctgtaatcccagcactttgggaggttgaggtgagaggatcacttgagcctagaagtttgagaccagcctaggcaacacagtgagaccccatctctaaaaaaaaacttaaaaaaaaaactagccaggtgtggtggagcactcctgtagtcccagctattcaggaggcggaggtgggaggattgcttgagcccagaaagttgaggctgcagtgagccataactgtgccactgcactccagtctgggtaacagtgagaccctgtctcaaaaaaataaaatgaaatagataaaagcaattttgtcaaagtcaacactgccctctacactgccaaatccattggtcatttctcaggcctcacattgcttggcctctccacaggatatgacgtttgaccccccctccctccttttctaaaaaaactgtttgtagagaccgtgagggggggcggtctcattatgttgcccaggctggtcttgaactcctgggctaaagcgagcctcccacctcagcctccccaagtgctgggattacaggcatgagccaccatacctgacctactcatttccttacaacctgcttcttcacattctcctttactggattttcttcctcttccagatctttaaatgttgggatttcgtgaggctcagtaatcagacttctctgctcttctccatctacactcacttccttggtgcatatatatatatatatatatatatatatatatatatatatatatatatatatatatatatatcacagctcactgcagccttgacctcccatgctcaagtgatcctcccacctcagcctcctgagtagctgggactacaggcgtgtactaccacacccagctaattttttatttttttgtagtgatgggatctcactctgttgcccaggctggtctcaaactccttgcctcaagtgatcctcccacccctggcctcccaaaatgttgggattataggagtgagccactgtgcctggccccaaagttatatttccaggtcctttttgcctaaaccctacgtatgtacaacatcctagtctgtatctctgcttgattctaaaaagcatcataaactgaatcaaacccttaatattcccccaccaaactgcttttgtagtcttttccatttccttgttttagtaaatagaaattctcttcttccagttatcaagccaaaaacattggaatcatccttgaatcttctttctctcacagcccacatccattgcgtcattctgtcttcaaaatatatccagaattttactactactcaccacctccgccatcacccttatccaagttaccattaattttcacctgtattataatagtagcttcctgactctcatccggattactgtagtagcatcttaccaaatcctgcctgaaaggccaagcaatgtaagggctgacagatgactcggggattcggcaacgtggaggtcactggcaaccttcacaagattgctttcactggagtgatagccctcgaagaacgggataatgatagaactggattacactctgtagtagaatcttttttttttcttctttttttttagatggcgtttcactcttgttgcccaggctggagtgcaatggtgtgatcttggctcaccgcaacctccacctcccaggttcaagcgattctcccgcctcagcctcccgagtaggtgggattacaggccatgtgccaccatgcccggctaattttgtatttttagtagagacggggtttctccatgttggtcaggctggtctcgaactcctgacctcaagtgatccgcccgcctcggcctctcaaagtgctgggattacaggcgtgagccaccgcgcccagcctgtagtagaatctttacgctccctagaatgtattcgccttcctgatctgttataactcaccaagagaattcccttttcagagcctttgcacttgctgttccttcggcctgaccacccttcctccagacagtcacatctacctgttatcgttcctgaattctggtacctgttaatgacagcttctgagaggtttcttttatcgcgctatttaaaatagcgcctcccactctctatccctgtgttttccataatttttcttcagagcttttatcactatctgaatctatctggagctcccccagcctacacacactggaatgtaagctccatgagagcaggagctttgttttgctcacccctgtatccccatcataaaaccatgcctcacaaacagtgggcactcaatatctgttcagtgaataaataacctttgtctgaaacgtatgtagttacattacgtatatagatcaccacttagtaaaccgtctgggaataacaggcactccgaaggccccagtctcatcccgacggctaccacgtgaccttcctgagcttgggtttcctcctccggaagattagagggttggcgcatactcaactctaagacctccggaacatggaatctgggcgtgcaccattattgacacctacaccagccgtccctttcttagaagacatacggtagcacttccaccctcgctcaaaactcgggaaaggaggggcggagggtggatgtcatcactccgcgcccggctgcccgcgacgcgccggcgggtggcgcagcccttcgctcgcccggcctccccctccctggttccgcgttctggttccgccatggaatccaacaaggatgaagctgagcgctgtatcagcatcgccctcaaggccatccagagcaaccagcccgaccgggcgctccgcttcctggagaaggcacagcggctgtatccgacgccgcgagttcgcggtgagtgtgaggtgccggagagactggggacattagaactgatggggggaacacgggaacggaccgacgggagcagttgggggagggggaggggtggcgaggcgcggctacgcctgcgcactgaggcgcgcggtggctgctgggaggcgtagtttttccctcttgttcctctgcgggatgcgagccgtctggagactcgggcggccgggacttcagctttcggggtgctggcggagcccgctggggtttgaggtctccgagaatgaaacgcgctggcagccgggacgaagggaacttacctggaagtgaactcgaactacttttcccaaggggccgttcggtagcccaggccagtcgccggcctgggaaatattacagttcaggaaaataaacataactcctttaagggagagaatgggcgctagacagggagacatttctgttcttcgggcgccagggaaaggcgcttccgtatcttcactccctctcacctctcgggctgagggtcagggaccactctcccaaaatgcaagccggcctttgcacccaccccagtccgccgcctcggactgtcctgaagccgggcccctcactcctcccgatgatgagattcggagcgggtggcctggtgggaggtgctgacctcagccaccgccagtcctccatcgcccgcaagagtccagcggcggtcagccatgtggacgccgaggctgctgagttgccctggacaggagcctcctgagccagggagggaagagtgaagctggctttacaactcatcacctcgcttcacccgggaaccctttcttttttctttaacctaagttttccaaggagtttttcttaatccacgctagaggggagagagacaccg

SEQ ID NO: 4846 - DNA, 6000 bp, Homo sapiens
ggtggctgaggcaggagaatgatgtgaacctgggaggcagagcttgcagtgagccaagatcaggccactgcactccagcctgggcaacagagcaagactccatctcaaaaaaaaagaaaaaattatttaagcctcacctctttccaagacggattggaaggaaaccctttgagattaggttgagatgatctcagcacataagaactaagctctgtgtctgcaggtttcacaatagaggaaattaaaaccaggataagaatgtgcaaaccagggcactgttggtgatttgcgagatcggaagttgtggctagaatcttcctgactatggaggaaggcagacgtcttgtatagggggtggggtgtacattctggacagttcatggaaaataaggggataagaagctgaatcatcaccccctcccatctttctctctgctctatgagaccctccccttccttatttttatctcttcccactttatgctgggccttccctatcctgccctgagttatagttagtcactaacttctccgctggctcccacccttatcacatctcagctacatatataaactctctgttatctaagtaattctattagccagaagcaattccagagtttatattagtactaggaaggtgtcatgtagcccctgtctaacatttgaattgaactaaaatgtgaatctcaataaaagcaacacagttttcacagcatatgctgataatggcaatccaacttcttttgccttttccccagagaatcctgggaatatcctgagcttggtgctttgatgattctatttcagctttggtgccttaaaaaaaattacaaatcaattttgaatggtttaagttcatgattttgttctgcagccctagctaggggtgagccaagccttatgaaatctaaactcagcctaacagaatagaaaatctataggctttagttaagagtcacatggtcctgagttcaggtgtgtgatttgagcaaattattccttgagcctatttcctcatcttataatgaagaaaatattatccaccaagaaatacagctcgggcatgtaaaaccccagcacaatgcctgattaaaagcgcagcaggtactgtcactgttacccatctttctgttccttttggataaaggagactaatgtaatgtggcatcctggcctctggagggcgttcaggggttcgggggtgggggggggcggtacttggagattctgggagtggttgcttgggagatggtaagacttggaagtgcaggctgggaggaaaatgcaggtgcccaggcctgatgtcctcttacctaccccaccctgccctgcagtcctgtccaagaacagcaagcctatccataccaccatcctaaacccacacgtccacgtgattggggaggacgcagcgtgcatcgcctacatccgcctcacccagtacatcgacgggcagggtcggcctcgcaccagccagtcagaagagacccgggtctggcaccgtcgggatggcaagtggctcaatgtccactatcactgctcaggggcccctgccgcaccgctgcagtgagctcagccacaggtgcacctggttgacgggggagaggggctggaagggcctgggataggtggggtcagaggaagaagagaaggctgggaggtggtcctgggagaggaggtgtgggccgtcccagaggactggcaaagcctggcagaatggttgcaataagttatgcttggaaatcagacagactagggtctggctccgtgactccaaattggatgacctcagacaggttacttcccctccctaaactgtttccttagctgtcaaagaaaggcagagagtggtgcctacctcatttaatcattgtgaggattaagtaagatactataagtaaagcacttagttagtgcttagcaaatgggaggcagttttgtatttaagcattagcttcacccactttccccaccttctcaggccgacttggccatgtgtttagcgtgctaaagtcgctggaactcatctgtgtgctcattgtcctctgttctgttaccacattctgtcctgtttgacaggggctttaggagattccagccggaggtccaaccttcgcagccagtggctctggagggcctgagtgacagcggcagtcctgtttgtttgaggtttaaaacaattcaattacaaaagcggcagcagccaatgcacgcccctgcatgcagccctcccgcccgcccttcgtgtctgtctctgctgtaccgaggtgttttttacatttaagaaaaaaaaaaaagaaaaaaagattgtttaaaaaaaaaaggaatccataccatgatgcgttttaaaaccaccgacagcccttgggttggcaagaaggcaggagtatgtatgaggtccatcctggcatgagcagtggctcacccaccggccttgaagaggtgagcttggcctctctggtccccatggacttagggggaccaggcaagaactctgacagagctttgggggccgtgatgtgattgcagctcctgaggtggcctgcttaccccaggtctaggaatgaacttctttggaacttgcataggcgcctagaatggggctgatgagaacatcgtgaccatcagacctacttgggagagaacgcagagctcccagcctgctgtggaggcagctgagaagtggtggcctcaggactgagagcccggacgttgctgtactgtcttgtttagtgtagaagggaagagaattggtgctgcagaagtgtacccgccatgaagccgatgagaaacctcgtgttagtctgacatgcactcactcatccatttctataggatgcacaatgcatgtgggccctaatattgaggccttatccctgcagctaggagggggaggggttgttgctgctttgcttcgtgttttcttctaacctggcaaggagagagccaggccctggtcagggctcccgtgccgcctttggcggttctgtttctgtgctgatctggaccatctttgtcttgccttttcacggtagtggtccccatgctgaccctcatctgggcctgggccctctgccaagtgcccctgtgggatgggaggagtgaggcagtgggagaagaggtggtggtcgtttctatgcattcaggctgcctttggggctgcctcccttcttattcttccttgctgcacgtccatctcttttcctgtctttgagattgacctgactgctctggcaagaagaagaggtgtccttacagaggcctctttactgaccaactgaagtatagacttactgctggacaatctgcatgggcatcacccctccccgcatgtaacccaaaagaggtgtccagagccaaggcttctaccttcattgtccctctctgtgctcaaggagttccattccaggaggaagagatctataccctaagcagatagcaaagaagataatggaggagcaattggtcatggccttggtttccctcaaaacaacgctgcagatttatctgcacaaacatctccacttttgggggaaaggtgggtagattccagttccctggactaccttcaggaggcacgagagctgggagaagaggcaaagctacaggtttacttgggagccagctgagaagagagcagactcacaggtgctggtgcttggatttagccaggctcctccgagcacctcatgcatgtcccagcccctgggccctagccctttcctgccctgcagtctgcagtgccagcacgcaaatcccttcaccacagggtttcgttttgctggcttgaagacaaatggtcttagaattcattgagacccatagcttcatatggctgctccagccccacttcttagcattcttactcctcttctggggctaatgtcagcatctatagacaatagactattaaaaaatcaccttttaaacaagaaacggaaggcatttgatgcagaatttttgcatgacaacatagaaataatttaaaaatagtgtttgttctgaatgttggtagacccttcatagctttgttacaatgaaaccttgaactgaaaatatttaataaaataacctttaaacagtccattgtgttactgctgttggaggtttacggccagaggcgtagattttagcagcctggcttaccaggttggagagagtacctcctcctactccctttgggtacttttgagaataaaacttcctcatgcctgtaatcccagtactttgggaggccgacgcgggcgaatcacgaggtcaggagttcgagaccagcctggctaatatggtgaaaccccgtctctactaaaaaatacaaaaaatttagctgggcatagtggcgggcgcctgtaatcccagctgctcggaaggctgaggcaggagaatcgcttgaacctgggagggggaggttgcagtgagccgaggtcgcgccactgcactccagcccaggcgacagagtgagactccgtctcaaaaaaaaaaaaaaaaaaaaaaaaaaaaaaaaaaaacttctcataaacagcctccaaacagcgctcggtgctgcgcaggcgacgcggggcggggagggagggtgagtgccctgggagccggctgagggcctcgccccgcccctggtcccgcctccggttaggccgctccgcctcttactcctcccctcccccgagtgggccggcccggctccccctccgcggggctgagtggatgagcccaggcctgagcccgcccctgctccgaagtcgtggtccccgacgctcggccggcagtgccatcgcgcggagaggagggggtgcgcttccgcgggcggggcgcggagcccgccgtctcggaggccgcggctcggcccggcactgcggagggccgcttgatttcccggaacccaggtcgcgcggctgctagggccggagccggtggatccgagcgggtgccaccagcggcggcgcgccgcctcccccggtgggagcggtggttgggccaggctgcggcagagcgttcgctcggagatggcggagcagccgcgacgcggcccgtggccccgaaagcagggaagccgggcagccccgggacgcggcggagcccggggacagcggggacgccgcccagtcctccgggtgagccgcccctgaggagacccccccgcccacggtcgcgctcaggcccccccaacagactcccttggatgttgccaccatcaccacccgcagggtcgtcccgggcggcccagcgtgcgccgcgccccgggtcctttccgccggcctccctcagaaccgcctcgctcccctccggaccgggcgggctcccttcttcccgcagggctctcccagcccagaggctgtctcgatgtcaccccggagtcgccgccgcgcgcctgtggccccttcccctttggtgtcccacatccggtgcgctcttcgcatccacctgtgcccccgtctcctctcggcggggcccctccacccgccagccccgggccccctcggcgcccgcagcctccgcgccgctgctccggccgtcccggcctccccaagcccgggcccggccccggcccccgtctggcttcgccgtcctcagagatctcccgcacacacccaccccgcccagccctgctggccctcagtgttcactggcccggcctgcggcgctcccggcgccccttccctaaaccttgctgcttcttccaggtatgaagctaaaatgcagcggctaagaacgcggctctggagcttgacaggcctgacgtcgaatcccagccctcccaccaactgagctgtgtgatcctgggcaaggttctaagcttctctgagttactcatatgtgaaatggggataatggagcatgtaccttttccctacctcttagggctggtgtgaagattaaatatatgtgaagctcttagaagaatggctggcaagttgtaatttctcaaatacgggatgatacaccctgagtatcaacttcccgtcagtgacctcctcactacaatgttttctctaaagttgc

SEQ ID NO: 4847 - DNA, 6000 bp, Homo sapiens
atgctggtaggactggtaactagataattcatactgttgaagctgtagggttttgttgtttttttatcaatttttcttatttttttaagtgacaaaaagtgtgtttatggtgtacatgatgtttcaaaatacacatacattgtggaatggctaacttaagtaaattaacacatgtattacctcacatacttatcatttacctgtgatgagaagacttaaaatctctcagtggttttcaagtatacaaaaaaacattgtttatccacagtagtcaccatgttgcacaattagatctcttgaaattattcctcctgtataactgaatttttgtatccttggaccaacatcttcctgatccatgcctccttcctactccctgtagttttttttttccagcagggttttcctcttggaattttcatatctcaaatttcagactgttaaattaagtcccttttttgaacattcatgaaataatgtcatgtgccaggaaaatccaccagagggcgctagatcatttaaagagtcaccacctggcttctccatcgcaaaatcgcgaagattgatgtcagagtattggaactaggtccaggttggaggaaaagaaaatccattgcacattaattgcgatgctggccaacattttagcaaataatcttttttgttctccttttaccttagtcactctgcttttttagtatgtatgtttatgcacttccttttacttcttttaaatcagttaggactgttcagattagaatatttaagcttgaaacctctgatttgctttgagagctgccatagacacacatgcacatggtacagaggctgcccttctctctgggaagcttttgaatgaatttagaaataaaaataaggctcgtggtgttttcagaacagagggtgaagtttctacttctgttgagactttcagttcttgtgcaatggacctcaatttccagcctgcagacacacctacattaggggaagatgtgctgggcttagagtgcttctctatacctttcccatttccaaggctgtccagggactggcaagaaaaggagtggtgttgggtagtcagagagctcatttaggctggaggggctctgctgtgccctggagtctggccacagtctggctgtggacatgctgtggacagcatgacatgcaggcatgtgcacatacaattacgagctcaggggtcagaagatctggttagacttgcctgtccatttttggggtcacagtaattatagttaagatctgtataatatttccttccttcctttttcttttttctttcttttctttctttcttctttctgacagtttcactctgtcatccagactggagtgcagtggtgcaatttcggctcactgcaacctccgcctcccgagttcaagcgattcttatacctcagcctcccgagtagctgggattacagacatgtgccaccatgcccagttaatttttgtattattagtagagatggggtttcaccacgtttgccaggctggtcttgaactcctgacctcaggtgatcccaccgcctcagcctcccaaagtgctgggattacaggagtgagctaccatgcccagccttctttttcatcctcacatataacccttcgaggtaggcagggaagtttctggctttattttgattgtataaatgaagaaacacatcaaatcaaagatacctaaggttccttttaagtttgaggttctgtctgtgcagagccttttcctaaatttgtaatgccaggggccaagttttctggaagtggtgcaaaagtttgtgaacaatgtggaaatggccagagagaactgggcaaaggcctgggaatgtctatttctggtggatggtagcactctctcagtgcttaccagccaggccattcagggaggaggtgagagactggggattgtaggaaggaaaggatattgacatcaacactgagagtttctgatgattcctgactaagccgaggctttggacagcacagaagttgctaaaagcttcaatcagcagaggcaggggtgatgaagagagcaggagatggcatctgaggggcctccaagcaccctctccaaagatgctgaggtgatgaaggtgatgatggaggagaaaaagctatagatcctgcagttggggtgacagaagtcacggccatcggctgcttaccagtagaccccagactggcatttcaggggaatccaggctgtagggaatgtctaagaaggccccagaggggatttgctggtttgcaaaatttcaattttgtgggtgagggaatccattctggaggtttcatatcccactggggagacagtcctatcctttgctgccctttttatgttctgggtgttttatttttaaatttcaaatcttggccttgatttaaggaatgtccttaactttcttggcattgctgaggcacaaaagcagcaaactacagccattgagaggctaataaaggaacctcaatgccatagtcaccttcctgcgcatccccacagcacttctgggtcccgctcccccaacccagtaccagaaaaggcccagggcctttgcatgcttgggtctggtgtggcagggatgcattcagagtggctgaacacagaggccgaggttggaggtactatgggatggtatggagaggaggctcagacaattccattttctggagcacactttctgcagctcccttttacatacacttctttttgagaaccaaatactcaagaactcttacctcattccattttctcctttgactttggccttgactctttcttagtggatgtgtactctaaacccaatgaatgtattccgaatcaagcaagagagaagcttcaaacatcctcttcagcctctctgcccagctcagcctcccttgctcgctcttccttccagagacctccaaggacaagggcagggctgatctgactctcacggagacagcctcaggtgtaaagctaaggatgctaacttgggccttttccatgggaagagctgaaaggaacctgagaattccaattaggcttaaactaatgagctggaaactttggggaaaccactgcagcaatgagggaagagcgtgatcatcctcgatttaattagcgctggaaaaacttggggtccagctggtagcacgaggacggacgctgttcagggggcgcaaagtttctgaaagtgtcagaagggggattcccctggtggtgtacggagacacgctacggaacaaacacggactccttcttcatcttaagtggggagaagggaagaccctaaatggggaacggtgagccagaatgaagtctggagtccctcttcccccatctgccctcctcacgggatggatggagtctgagactatatgagaggaaagcaacccttcagggaactctattgtctatcggggcctgcactatccccaggccaggtcgtccttgatcatttctgcctactctttgttgggcagcctctgttgctaataaggaaaaaggagagaaaccacctgctgctgtcagaggccacagaccacccgctggccttcctgactctaccctccagccacacgcgggaccctgggcacataggtagcaggaagagcgaagtaggggtgggtagctgtgtgtatcctggcgtggggtcctcctcactcccgaagcccgagggtcctggggagctcagcctgtggaatccagttgacagctggccactcctcccctccccactgggggctctttggggaaaaaaacggcctgaccggggcgccccgccgtcctcccagtgtaccccaccgctctcggctgggggcgcagcaccttggagagaggcgcctggccccgcgcctgggctgggggcgctctaccttgcgccctgggggtcaggggcgcttgccgggccgctgccgaggggccctgcccacccctgcccagcccggagcccaggcgagccagcgcggcgagcctcctcccctcccgcctgggtcgtcctgagtccgcgcccgctccagttgctgcagctgctgctgctggcggctgcggggagcgcggggcgcgcgccgaagaggcttgggcggcgaggacggggacgaggaggagtcggaggcggcaaggaggaagagcgagcggaggccgaggggctcagcggcgtggcgacaggactagggggtcccgagaacatgggctagcaggcggccacgggccggcggccggacgcggtgaacctgccgcggccgggcgcgcactggcgcggcgagccggagccgagcgcagccgggggaggagggctggcgcaggggcgcccgggcggagggggccgattatccattattaacgagttaccacctaataagcggagagcggctcgttagccgcgcgggaggcgctcggggaagggggtcaccggccgagcgcagcgcacacccgtggcgcacggcgggcggcgcggcgccgaggacacccgggaccgcgcgcggagccggggcgggcccgggggcggcgcagaccccgggcgcgggcggcccgcggcgccccctggctctcggcgctcggggccagcgcagcccggggcgagcggggcgcgggccggggagggggagctgcccgcgcactccatccccctcccccccgggcgggcggcggcggctcgctgtatatatctcggcgcaccccgccaggtcgcgcacagcgccccgagcccaggcgcctccccgcccccctcccgcgctccgcggcggcggcggcggcggcagcagtagcagcaatatggctgttgatgggtgtttggggtggcgctggcggcgggaggagctcccccgagcccctgcgccggctgcccgttgctagctatggcaaatggtggcggcggcggcggcggcagcagcggcggcggcggcggcggcggaggcagcagtcttagaatgagtagcaatatccacgcgaaccatctcagcctagacgcgtcctcctcctcctcctcctcctcttcctcttcttcttcttcctcctcctcttcctcctcgtcctcggtccacgagcccaagatggatgcgctcatcatcccggtgaccatggaggtgccgtgcgacagccggggccaacgcatgtggtgggctttcctggcctcctccatggtgactttcttcgggggcctcttcatcatcttgctctggcggacgctcaagtacctgtggaccgtgtgctgccactgcgggggcaagacgaaggtaacgcgcgccccgggcgcccgccctctgcgccagccccaccgcttctcggcgtcccctgcagcccacctcctcgctccgcgccgcgccgtgcctccctccatccccgcctgccttcccctcgccgccttcccttccctcggctctcccggtgctctcggatcggggcagcgggcggcgcgccgggggtgaggagttgcccccagccagtgcgctccgggacgcggacgctcaatcctgtcctcttgtttattgtagggttgttggcggctgcggctggggccggggtcggggactcacaggctcgggtgccgtggtgcggggtggggacagccaactcagcggggacggaggaagctgggggcagctgggtgcgtgttttgcaccgctcacctgccggggctcggctcctggcggtgggcgagagggagcacatccgcccatactttaggaacctgttggggagatgagttcgtggggtcagaaagaagggaaaaatcctttgggcaagggagagaataattttgcacaagggaatcccgggggaggagcatggcccgagataacagggggacttcgaggggcgagagaagttggggagatccatcccactattgggggtagcccacggggctgccacttttggaatgtgtcgaggtcgcatatctgatgtaacctcccactccgtcccttaggtgctctagtggaacataccccaagttcttcggcctctgttcctttgcccccaggccacccactttg

SEQ ID NO: 4848 - DNA, 6000 bp, Homo sapiens
aagtgggagctaaaccgtgagtacgcaaaggcattcagaggacacaatggactctggagactcagaaggggaagggtgggagagggagtgggattaaaaaaacctacaaatgaggcacaatgtacgctacttgggtgatgagtgcactaaagtcctagcatttgccacgatgtaattcatctatgtaaacaaaaatcacttgtatccccaaagctattgaaatttaaaacatattttaaataaaataaaaaccaaagcattgtgtatataatgacatttctagtcattaaacatgaaataaaaatgtaaatttaaaccccttccaaaaaataaagtggtaaaattttatggcatgtttgaggacctggaaggatgctagattgtagggttctcaggaaagggagacacgggctggggccaccagacagtcgtgtccagagccttcaggaccaatctaatgactgtcacttcctctccattgtcagttctcattaggtgagaaaacgtgctgatgatttctctgggtctgctttgaaccaaagctgcgttctccatcaatttagcttgggctggcccagattcaggattgacactgtctctagctctggcctcagcgagcatcttagggattctaggttgaggtaggtacctcgcagacccaggttgcctccagaggtgaagtgcttgggctcataggagtagacacagtgaaaatagtggtggggctggagaggatgggagtgaatgaacttaaataccctagagtctatttaggctagcactttatacccattatcccatttaatctttacaaccacccattcggaatgtcaaggcattgagggcagagagctgaagggacttggttccagccacacaagagcaggaggcagagctgtctgtccccagagccttttgggggactgatcttatgtgggattctcagcaggatttccaaggagtggattaaattttctcccggctggagggacatgaaaagtcctaaagcctggctcttgatcatctcctgggcagatgtcccctttcaaagtccctccctccctgacccttgcctggcttcctctctgctcccagcgggcagtgtgctgcacctcacaggttcaattgtcagaacaccccccgagtccgggcacagaggggaaggcagccaatgggaccggacacccagctgggtttggggacctctcctctccttgccagctccacactggtggcctgggtcctcagaacccactgggcccccgctgcaccccaggttctgcctggctcaccttccaccagtagcaccatccccacagccagcacctcgagctccccgaagccagtgggcagggcactggtctctgccatcctcactctccctcactgccagtggcccagctgtctctggcttcccacagccaggccctcccttttaaagggccatcccatgtgcgtggaggcacatgcaggttattatgttggaccttgggctgtttctggatgcctccccgctgcaaatggtcctcttggcccaagcagaaggaacccattcacgagttggacaatgcagcctttgtgaagccagaatggagccctgtctcattcatttcagccccattgcacaggattaaggtcggggaatccaaatggtgtgtggctgagagcctaattggaaaagagttgcataaccaggggaggggagcaggaggagggatttgagccgcagctgttcccaacaagcctggtgcctgtgtgtgtgtcctcaggctcacatgagtatactccaaagcgctggggaaaggatgaggcttgggaagtcgcctgctgtcagaggaagaaccccatctgggaccagaaaatggggttggggttctggttctgaatctgccactaactagttatgcgccttggagtgggaccactggactcttccgtttacttttctgcaatgtcaatgtcttttgtctgtggcctttatataagtcctggttagatatcacgaatataaacctcagggctgcatttcctgtctcccatagagcacctgagcataaaaaatgtcctaggacactgtcttagaacagaggggctgcctgccgtcttgtcagtctccgaccccgaacccgcccagccttgccggccccactaagagctttggctgctacaaatgacttcttgatacactggctctttatgcactgttatgctctggctcatgataaaatttacaccaggaaatactgatctaggacaacttagttcattttcagataaagaaaccaagctccagagcactatcagcaacatagctaatattgagtgaggtcaggccctgtgctaggggatcttctgatgagtcctacaacaactccatgagttagataccattatcctttccattttagatgaggaaactgtggctaaaaacagttaagaatctgcctgaggccatgcagtaatttatggatggagctggaacaaaagccgatctcctattcctcaggctcaggcatttttcaatggcatcttctgactcacctggtagagcaacccactctgttccaggaatgcccacttcccaggcctttcctctcatgagtcctcacttacatccaagcctaatccctctgcagggctgagcttatggctgcgccctccagagcgttccctgttctttctcaatttcttttttgtttttttgtttgtttttgagatggagtctcgctctgtcgcccaggctggagtgcaatggcgcaatctcggctcacgcaacctctacctccccagttcaagctattctcctgcctcagcctcccgagtagctgggattacaggcatgtgccaccatgctcggctaattttgtatttttattagagacagggtttctccatgttggtcaggctggtcttgaactcccgacctcaggtgatctgctggccttggactcccaaaatgctgggataacagtcatgagccaccctgcctggccttctgtctcaatttctaccttatggtgttggttaatacatatgtcagtccttttttcatgccttcgagatcacaaaagccttcatgagaggagataaagcagggcaaggccaagattaaagggtaaagttcatttgggcaaaagacacaaggaggaagaagcagagatgtgggaacaggcaagctgacggctgggtttggggaggtggaagtatagctgggaagcactgagaaaatcctactggctgcattggaaggaaggaaagaatgagaagccagtattgttgaaacagacctggctccgagctaggcattttatgtgtgcactggggccccagatatctttgcaggtcatacctcactggtctaggcctgcctggagccacaggcatgaaggactggggaaccttctagaaaagccaaacaacataggtagggcatgctggaccagagaacaatgcctcagggtcaaatgtgaagaatgaatgaatgagtcgactgagtgtctactgctgggaatcatccctggtcagtccccactggcatcttgagtagatatggtggggcgagatagggttaggagagaataagtaaaaattgaaattagtctgggtgcagtggctcaggcctgtaatcccagcactttgggagactgaggtaggaggatcgcttgaggccaggagtttgagaccatcctgggcaacatggcaagaccctgactgcaaaaaataattttttaaaaatagccaaacatggtggtggttgcctgcagttccagctacttgcgaggctgaggcaggaggatggcttgagctcaggagttcggggctacagtgagctatgattacaccattgcactccactctgagtgacagagcaaccctgtccctataaagcaaaacaaagctttatggatggagaatttccaaaggcccttattagaggttggggtcctgtctccaaaaaaacctgaaagtgccttctctaagacctctctgagctacctctctggggccctccttggagtagggcaccttgaggagaggggtgcccttgtcccttatgtggagacatctccacctttggcattcgtagcaatgcccagaagggctcagctgaaatagtagtgtgttgagtccatatccatggggcactcaaggcaggcagctgtttgcctggcagcctgggacagtttgtgggctcatgagagacacctctgatgtctccccaaaatatctgaatctgtccagttcttctgtaagtagggtcttataagtaccagtgaaactgggcacttacaacttgtgagagagcttctgttcccacaggctgtcaaggccttggaatttgagtttgattttcacaaacaccctgcatgaagtaactttatttctctttgtcagataaggacacagaggccaagagataatgtgactcacccaaggtcacagccccttaatggagcagctgggatttgaccccaggaagcctgggtccagagcttagcctccttccaatgcctttagcaccatcaggaagagttgcttcatttcactgcttttttgctatgagacagtgtcacaggaaagaatttccaaaggcccttactgaggcgggggttctttctccatcttccctggcactccagtggggtctgtgttgtccgtggccttgttgggatgggatgctttgcagatgacagtcccatggctgctcgcctctggaaagctgcctacttgtcttgctttgctgtgccctgccctggcctctctgggcctgtggatattgctatggaagggggtcccccgcccctaccctcaggactgagtgattcagaaagcaataagcctctgagtgctgcggctgggactcccctccctaatccccagtctgtccatgtttatccgatggcctcaggagggggtgtaaggggctggcgagcaagtgggcagctgctgagcttgctgggccggtgggacggagcggtccagggacaggcccctgcctgggccagagaggagccaggagccatgagggtggcattaggcatgctctggctcttggcccttgcgtggcccccccaggcccggggcttctgcccctctcaatgcagctgcagcctccatatcatgggtgatggcagcaaggccaggtatggtaccgggtgcgtgggacgggcagcccagcctccattgctttgccagctaggctgggttgggaggagttggagctggggccctgggtgaggtcttcatctcccttggcccttgaggaccagggatcctatggggtggactgtgctgcattgttttccagcaggcaagggggtgactctattcgagaggtaccaggtatctatacacatgggcccgagggtgaggcacaagtatgtcagttctaagaagtccttcctaagtcctcctccaggctcctggtgaagagccctccttaaaggtccaggaaatctcctcccttactgctttttcttctcttttattttttctattccctcttcttttctatatttccccagccccttctttcccaggccacttgcactctcttgcctgacctctctacaatattcaatcatatcccaggcatttcctacaaccccacccatgatgggaccacttgcctctcattctcttcctcctctccatcttcgctggccagatcccaggagcctcagcctcaatacctttttatgagtgctccaaaagccaggagtgcccatcccatgacaagcatgcttccttccatccccagccttttccttgactttccccaccctctgtctgatccctcagagcacctccattctctcctcctctcctttcatgggacattcccatgccactgtggcttgtggacccttgctcttccactactgctcattttcttcttttctttagcaacgtttaaatcatcttttctccaacttctttagcttatccattaatgacctctgcatggtttctgagccactgatggtttctgatcctggg

SEQ ID NO: 4849 - DNA, 6000 bp, Homo sapiens
ctgctggtaagaattaaaatggtgtagccactgtggaaaagtttggcagtacctcaaaaatttaaatatggaagtaccattcctaggtataaacgcacccaagagaactgaaaacatatgcacacacaaaagttcaccgcagcatcattcagaatagtcaaaaagtggaaataatccaagtgtccatcaatgatgaatagatttttaaaatgtggtacagtcatacaacaaaaactatgtagccataacaagaaatgaagtacctgatacatgctacacgcataaacctttaaaatactctgccaagtgaaagaagacggtcacaaagggccacatacatcttttataggaaaagtccagaatagactgatttagtgagacagaaagtagaaagtatatttttacctttcaaattaaattatttttaaaaatgaatggttcaagaatttatatgctatgtttttctaaatcctaacaatcttcttctaaaatatttttaagagagaaaaaagcatgctatggatcaagaaaaacagacctggaattttaaaccagctaaggaaaactctaaggcagaaaactcatttgactttgtggaatgctattgaatgttcccttcaagctgaattttggtcttcgtttgaatgggaaattactacaaataattaaactttattgtgtgaggcatggtggctcacacttggaatcccagcactgtgggaggcagaggcgggcatatcgcttgagcccaggagttcgagaccagcctgggcaacatagtgaaaccccacctctaccaaaaagacaaaagttagccgggagtggcggcaggtgcctatagtcctagctactcaggaggctgaggtgggaggattgcctgagcccaggaagtccaggctgtggtaaactgtgatcgtgccaccgcactccagcctgggtgacacagtgagaccctgtctcgaaaaataaaaataaaaaaaaaccttactttgcaaattatctgtatattttacaaaagcaatcataaatctaaagttgaaattcattagactttatatcacagtaaataatttctaactaaatggaacaaatacttaaaatactccttggaatagtataaatagtataactttggagtcagatacacaggtttgaatcttaccctatttacaagcttggtgatcatcaacaatttgtttggtttctgtgggcctcactccctgtttttttttttttttttgagatggagtttcattcttgttacccaggctggagtgcaatggcgcaatctcagctcactgaaacctccgcctcccaggttcaagcaattctcctgcctcagcctcctgagtagctgggattacagggattcaccatcacaccaggctaattttgtatttttagtacagatggggtttctccatgttggtcaggctggtctcgaactcccaacctcaggtgatccgcccgcctcagcctcccaaagtgctgggattacaggtatgagccaccacgcccagccactccctgcttctaataaatcaggaattataatacctacagtgtgaaaagaaatactccaaatattcactaaatgggggaagagatggataatttcattctgtttttctaaaatctatttctgctgttcatatttttttaacaacttgtatgtaattttaaaacataatgaccaggtgcagtggctcaacacctgtaatcccagcactttcggtggccaaggcgggcagatcatttgaggccaggagtttgagaacagcctggccaacactgtggaacttcgtctctattaaaaatacaaaaaaattagcctggcatggtggcgggcgcctgtaatcccagctgctcgggaggctgaggcaggagaatcactggaacctgggaggcagaggctgcagtgagctgagattgcaccactgcactccagcatgggcaacagagcaagactgtctcaaaaaaacaaaacaaaacaaaaccatgatgattttaaaaataaaaacatctgttttatagggtactcatgaagccagtttgtaaggcacctacacacaggagattctcaattaaaaaaaaaatagtaatttccacagctctattcctcacctcttccaaagcttcttcaattctgcctttccttttttgagatgaagactcgctctgttgcccaggctggagtgcaatggcacgatctcggctcactgcaacctctctccctggttcaagtggttctcccaagtagctggaactacaagcactgcccaaccccctccccgccaccacgcctggctaatttttgtaggccccccaccacgcttggcttatttttgtatttttagtagagacaaggtttcactgtgttgcccaggctggtctcgaactcctgacctcaagtgatccgcccactttagcctcctaaagtgctgggattacaggcgtgagccacctccttaggcccaattccaccttcttgaattcaggtgaacaagtcacagaagaagcaaagttaaacatttatttttctgaaggctaaggttataaagaacaacaaaaacaataaaactaagcttttaaagatttttcctcagaacataaacaaataatttaatccaaaaagaaaaatatttccatgtttactgatgctaatcattttattctgaaactccgtgggttttttgcaggagtgggggattgcaatgtaagagagtaaaacgataatacatccagaaaaaaggaaatttgataccttaatcttttgaccatcaaggaaaattcaggattcaggtcagagtacatttttcactgaaaaacacagtgcaaatacaattaatgacaatgacttatttagcaagtaaggtaaaatataagttccacctgtatgaaaagataattttgactttgagagtacacttagatgaatgtcatttaacagatccaggttgtcaccttatattttacacaatatttcgagaactaagaactttctcttccatattctaaaagatgaataacatgaacatatcgggaagcaccatcgttttgcaggtccaatgggtgtcattttaaaaccacccaagtacactgagaccgctaacgctagtaatgtggtgtttggcagctagttttaatgactgtcattagagctttattttttattttctttttatagagacgagcccaggctggtcttgaactcctggcctcaagcgatcagcctgctttggcccccaaagtgctgggattacaggcgtgagccaccgtgccagcctcgttagtttgaaaagcaccaaaagctatccataggaatgtgaactttagcatttcctatcaagtatgtataaatacataactgaaccctcatacagcataaagcttataaatcatatactgaggccaggcgcggtggctcacgtctgtaatcccagcattctgggaggcctaggcgggcggatcacttgaggtcaggcgttggagaccagcctggccagcacagcgaaaccccgtctctactaaaaatgcaaaaattagccgggcgtggtggcgcgggcctgtaatcccagctaccccgaggctgaggcaggagaatcgctagaacgaacccagggaggtggaagctgcagtgagccgagatggtgccactacactcccgcctgggcgacagagcaagattccatctcaaataaataaataaaataaaaaataaatcatatactgaaccatttaacaaatacatatattcctgagaaagaatttcctgggggcattatcgcatttctagtttccttattttagactatttcagagggagatagggtctccctctgttgcccaggctggggtgcagtggagctatcgtagctcactgcagcctcgaactcctgggctcaagccatcctccagcctcgacctcccaaagtgctaggactaaaggcgtgagccaccgcgccgggccggagcctctgtctgcaaaggtgaagcagtcagtactgtggggcgacacaaccacgacgtgcgtaactatgcgatctccacactgcggagcagttgaacgggacaataaaagctcgcgtggtgagagcttgtgggcgagtgactcccttccagctcacgccagccacgcataatccaactccgggtgccacgccgctctctgcagccctggctggtgacgccgagccctcagcccggccttacgcggcggcggctctgcctcgctttcctgcccacgtgtcagcccctgcacgcccggccccggcctgaggccgccagaggacaggccagggtgggccgcccgttccgagggcgcgcgggcggaaaggaggggcgcccgtgactcacatgacccggtccccgaccagaccgccaagcctcacccacgcggcgctcggggggactcggcctctgagcgccctacagaggccagcccccgaccccgacctccctgggctacccccaacccccctgagggacccccgcggcgcacatacctgagagccccgccggaggcgggtgcggcctccgggcaaatccggccgcccgtgggcccgccccgacccgccccgacccgccccgaccttcccctccctgcccctcccgtccgttcccctccactctcctccccgcccttcctctcccctcccctcccttccccactggcgcgcgagcgtgcgcgccgagcccgcccgcgcctgcgcgcccccgacgccccgccggcgcgcgctgccgccagcgaggcccggggaggccgcggcggaggcggaggcccggcgccctgggcggcgccctgtccccgaagtccgtcctccccgttaggtggcgagcgcccgaggggaggggacagccgggcaagcaggaagctgcggcttaaaagggcaacccgcgcgggacccttcctccctagtcgcggggagtctgagaaagcgcgcctgtttcgcgaccatcacgcacctcccctccgcttgtggccatgtaccgctacctgggcgaagcgctgttgctgtcccgggccgggcccgctgccctgggctcggcgtccgccgactcggccgcgttgctgggctgggcccggggacagcccgccgccgccccgcagccggggctggcattggccgcccggcgccactacagcgaggcggtggccgaccgcgaggacgaccccaacttcttcaagatggtggagggcttcttcgatcgcggcgccagcatcgtggaggacaagctggtggaggacctgaggacccgggagagcgaggagcagaagcggaaccgggtgcgcggcatcctgcggatcatcaagccctgcaaccatgtgctgagtctctccttccccatccggcgcgacgacggctcctgggaggtcatcgaaggctaccgggcccagcacagccagcaccgcacgccctgcaagggaggtgagcgtcggccgggccccgtcccgccctccctgcctcccctgcggccctcccctccggcctcctgccggtgcggggccgctgctcagcccagcccagcccagctggagcgggccgggtccccgcccgggtcaccccgcctcggatgtggccggctctgtggatggtgatttttccgccttaaaatcatcatgcgattggcctgccccctcccccgcgccgtcaccccgggcctctgtatatgctgatcttgcatgcagagtagacgctgcaccggtctccttttggtcccggtgtctgtgtcacacacggcgggtcctgccgaaatgcacttctaggaaagggaatgacctgcccgtgtgataatgcctcgtcagtgttcttgggcttttgtgagtctcccctaaatgcaagctgtcaaattattttctggtatttgttcactcctgttccaatagtgacagatgatatccgaacatagaaaatgacttggcttctaagtttgaaatctagacagttttattaaccaaaggaatttactaatcacgcgttaatcgtttcaattaagtaa

SEQ ID NO: 4850 - DNA, 6000 bp, Homo sapiens
tgacagcaggtattagctacagtcatgaggctgggatggagatatacattaagaaaggacagtggaaataggggctaaagtctaagaaagtgctcatagaaaagagtggactggtgaaagaggaacaaaaaaagatgataaagaaggtggactctaggctgggcatggtggctcacggctgtggtcccagcactttgggaggccaaggcgggaggatcgcttgagcccacaagtttgagaccagcctgggcaacatggcaaaactctgtccctacaaaaaatacaaaaactagccaggcatggtggtgggtggctgtagtcccagctacttgggaggctgaggtgggaggatctcttgaacctaggtaatcaaggctgcagtgaactgtgacgatgccactgcactccaacctgggtgacagagtgaggctctgtctcagaagcaacaaaagaagaaagaaagaaagaaaaagaggcaaagaaagaaggaaaggaagaaaaaagagagagccagagaaaagaaaggaaggaaggaaggaaagaaggaaggaagggtgagagaaaagaaagaaagaaagagagaaagaaagaaagaagaaagaaagagaaagaaggaagtaatgaaagaaagaaaaaaagaaaaaagaaagaaagaaagaaagaaagaaagaaagaaagaaagaaagaaagaaagaaaaatttgtttcttggtgtctaaggaagaatttcactatttccttgtccatgtattgccctaatctgtacagctgactacgtaaaatacttgcatcttatttatgctgtttgtatttagtcctaaaatcttaattagtcatgagaacaaaatttcaaattctatttaggcaaaagccttaaggtttcatcctcaacccccaaccttccagtagcttctatcttgacctggacaccccaaatattacttatctgtagccaatgttccctttttttctgtactgagtccacacattcttgtttgaccaaataacaggaacaaacaattcttttcataatggatgtaccctaaggtgtcaggcttctcagaatcctatctgaaaattaattccactgaaccatggtgcaataggattttagttaacacacgtgttatttattggctacaaatggtagggatttgacaaaatattctgtgcctccaggccagaaaagtacaaatagtactcaattctgagtagggaagaagaggaagggagaaagttagaacacaactattaatgcatgtggaggtaccagatcagctgaccacatcagcgaaaggttacttaactaataatgatgtaccattaatgccatgtccctattaaagaaaaaaaatattcaatgtcacttgttacagcatggtaaagaagactattcaggaccattgagacagatacagggaccactacaacgaagacttgcagtagggtagagagatggggctccactatgaatacagcagaggaaaatcggaatttatagccaagaaacaggatatgggactctagttaaatcgacctaacaggattcttactaaagacaggccaaggtgattagatatcacctggaggacagtggaggatgaggaacccttgggtgatcagttgtcaatgggaagggacgttattgccaaactgattttgccgggttctttgataaactggaatttacaaggaaatacacacatggtcttaggagaaagttcaggagcctgactaaagtttggccaaggaaaaaaatctttgtcattccccaatatttttaaggtaaaagactattaatactaataaggattaatattttttacacatgtataatatgcaaggcattgaattaaatacattctatagattaactcattttgattatcacaaagcctcgatgtaggtttaattttcattctattacttgcttttagacagatgaagttctgactatgacttggaaaagctgggtatctgggctcatttctttaccaaaatcctggcctctaagcgtcactgtccagtagaactttctgtgatgaagaaaacgttttgagtgctatccagtatggtagacattagccacatcttggagtgaagcacttgaaaggtgattagtgcaacagactagtagtaaaaaagaaaaaagcaaaacacacacaagaaacctcaattttaattacgattataattaattaactaaaatgtaaatagccatattttatagccgtgttgggactgtgcaaacatagcacatttccatcactgtagaaaattctgttggacagtgctatttggaagaaatgttgctccttccctttcctcctaggttggattctagggttcctttgctttgcttttcttctgcacagcgatagcagtccaacattctccacccccaatcctccagcctcagtgaaaggagattgttttgctttgtgcatctccctttctccacttccatgctgcctgtcagcagctatgtcaggtcttgagcgtggaaccccaaaggggtaggcacacagaagtgacccgtctgtatccggcactgcctatacgcattgcactcaccatcaccatcatcaacccacagttactgaactcgtaaaggatgaaaatcatcctgccagagatagaatcagacacacaaaatctgaacttctaatgaaacaacaacatcagtgacacagcattgaatagaataaacacagtattagctttggtctttgctagagccccctgtaagtggtgacttagacgaaaggaagccttgtgcggtgtcctagtctccaaaactttaaaaactgttgtcctacattatttaaatggaaagtgagacttatttgccacccaaagcaatgtttaactgaaagaagcatttttctgaaactcaaaggtattcaagcctttaacctaaagaccttcacggctgagaggtcagggctcactcatggcagcctctacatttacaggttcattttcaatgctaatgaattcttttacaagctgtatttgttctttcttttgtgagttttgaacatttattcactaatcatcacttaaatctaacctagggttttttgcaagtgaaaataggacttaaattcagatttatagttaaagggcaggaaactgagaggagggggatgactaaaaatagccagagggtaaaatgagaaaggactatactagactatttaaaaaaacccctggcttgcacagtggctcaagcctgtaatcccagtgcttggggaggctgaggcaggaggatcccttgagcctaggagttcgagactgcaatgagctatgatcgcaccacagcactctagccttagcgacatagtgaaatcccttctttagaaaacaaacaaaacgagactccttcccaaaaaaaaaaaaaaaaaaaacatacctacggtgccttgctgcgtggcaaatgctccctactgttcatcagtaactctttgtcgggcagatcatgaggtcaggagttcgagatcagcctggccaacatggtgaaatcccgtctctaccaaagatacaaaaaattagctgggcgtggtggcacgcgcccgtaatcccagctactccggaagctgaggcaggagaatcgtttgaactagggaggcggaggttgcagtgagccaaaatcgcaccactgcactccagcctgggcgacagagcgagactgcttctcaaaaataataataataataattccaaaaagcctaattcattttgaaattttgacatacagcgaaatcaccagggaatcttgcaaaaaatgcagattctgatccgcggttgggcctgagattccgcatttttaacaagcacccaggtgatgacctcgctgttggtctacgggccactcttgaagaagtgaggacgtaggctccaagatattggaaccagaccttgtcagttcagaggccttgcttctgacaaggagaggactttacagaaagttcgcctggaacctgtcctacgtggggtacgtcctggcagctcccttttcaggctttgagtcaacgtttggggaattgtattatgtaccgggcgcctacacctcactcatttcatactcgcagcaacaacatgaagtgggcgctatcatcctttgttttacaagcaaaagtgaggctcagagagttaaattgcccaaggttatgagattttcagatgcgttgaacccaggtccttttgactccaagagataacgcttttcactagcattctggagcttcagtttcctgtgctgtgaaatgggaaggattggctagcagggtccggatccctgccagatacacctaaaggaggccttgtattttttctcgagatcttgctctttgaccctgaggggaaaagttctttttgggaacaccgagctcccctcggcttgccgaggtcaggggtcatggctcttcccggggagggtccggcagtcctagagcggtttggctggggacacagaaagccggtgcattacataaccgcgagacgtccctcctccgctgcgcccctcgcccctagccaagccacagtacttagagcggatccccgcgctaaatcctctttgccggccaggcagagtccccggcggagctggcggggctgaatgagccggtgcatttcgaaggccgagcactgggattttccgcgctacgcttccctctcccggcgttgccagctaggcccccggccccagcctcgccggcgcctccgcccagtccgctccccgccccaccgaagcgcggatcgcgcagcctggggcccgggaaggggccactgcgcagggacgcggctcggcgggtgcgccccgggggcatgtccgcgcgctaccgccagggctgcagtggtcccggcgaggtgaggaggcggcggggccgggctgggggcgggtgtggcaggagggcgggcggggcatgggggtggtctgcgcgctctgggcgggctgcagagcgctggagcgctggagctctgggctgtcccgggctcagtctcgccggcggcccccgctcccggatccccagcgccctggccaagaagcttcctcggctccccctcttccctctccctgacacggttgtgcagagggcgcggtggctcaggtgacacgggcatccttcaaggaagggcggcgggacggcggggcgctggcgctgtcgttggagctggaggaggacggggaccctccattctccgctgccctagcgcccatcccgcgccgggagcctgggaccctaacttgggtgcgtcggcgcgcagcttgggttgggagggagacacgtgctcacttgccctgtctgggttgggtctgcgctgcggccgagtttttgggcaggtggctggagaacgagcggctttgatctccatctcttgtggttttcaaatgcagacttctcggtggaatagagaccatctttcttctggattttatgtttatagtacattttaaaaatctctccccgtcccccacctcagacaataatatttatttcccgtgtgtgctatattaaaaacacaccggctttcagtggattgaactcaatttctcagttgcttcttgtccacaaataaaccagtgatacctgtattgtggactcggaaaagcgttcgtaacaaaattttgaagcacaatttcagtaagtcctggggctatttggttagtcttccgttttcacacatcagcattctaaacctcttatactatttatttatttagagacaaggtctcgctctgtcgcccaggctggagtgcagtggcgcgatctcagctcattgcaacctccgcctccccggctccaacgatcctccctccccagcatctggagtagctgggactaaaggtgcgcgccaccacgcccggctaatttttggatttttttttttttttttttttttttttgcagatacaggatttcgacatattggccggtttgctctcgagctcctgggctcaagcgatctgcccgctttagcctcccaaagtgatggg

SEQ ID NO: 4851 - DNA, 6000 bp, Homo sapiens
tgtgcacctgtaatcccaggtacttgggaggctgaggcaggataattgcttgaacccaggaaggggaggttgcagtgagctgagatcatgccactgcactccaacctgggcaatagagcgagattctgtctcaaaataaaataaaataaatgtaattcaccacattaaacataaaattcatatgatcatttcaataaagtgaaaccatctgataaaatccgactttatgtcttataaaaagccttaaaactgggcatttaaaagtagctaagcacttgcctgtagtctcagctacttaggaggtggaggcgagaggattgcttgaggccaggggttcaaggctgtagtgcactatgattgtgcctgtgaataatcactgcattccagccagaaggacataacaagactccatctcaaaaaaaaaaaaaaaaaaaccaaaaaaaaaaacctcaaagttttagcaacctaggaataaagagaactcctttaatcttaaaagggctaattatgagaaacctacagcaaacatcatactttatggtgaagtatggaaatctttccctttgaaatacagaaaaagataaggatgtctgttattaccacccctagtcaatattataatgaaaggtctaatcaacatagaaataaatgggaaaataaagtaagcacaaagattgaaaaggaagaaacaccccaggcgttatttgcagattctataattgtaatggtagaaaatccatgagaatttactgctgattacactctcaccagcggtgtatgagacttcccgttgttccacattcttgtcaagcttggcaatgttagatttttacatattttcccatctggtgagtatataataataactcattggagttttaatttgcacttttctaattaccaatgaggttgagtaccttttcatatttacatttcctaatttatgaagtgcctattcaaatcttttacctatttttccattgagttctatgtgtttgtcttactaatttgctggagctgtttatgtactctgaatactagtcctttgtaggttgtgattttaatataattgaatttatcaatatttcctttatgatttgtacattttttcatattaagaaatcctttcctatcctggggtcatatagatattcttctatggctttttttgttgtttgatttttttctttacttatttgttttagagaggaggtcttgccatgttgtctaggctggatttctatttctggcctcaagtgatcctcttgcctcagcttcccaagtagctgggactacaggtgtgagctgctgccaccacctggttagatttttttttttttttttttagagacagggtctcactctgttacccaggttggagtatagtggcacaatcatggctcactgccaccaggacttcccaggctcaagtggttgtcccacctcagcctttcaagtagctgggaccacaggtgcatgccaccacactcgattaatttaaaaaattttttttagaggcagggtctcactatgttgcccaggctggtctcagactcacctcagcctccccaaagtgttgagattacaggtatgaaccactgtgtctgggctgaaacatgttttatcttgcttatttagatttatactccacctgtaattgattatgtattatgtaaggttggaagtcatttgtctttttctcccacatgaataggtaaaaggcaaattaaaactccagtgagatgctattatatgctcaccagaagggcaaatgtaaaaaatctaacattggttaagtatgacaaaaatttagaacaacaggaagtctcatacactgctggcaagagtaccattgtggaatataatttggaattaccttgtaaaggtgaagaaatgcatacattctctggcccagcaagcaattccacccatagattagactctaaatagactcatgcacatttgtgccagaacagtcttggactgttcagaacagcactgtttgtaatagccccattccctgaactgtccaaatgtctggcagtagtagaatgaattaatcaaatctggaggccaggcgcagtggctcatgcctgtaatcccagcactttgggaggctgaggcaggcggatcacgaggtaaagagttcgagaacatcctggccaacatggtgacaccccatctctactaaagatacaaaaattagccgggcgtggtggtgtgcacctgtaatcccagctactcaggaggctgaggcaggagaattgcttgaacccgggaggcagaggttgcagtgaaacgagatcgcaccactgcactccagcctgggctacagagcaagactctgtctcaaaataaataaataaataaaatgtcagaaactcatacaatgaaatgccatatagcaacaagagtgaaggaagtagagctacatgaatgaatttcacaatataatactgagaaaaaagaagtcaaacacgaaagaatccattctgtatgagtccatttctataaagtcataatacagcaaagaattcacaaagtatgaacacatgtatgtgtgtacctatatatatgaatatatgtgttgtatgtaaagttcataacatacaaaagaatttatatcaccaaacaaaggtcatgagcaagcaaacctaaactgttttgttgttgttgttttcggtaaaaactacaaagaaaagcaaggaaatcattaccataaaaatcaggagagtgggccaggcatggtggctcatgcctgtaatcccagcactttgggaggccgaggtggatggatcacctgaggtcaggagtttgagaccagcctggccaacacggtgaaaccctgtctctactaaaaatacaaaattagccgggtgtggtagtgcacgcctgtaatcccagctacctgggaggctgaggcaggagaattgcttgaacccgggaggtggaggtggcagtgagccgatcaccccacttcaatccagcctgggcaacaagagtgaaactccatctaaaaaaagaaaaaaaaatcaggagagtggttacctctgggagaaggaggtggatatgatatatggggtattccaggggcttctggaggactggcaatgttctgtcttgacctggatgcttgttaaactgtcacgtttatgtagtatgcatttttctgtaaatatatttcacagtaaaaatggcaaatagaaagcagccagataaaataaaagtaataatctctatattccactaaaactgccaacatgtccactaaatacaataatgaacacagcactgggtaattggttctttgctttaagccttggagaaactcgtggagacagaagaattcttgtaggttaagtcatgcttattcaatgtacttgaaatgtttatttacaggtgggtctgcttgatgtgtgttctaaagcaaaaagaagcccaatgtttcttcatcccaagttttagccttttcttctgaaatataacgagatcctgatttaaagtcagcctgcactaacagaaacgctgtgagaccacaaataagcatgaacttcttacatgtgcaaattactgtgtgctttgtgccagctcctatgctatgacctttatcttataacagcctttatccccagttcatagatgaggaaactgaggaagagaggggttaagaaacttgctcgccagcacggtggctcaagccagtaaagctcaagccagtaaagctcaagccacggaggccgaggcgggcggatcacaaggtcaagagatcgagaccatccttgccagcatggtgaaaccccgtctctactaaaaatacaaaaaaaaaaaaaattagctgcgtgtggtggcgcacgcctgtagtcccagctactcgggagactgaggcaggagaatcgcttgaacccgggaggcagaggttgcagtgagccaagatcgctacactgcactccagcctggtgacagagcgagactccgtcaaaaaaaaaaaagaaaagaaaagaaaagaaaagaaacttgctaagatgacgtagctcagggtggtgaggcagagtctcacactcagatctggctgactaaccccaggccgcctcttgtgatctcagccaagctgcactgtcttcatgcaccctctgggacagaaagacaccatgggcagctgtaggtccagaaacagtggggagtcacttctccattttcactgaaggcaattggcagcatttgaagagccgggaaaacttaggcgcccagctctcacctctgaaggggttttgaagaaattctatgttcagtcctttatatatatatatatatatatatatatatatatatatatatatatatatatatatatataattatttatacatatatgtaattatttatatatcccatgcctggatcgcgtttacttgaaataaacgctgtcattcgtttgccgtccagtaagaggcaccctttagctgctttaaaaaagctgaacatagggttactgagtgggtgtgttcaatggcgtgagaagtaacagcgaaaagtcaaaagcaaataatgactaaagttttaaaactccttgaaactcagaaaagaatgaaagcagtgacggaaaaatcaattaattcagtttcacgaaccattgctaaaaggcagcaacattttagtggtttcctgacctacccgtatttcttagctccaaattcatgttggtttcatttgtcgcacggaattatttttagtttagggtttgtccttttcacttccacatttcccgaattcataagtctgtgcctgcggcactgcgtagacgcggggagttcggtatcagtttacacgttgccttcagtaaaatccgccagaggtccacccattttgccttttccccttccttgccctgggagaaatcctcccttcactgggagagaacttctctcccagggcggtgcgacccggagctccagcgccctagtctccacttcgtttgctgaaacttgctttctaccagctaagaaccatgctgcgagtgattgtggaatctgccagcaatatccctaaaacgaaatttggcaagccggatcctattgtttctgtcatttttaagggtaagaaaaagttttcttctttttctgaagtcctgttttggaatgttagtttcttgagtcaccttcttgaaaagtctgcatttagacagctgatgaagccaagtctctccagcagcgtttgttacctgcgcaggacaggggagaggacccgtttctggggaaggcatttaattttctccagggcttgagactcatggaatgacctgatgttttagctctaagagtgtgatttctgtaagctcttggcagaaaacgtatttgcgaatcactaaatttcaggtatcaacaaacatctgtattggttcaaagtaagtttcagtagtcttagatgcattttttctctgcctgtgagaaatgggtaaaggaggaagaagagcaattaaattgttggagacaccattactccttgaaccagcctgacgctgctttgattgtcactgggtttctgggaggtgggatgggtgaagttcatagttttattgagttttcctgcccttttgtgcctttgtaattgtttttatatctaaactgttggggagctttttttgtacattctgtagcttttaaattgctcattgaggaaagaactctggacagctagtttgcaatttggggatctagttctatcttgcctgctgaatgaccttgggcaagttacttcatttctctgggatctcaattttcttttctgcaaaacaggcgagaagggtttagacaagatcatctctaaaaacctcatggttggctgagcacagtggctcctcaaccctgagccaactttgggaggccaaggcaggaggattgcttgagcccaggagtttgaggctacagtgagccgtgatcacgccactgcactccagcctgggtgtaaaaataaataaaaataaaaggctcatggtaattttaa

SEQ ID NO: 4852 - DNA, 6000 bp, Homo sapiens
ttctcccactacccttcccatcctctggtaactctactgtctattagagaagttactctctcatagttacaaaaggctgggaagggtagtgggagggtgggggtatctggggtgcttaatgaatgcaaaaaaatagttaaaataaaagacctactatttgatagaaaaccagagtgattatagtcattaataattgaattgtaccttttaaaataactaaaagagcataattatattgtaactcaaaggataaatgcttgaggggatggatattctattttttgtgatgtgatttttacacattacatgcctgtatcaacacatctcatatactccataaataagtacactgactatgtacccacagaaattaaaaattaaagaaaaaaattaaatgaattcaaaaacaaagagagtctctctactgtaaaccttacaaaaaataatgtgaaatccttactcctatattagaacagaatagaaaacccatagataaagccacatacctatggccaacagatctttggcaaagttaacaaagatatacactgtggaaaggacaccctattcaataaatggtgctgggaaaattagctcgccataaacagaagaatgaaattgggcccctaattcttactacatatcaaaattaacttaagatggattaaagacaaatatgagacctaaaaccataaaaatcatagaagaaaacctaggaaaaattctgacattggcctaggcaaataattcataactaagacctctaaaacaaatgcaacaatatcctgtgacaattggaactttgcccagtttttaatggggttatttgttttgtcttattgacttgtttgagttccttataaattctggatattagctcttttttgaatgcacagtttgcaaatattttactctattttgtaggttgtctgtttactctgttaattatttctttgctgtgcagaagctttttagtttaattaagtcccatttgtcttaaaatgttttagcaaaaataagaatctagatgtaaatcttacacttttcacaaaagttaactccaaattgtttatagaactaaatgtgaaacacaaaactataaaactctgagaagataacataggagaaaatatagaagaccttggcaatggtttttcaaatacaacaacaagtgcacaatccatgaaagaacaaatcaataatccgaactttgttaaaacaaaaaaaaagttttactctgtaaaagacactatcaagggagggagaagtccagctaaaagaggaataatagttccaaaagatacaagaatatatctttataagaataaaacactgtcatccaaaatacccaaagaactcttaaagctcagcaacaaaaaagtggacaccctcaatagaaacatgggcaaaagatttgaacagacaccccacccatgaagataaacagatgtcaaataagcatgaaaactgttcaacattacacataattaggggcctgcaaacgaagacaacaatgacacatacctttataataatgaacatctaaggcactgataaaaccaaatgttggcaaggatttgaagcaatgggaactattagttattgctgatatgaatgcaaaatgtcacagacactctggaagagagtttggtggcttttacaaaactaaaatatgcttaccatatgatccagcagttgtgctccttgatatttgccaaatgagttgaaaacatatgtccacacaaaacttgcacaaggacatttatagcatctttattcattattgccaaaattggaagcaaccaagatatccttcactagatgaacagataaactgtggtacatcaatgcaagggaatattattatattactatttggtggtaagaagaaatgagctttcaagccatgagacgacatggagaaaccttctgcatattaataagtgatggaaacctgcctgaaaaggctacatactgtgtgattccaactatataacaatctcttatagtaaaggcaaaaccatggcaacactaaagtgaactgtggttcacttgttaccaaggacttgcatggaagggagagaatacgcagagcatggggggtttttaggacagcaaatctattctgtatgatgctacgatggtggatatatggcattatacatcagtcaaatttatagaatgtacaacacaaacagtaaaccctatgtgaacttcgaactttggttgatgattatgtcttattgttggctcactgactgtaactaatgaaccccactgatgggggttgttgattgtgggaaagactatttgtaggtgtggtgaaggggtttgtgggaactgttgctcggagcctaaaattgctataaaaataaattctattaattaaaaaaaaaccccgctctaattcacaaccctatccaagctgaggtgggtgtcaatctgtgactgtagagggcttaattaatgctaatacactcttgatcatttggacttaggtgggaattctataggatagggtatttcactgaaccaccaagcaggaaaactgggattctaatacaaaatcttttactggtgcattgataatgctctaactcactgagtcaccaattgctcattcctgaaaaacaaagcaaaattaaattagtagatctcagagatcccgtctgtctttaaattatctatgttccttttattctataaaaagaaaggtcaaggcaggagcctcagctcaggagaagaaacaaggagcagagcaagggcaactgtttctcaaggaataaaattattgctctaaagagagaaagtgaacttattttatccaaataaactagcttatacctacgtgagtgaggcagcaaattactacttccctttgccctggataaagggttcaccaggacctggactcactcaccttttaaaggttataaaaccaaacacgtctgacccacattttactcaactggtgctagaattattaactaaattaatgtttattttgaaagtcactgattagattaatccacaagtattgaattttagtcaatcttggtggcccggtttaactggatgttttgcttaaaaggaaggcagcaagatgcaggggttatggtttccagccccagcttggtcacttgcattctgtgtgtccttagctaaagtactgaatctccatggtctaactttctcctctctaaactgggaataattttacagtgggcaaagataattgagagaataaaaagagatgtgatgagtgtgaaaattctctgtaaatttgtcataatgtctataaacataatcgataaaacattgtataactgggtcttaatattttcttaatgaaagagctggaaataactgtactggtcaatttagaataaaggtaatcttttcagagcatgcctttgtatacacactttgttattagtgatctagtaatgttcataaatccagttgtatttagatcttcatgaccattgactatcagttcccatttcaggtctgcacattgcagtggttctgtgccctgggtccattcagtgatttccctgtgttccatcttctgttgaatccacaactgttgttctgtgtataatttctcttccttgctgtgtatgattacattctattatttgtaacaataacagaccaaaaacaatagaagcagccatgtctggaggtgactggaaggtggagaagccatagattttcaagccctgtgccataaattatgtgagattggccctttccttaatagtgctgaacaactttcacttgtgaggtgatgcagaggggagaactctaatttttatttcttcttttgagcgtctccggtcctcttatccttataaacaaataacggacttctatttaatgtgaagcctgttgctttctgaacagagtcaaggtggcgtatcttcagagtaactaatgtctggggtttgttttgtttttctaaaattgttcttgagccagctgtggtgtaagtggtaatgaaccccaatgggtatcagaagatctctgctcaaatcccggttttaccggcaatgagctgtgtggcactgacaggtgtcctgttctcccagagtttctttcccaatttgaaaaataaaaaatgataatctttatactccagtctcttttaatgatgaatatacatttatatatatacttttatatatttaatataatatttaatagtataaatatgtatttatgttattattatgtaataatgtatgtaacactccctgctaattcagtttgtctctttgacatgtaaagtaaataatcacctattattataataatgtaataataacacaaatattattatgtaataacatatatatttatgtatattgtttatatacatttaaatatatataaatatacatttattagctaataatttgatatatgtatggtaattcaacatgtatgagttatattcactatttcatgtttaggcagctgtattttaagtgaactatactaaatatttgaaaggcttttgttatcaagggctaagtctcctattttttgatatagcattacaatgtacattttttatacacaaaatatagaatacactgatttccctcaaggtcataaattcccaactggtcattaatctgagaatattgaattttgagtatattctaacatagaatcatttacttcagtgtttctccatcatcacagcacattggaacaaccagggacttttaattaaaaatacctgggctccaatccaatacaattaaaccagaatctcctagattggcactggaaagaaggagtaggacaaaagaacattttatttctatccatgggccaaagtccactcagaaaaaaagtataaattggatctaggtgattgtttactttacatgtcaaagagacacacactaaattagcagggagtgttataaaaactttggagtgcaagctcacagctgtcttaataagaagagaaggcttcaatggaaccttttgtggtcctggtgctgtgtctctcttttatgcttctcttttcactctggagacagagctgtaggagaaggaagctccctcctggccccactcctcttcctattattggaaatatgctacagatagatgttaaggacatctgcaaatctttcaccaatgtaagtctgccttatgttcctccagccaattgcaaagggtaagttatttgactgctatttttagacaaaatatattcctggaagcacactattataatagatcattgtaaagcaaaatactccctctgaacttctttgatgtttcttttgtcttcctattttttttttttttgagacggagtctcgctctattgcccaggctggagtgcagtggcactatctccactcactgcaagctctgcctcccaggttcacaccattctcctgcctcagcctcccccgagtaactgggactacaggtgccctccaccatgcccggctaattttttgtatgttttagtagagacagggtttcaccgtgttagccagaatggtctcagtctcctgacctcatgatctgcctgccttggcctcccaaagtgctgggattacatgtgtgagccaccgtacctggcctcttttgtctttctaagtctgtcattgtcagaaatagcggagtgagttgatgcattttgtgaatacagaaacattggggtcattgtattatataatcatttaatacagtggcaaaagtttaaagtgctgtttctcctctttgtttcacagtgttttgctatgatttttgactgaaggtgaagggaagtgtgtgtgattagaaatttcatccaataagttctctactatagtagtcatgtgttttattcagaatggtcatgaaaattgaacttctctgaagattcatttgatggctgatgtgaaataaatatctgtgggttcagggcaaacataagtgcatgaaagaaagaagtaatcagtcagggcccaataggtagttaac

SEQ ID NO: 4853 - DNA, 6000 bp, Homo sapiens
gacctctaaggaatgtggaattcttggctcgggcgttccatcatcttcaaatcagttccgtgccctgaggcacgcgtttgtagatttacttttttctcagtaattaatcagtaagaaacaagacaatcagttattaaggagttttgctctttccactacttgcttcgctttctgtaagatgctacagaaggcattagacaaaaatcatcaaggggtgtttggtgatacagcagcaaaactctttgattcataactctctttctctcatttggttttcttcttttctcctggcattctccagcacggcatctctgaaaatgactatggtcaatatttcgggtaactgggaaaacaacttaccaaaaccaacgtgttctaagaagttgtctttctcaacactgcctcctagtaatgttaaaataatattcacttattgatgcttatgtgtgtcaggcagtgtgtaggcactatccatgcacgatctcatcttcagcttgcaagtaaacctatggagggttgtgttttctccaggttacagatgagagaagtctgcacactaggcactggagctaggattctgccaggtgtctctggagcccgcagccttaactgttatgctactgccagctccagggcctctagtttatttccctctctcccaatctgtgtggctctgaagatgaagtaaaggctgacgactctgggctgtcctctgaaaaatcctgctccctcctttcctaattcctcacacttatgacctgcttggggatgcgtcccacagcatgtttatgatcctggtttgtgtgcatgactctccgcctgatattttaaattctctccaacagcggaaggactgctgggaataatctgatacacatgaagagaaaacgaggagttactaataagattaaattaaacttaagcacattttaaacagcgtgtaaaacacaggactaagcactgtttgagatgagcagacacaaggcacgacctcatggaatttacaatctgctggggagaggaaatgagggataagactacacacaaatatacaggagtttatgccaaatatggcaagttccatgagaaaggaagaaatgaagcactgtagggctggaaggcaggagtcctcccgtttccctgtggacccaggtttaagagaaacggtggagactgagactggagaacaggaagttttactgttttactcaagggtcagtcactgatgcactgacaaggcctcaaggttcaccctccccaggacaagttacataatttacagggctcagttcaaaaattaaaggcagggccctttgttcaaaaatgaagaatttcaagatggtgacagcagagcatgtaatcaagtgtggggccctcctcagcacaggttgcatccacacagggctggccctgcccaaacgaacctccctgggcctctgattccctagggctcacctttgggaagtagggagcaagtatctctctcaccaccttgtagccagcacctagctcagggcctgctgcccagatgaatctatgaatgactggagataggatgaactgacacgattacacctgatgatttcttgggttgctttcagcgttaaaacattgaaggactggccaggtgtggtggctcacgcctgtaatcccagcacttggggaggctgaggggggcagatcgcttgagtccaggagtttgagaccagcctggcaaaatggtgaaactctgtctctaccaaaaatacacaaaattagctggccacagtggcccatgtctgtagtcccagctacttgggagggtgaggcaggaggatcccttgagcccagaagatcaaggctgcagtgagccgagattgcgccattgcattccagcctgggtgacaggaatgagtgaaaccctgtttcaaaaacagaaacaaaaacaaaaacccaacccatcgaaagaccgtgactttcaacatttcttggaggagacacctgagatgagtcctgaaggacagtaggatttttcttttcttttctttttttgagatggagtctcgctctgtcgccaggctggagtgcagtggtgtggtcttggctcactgcaacctccacctcctgggttcaagcgattctcctgcctcagcctcccgagtagctgagattacaggtgcgtgccaccacgcctggctaattttttgtatttttagtagagatggggtttcaccatgttggccaggctggtctcgaactcctgacctcgtgatccgcctgcctcggcctcccaaagtgctgggattactggcgtgagccactgcgcctggccaccagtaggatttttctttctgttttttccactttccttctttcttgactttccactattttaccatttctttcataaatcctaatggcaatgttatgccttacagtgagacatgcaacagtgacacagactggaaacagcagagaggttcaatatttgagggatgacctgaagccttaggcctcccttaagattccttgagatagtgtagatgaaatcttcattgatagagtctggtttttcatcttaaaattattttattttcactggacaagttggtagatgtttatgaagaaaaaaatcagaagactatggatgagcaaaaataattacttgcaatcccataagaatagttctaatgggattgcagtataaaactagttttctacctatttttccattcaataatctgagcatcttttttttttttcttttttttgagatggagtcttattctgttgcccaggctgtagtgcagtggcacgatcttggctcactgcaacctccgcctcccaggctcaggcaattctcctgcctcagcctcccacaggtgcacgccaccatgcccagctaattttggattctttagtagagatggggtttcaccatgtttcccaggctggtctcaaactcctgagctcaggtgatccaccgctgcccaccttggcctcctagagtgctgggattacaggcgtgagccaccactcccagcctattatgagcatctttatgtgtcaataaacctcttcattttttgtagctattaatatatgatattctgtcatatggttgtactattattaaccaatgcactcaaattggatatttggattgttttgattttttttttttttggctattctaaaatggtgttgccctgaatttgctgggtaagtaactagtctctctaccctttgttatacacctctgtggataacctcaggataacgacactattcccacctggggtcgtgtggtggatgtgagttaacgcatgtaaagctcttagcacaagtatagtacggtgcatagcagcctagacgtgctcaataaatactagctgttttattactttatagcccagagagagctgtcttacacagattgtggagtaaataaataggagagccggggaagtgttctttgaaaagctgcaggatgaggtgcagataggggaaggccgtgggctgggggctccctaggttgagtagttccccagtgttttctcatttatagagtaagcttccagatggctaggactcttctttttttttttaatacacagcagaggacaccaggtggtcaccaaagacttgtcaccgttccctgacatctaagaatctttgctgatgagtttccgatcagtctgtgcagttatcaaggccagtctttaccctgccacccacagcctgttcactgagaatgtgctctggctgaagatgcttgcaagggcagctgacaaaaatcagttgtgctcagcccaaagggcgagtgtcttatcttcagggatgtgggaagctgggcatggagggagcaagttccagaccagtacttgctggctctgcgaccttgggccagcagattccccactctgatccctgtctctgtttccttttctgtaactctgagggggactagaggaggtcaggagaatggcatagcacagtggttagctctgaaccccatctaacacggtgccttccccccacttgcaatgaccttgttgcattgtatgcactctacttttcacattgtagaggatcttatttatttacttgtctccactaaaatggaagcttcctaagggaaaaggccttgcctgtcttgttctctgcagttaacactggggtccagcactgccacagagcctctaaatatatgtgtgttgcatgagtgaaatctcagagcctgggttcaaatcctggttgcaccacttgctgtgtgacctcggacaagccacttaaactacacctcagttttcctgcataaaaatagtaattattttcagttttctcactagaaaaatatggattagtaatcgttcctctcttatcaggctaagaggatcaaatgaggaaatatccgggaagcattaagcacactggctggtacagagcacacgaatgacaacagcaaacgtttatgtagcacgacggccaggaactgatcaaaatgcatcacctatgttaactatgttaatcttcactagattttacgaagtcggactattatgccattttacagatgggtaaactgaggcccaggagttaaataacttatcactgttattttacgtctaaggttccttccaagctccccgtgggcgacccttccgaaggaccagaaggcgcgccaggccagcgtccggcccggccaggacggaaagggttactaggcccgcgcgcccgttaccggcggaggccggcgggctcacaatgccaggagccgggcgccggacacttcttcgcctcccatccgcgcacacgccccttcctgtcacggctgggcccggccccgcccccggcaccgcccgctggccgggcgctgccagagtggacggttccagaggcatgctaatgagggggcgggcaccgcagcccattggttgtccgcggagtgtcggtgaagtcagcgctgagtcccagaaaaacagagcggggccagctgcagcgtgtagtgcgagtggggcggacgcgcgcagcccgcccgcccggcgaccagcaaggtaagcccgcgctcgcccgcccggccgcgcttgcccgctcggcggcggcagcgccgggggtgtgcgcggctcggcccccgcgggcggcgcctttgttccgcgctcggaggaggcgcatttaaagggccagctgttggagggacttgggggaccccctcccccagagcatccccccatgggcacagggaaagcggtggtccctcgcggccgaaccgtccatcctgcctgctcggcgaatccccagtctttcaaggaaagttccccagggtgcggaggatctgggggcttccagggttgggggtttttaaatttccttttttggtgggtgtggggtagtacgatcatggcctctgctaggagagaatgtccgcccgtctcagggtggctgcaatttgggtgggtggaggagacatcaaagcccgaatgggtttgtgctgtaaagtgaaactaccgaggaggggcacctctgcagcagccagaggaaggcggagggagcgagcggcgggatggaggcatctcaggtgtgttcattcatcagcatcccctggagagggcggcgggaggggcgcaaggacgacgcggttggccggacccgcctgaatgaacggggactagtatgcgccggggacacggcgcctgcccgtgccgcccgtgccccttcttctccccgagtggctgacagcatcttgctaggcagctcatcaccgacatggacagcaagcaactcctttctccgaattccccgggcatcccctgctaccacctcgctgctttccgatgtggcttccttgatacgtggtagcgccattcaagatagaggggaaagaggcttgaagtcattatgtttccttcatgggggaatgtgctgtcgaattctgcatccccatgcatccgctgtcgtaagatggctttgaaattcaccagtgcatgctttctccaggcagacaagaatttattacgctat

SEQ ID NO: 4854 - DNA, 6000 bp, Homo sapiens
tgcccttttccaaaacacttggaaagtaaccagtttccctgaaagaaaaggcaaagttttgagcagttgttattaaattagaggaggtgcttctgtacaaggggaagtcggtagctgggaagctgatagcacagatcccaccatagtccatttcatagacatttaattcagtaaccctgcctccgaggagacctgtagtgaaactgaccacaaagctaatggaatatttaagtttgggcttcttaaaggaaaaaatatgtgacaactcattctcatctatggggcagcagacatccagtccactgctgacagactacctgcccctttcagaatccggtctctcttactccctgattcagatccttagcctcattccgaagtgctttgagaccactctgtgcctttagacaaattacatgtcaactataattcacataccataaaattcatcctcttaaagtgtacaattcagtggttttaaatgtattcacagagttacacaaccatcaccagaacatttgcagtcccagctatttgtgagatggaagtaggaagatcgcttgagcccaggaggttgaggctgcagtgaaccatgatcatgccactgcactccagcctgggtaacagagtgagaccctgtttcaaaaacaaacaaacaaacaaataaaaaactcaacttcttgtgtattgtatgtaatactctatgagtaacttcccttttttatcattgtatttgtttgttcagtattctgggtcttttaaagcagtggttcccaaaggttagtcacaaagtaatcttttagggtgctttataaaaatactgattcctgggccctacccctagagattctgatcactggtggaagaggcaggtctaggaagtggggactccaagatctgtattttgtaaagttttctaggtgcttctgatgtgcagcttggtttgtgaaagtatgtgatgttgcatagtgtggctgaaactggtttcatttaagggtcccatcattgccaactcctgaatatgtccactatttctctgagaattccaactgctcagaactttgcttaaggaggggaggggacagcctccatctttccattacatgcatgactggaccaagaatggagtcctgaaccagtctaggccagtacaattttctctcccaggaacttggaatttagaccaagacttgaaatgagtcatgagtgggcactaactggaaagattttttagagctagggaagccattttccaccaaatgttcactaatggagactctatcttaaaggaaaagtggagagaaggaaacagatgggcaaagaaaagtgtcagcaagagacttagagatggagaaccatcttgattacttactttccggttttcttgtccctgccccttgtgagacccaattttacctcctgcctttggagactataagttactgcttctagtaaattgtcttgtttgaatgagtttctgtttttacaattaaataacttgagattaaggtaatttaagcctaaaacaatttagatggcatctaaagaagcacttctaaatcctgcattcttatagaccaatactaaatgtcccacttcctatgtgactgtctggtcatgtccagccttatttctaattgctgagacagaagttaaacccctccagtcaaaaaaagaatcagtctttttatcatacacaggaaaaatatcatagctgaattacttccttgacttctatggagggaaaaactagctcatatgtctggaatttaatttttcctaatccatagttacatatcccactactttctccttattgatggaatagaatattagtaataaaatagtaataaaaatgagtgataaataaaatagaaaatgtctgtacaatgttaaaggattttcattttttatactcttcacaaccctatgggatagacaaggatggtgtcattagcccaatttcttaatttgagaaaactaaaccaaaagtagttcattttatttatcaaatatctattgaatatttcttatgttccatgaatatacttccctgttctcaggagcttatcttttagcagggaaggcagataagctattaccataaggtaatctgtgagttaagagaagaaccagaacaggccttctaaagtgaaggcccctatcccttggctctagctatacccacagtcatctaattcattctaagtacatgatgagaatcttaaaagatgaggtaccagatataacttacttgagggaaatttaatttcttttgtttttttctaccctactgcaaattcaaaatgctccacatttaacacatttcgtattctcattccccacccaaaagaactgttgttccccgttcacagttccacatggctggggaggtctcaggaaacttacaatcatggtggaaggggaagaggcatgtcttacatggtggcaggcatgagagagcaaacaagtgaagggggaagagttccttagaaaaccatcagatctcatgagaactcacctcatagatttcctgattcatggtattgcagcaccatcagattcccaagcactgctcttcttctctcactctcccactttgaataagtgctgtcagctctccctcctttttgttccccattcctctgctggagccttttttgggccaccatttcttacctgggcctttgcaataggctaaccaacattccagctctaggcgtctttactgatttctggcacaaaaatcggatcataccattccagcacttaaaaagtcatgtttctctgtttttaaggattataaaattcaaaatctttagcataccacaaaaaaccctttgtaagtttaggataccagccagacccctctcctgtcatgtcctactgcaagtagcctcttttcacggggtgtctcacacctctgcatatatcattcccttattccctcttcctcatatgatcctgtactcctctcctcttttaggtaaactccttacttctagtgcttcaaagcacaatttgaatatcaactctttttaaagccattgtattagtctgttttcacactgttacaaagacatacccaagactgggtaatttataaagaaaagagatttagatgattcacagtttcacatggctggggaggtttcaggaaacttacaatcatggtggaaggggaagaggcaagtcttacatggtggcaggcaggagaaagcaaaccagtgaagggggaagagtcccttataaaaccaccagatctcataagaactcactatcacaagaacagcatgggggaaacagtcccatgatccaatcacctcccatcaggtcccaccctccataggtggggattatgggaattacaattcaaggtgagatttgggtggggacacaaagtcaaaccatttcagccatccctgaatgtctggccatcccattctttagtattcatcacatggtattgtaattatttgctcatatatctctctcttccataaggctgtgaactcagctatgtcttcttccacacccagggaatgcttggctgtctcagtccattttgtgctgctaaaacacaataacacagactggataatttttaaataatagaaatttatttctcacagttctagaggctaggaagtccaagatcaaggtgccagcatctggtgagggctttcttgctgtatcctcacgtggtggaagggcagaagagcagaagagaacacccacctccacaaaccttttgatagcagcattaatctattcatgagggtcactctattcataaaggtggagcactcttgacccaaatgcctcccattaggccccacctcccaatattcttgcattgggaattaagtttccaacatatgaattttgggggacatattcagaccatagcagtagccagtgtttaataaacaagaaaatgaataaataggcttagtagtgttatcagggacgacagaagggcatgatgcctttctgtgcccaacctcctatcaagtgctgccctcccaccacccagcactatgtgcctatgcaggaatgtgtcctttgagcaaaatacagcaaggaaagagggagaaaaatctgtgttttcactttttttctttttctttttaagaggtggggtcttgctgtgttgtccaggctggatttgaactcctgggctcaggtggttctcctgcctccacctacgagtagctgggactacaggcacacaccacagtgccaggtttttgtggtctctctttaaaggtgagtctgcattcacctttggaatagttctagttgtcatagattgaatatcctattttaaaatgcaatattcttacaactgcctttgatgaaagggagttgagatgggaccattggggaaacctccagatgactagggggcaagtaatttgattgcagtgccaaaatgcttccatttaaggagccaaagtttgcaaatgtgtgtaaactgatccaatctattcccaggatgtgcctgaagtaacaaacatatgtaagttgatccaacctatttccgaggtgtgcccgggatataaatggttaacattgacaaacacaccttatgaaatctaccagcagctgagggtgccaggcacctcttctacctccctggaaggcccagtggggcggcgtttcgaaggtgtcttcgcccctgtctccggcccctgtcccctcccgggacgtgggcgttccccctgaactcgagtcccgcctcttccaggctgccggggcctggtgggctggcccgccacgtggagcgctggcttgattctcgaaaggggcctacgccattgccgcgccgcagctccaggacaggccctcgccccacgtcaacagcgtagggccggctgcccaggtttactcttacgccactgacgtaacgtcatcgtgcgggacgtggacggaagaaaaaagagagtgagcgagcgccggaatcagcccggcgtggagtgcggacccgcggtagtgccagggggcgaaggcggcggtggtgaggaaggtacgcggcgagcggcggggatggctaggcgcccgcgtctctgcggaagctgttgcgcgcccaggctcaagcgcgaggggcgtgagcgccgggccgctggagcggggacgctgccggagcaggtgccggggcccggggatctggcccatgggtaggtgtgggcctcggccgagggatggcggctgcatcgggccgcccagggcgcgctgcaagaccgtggcgcgctcccatatgccggtgcgcggccgccccgggatctacggatggctacgggccctgacctccccggcctcccctgggtacaccatgtaaggaactgggccaagtggagacttcaggcatccgcgggccccttctttccaagagtatggagcctgcactggtgggtggcgtgggtggcggtggtggcagcgccgggatgccgcgggttttagctggccgcacgctgactctcaggggcctgggtccctagttccccgcggccctccaggcgttcatcatcccctcctcaaagccagactccctttgcagtatggcattctgtgtatgctggggtcttcctgttacagcaggacgcacccacataccccacctcgtccttcccccatcattatcccctgccctctgaggtggtgaggcccatcggatctttgtatttaagtggtgagccatataccgagcatgtgtttgtgggtgaactgtgctgggactgaggttcacttctctgttcaaatcagttagataagggcattctgtttagtctgtaaagagatattgagaaatgtcttgagtcaaaacgtgaaaactttcttcaactgatgatatggagtctaaacacacacacagagtcgagacacagtcacacaaatctagacacgagtctagatacacacacacacacacacacacacacactctctttgctccttgggatcaactgtgtgcttctcgagggcgtaatacactctgcc

SEQ ID NO: 4855 - DNA, 6000 bp, Homo sapiens
ggtatgtttggagttttgtgggttatattacagaacggtaattatacaactgtgtttttagaagcactcagattgctctcagtgcaaaatcctttaacacatgcagttgttttgtgctatacatagtctcaagattttgacttttctgcccatttgcagtcaccaattacatagagttgatagataaataattgatagatgataaatagatgatataggtagataggtagatagatagatgatagaaaaagagagaaaaagaaagaaagagaaaaagagacaaagaaaaagaaagaatgaaagaagaaagaacaaaaaaggagaaagaaaggaagaaagaaagaaaggaaagaaagagaagaaagacagaaagaaagacagacagaaagaaagaaagcaggctatagatcttcagcaaggtttatcttctatagctaacggtgagtcccagtggtgcaagggcatgaatgctggtatatcagtcagcatgggctagcttatgctgcaacaactatcccccaaatctcaggggctttatataagatttatttcttgtccacactacacattcatttctggtcatctggaaactcttccatatcatcctcagtcaggaccaggctgatgaagcagcagcatcagaacattgctgggttttataatacagggaaagaaagggtggcacatgacacactggctcttaaaactacctggaaatgatatattacttctactcatttcattgatcacagcaagtcacatggatgtccttaacttcatgacaagaacaaggcaaactagcaacattggtgggcagcagtaatgactctcacatgtgacatttgtagataggaaaatgactataattcttctgtttgttctaaaatttcactttatccctaccttattattaacattttagataaagatttctaaaaattagaacaaggccactgcaacaatgtttgtatacccacaaaattcatgtattgaaatcccagcccctcatgtaatagtattgagaggcgggggctttgggacgtaattaggttatgaggctccagagagatccctcagcctccacgtgaggacacagagagaggacagctgcctaggaaccaggaagcaggccctcaccagacactgaatctcctggcaccttgatcttggacttcccagcccccagaactgtgataaataactttctgttgcttataagccactcagtctgtggtgctctgttttagcgtcccaaatggactaagacagccacctgtcatttagaatggtccagttttttaagctgaccggttgttacagggaagaccatccatgtgattgggcttgtacaaatttaaatggtgacaaaatataaatgatccgagattctcagagttggtggccccaatctttcacccactaagggcattccatctatggtttctaaggagatgattctcaggcccgacttccaaagaaggagagcttactcacttcatccattccttctcctttaggtaacaatgccaaattcattttgcagaaccacctcttcttccattggagggaccctcactggggggactgttagccaggtggtacatcatccttggccatatgaaccaagccagaccaaccaaatcctcttcctgggactggagtcctgatcagagaggcaaaagggctgagatattttggagctcagtttccctggaaggacacctctgaaagaccgtctgggagttgctgctgctgaaggtttgggagcaacctcactctgtccttccagagcctggttctctagccctctgtcctttctgagagctccactatactcagtcagtaagttctccttttctgtattgtattgtattgtattgtattgtattgtattgtattgtattgtattgtattgtactgtactgtactgtactgtactgtactgtattgtattgtattgtattgtattgtattgtattgtattttgagatggagtcttgctctgtcgcccaggctggagtgcaatggcatgatcttggctcactgcaacctccgcctcccaggttcaagcgattctcctgcctcagcctcccgagtagctgggattacaggcatgtgccaccatgcccagataatttttgtatttttagtagagatggggtttcgccatgttggccaggctgttctcgaactcctgacctcaggtgatccacccgcctaggcctctcaaagtgttgggattacaggcgtgagccactgtgcccggccaaattttccttttcaaaaaattaagcagagtctggttttgatgcttgtgactgggcagtcatgactgatggacacttaggcaggggtaccaattgcctgaagatgtcaacaattcttctaaagagataatgtgtccatcagaaggcagagttatggatcagtggatgcacagcaaacaaaagtgccaaaaaggacctcagtggccctccccatccacaaacagccttgccagagagtgctggggccataaactggaattctatggtccaggttgattctacgccagtcaaggaaaattaaaagcatcatttgtacgagctgtgctgattcaagtagtctaattgcataaattgtatcatccctgctttgtagattaaaagactcagactggaagaagttatttcacttgcctaagaccatgcagcttccagtagggcagctgtggctctaaacagaggtctctctagaccatgttgtcaccagtaggttcagtttaggctgtcactgtggagtcttggaaactggaagcccacaaggcagaggcctcattggtcttgtttaggatagcatcagtgtcggccatgttgcaggtggctgattaccacagtctaagaactgattagaacagcagctgtcacccctgactgctcgttagcgtcccctggggatgcccctgcctcactctgatcaatcaagtcagagtctctgggggcaggttctaggcatcaagagtttttataaccagccccctaccactccctaggtaattcaggtatgcaaccaggatggaaaaaccacctgattaaaggcaatctggtctccactgtgccactaaactgctcttgtcaaggccaccagcaaccccgatactgggaatcagaaggctcttctgacctcttcggaggctacctctcagcagcagttgatacaattaaccaacatctactccccttcttgaatcaaatttctttcctgtgacccccgaacttatctgattttcctgcctcactcaactctccttgctagtgacaccccctcttccaggctgctaaatgtctgtgaacccctggcagctgtcctggccctctgccctgtctacctgctcatgcacaccgggggctttaaaaccatccacaggccggccactcccaaacggatgtcttcagccccagatcccctttatccagtcgcctacttggcacccacacttggacagcccctaggctactcaggtgtaagggcaatctgtttctccagtattacctgcctaagctaatagcatctccatttttgttagtcaagcctcaaacccaggagttggctttattcttctctttccctcacctcgcccttccccgccccatatttttttcatcatttaatcccagtggctccacctccacagtagagagcacaatcattcactgctgtcttcctacagcagccaccttcatcgctcacctggactccactagccagccacctgcttccactctcttcccctgtaatcttggctccacagagaagccctagcaatcctcgtcaccagcaattacatcatgcatctctcccactgaaaaacccttggaaaaggtttcatctaaggatgaaaatcttaccatgccctcccatgtcacatcaaaagggctcaaactcactccgtccttagccccttcccgggtgactccctggtttatgttgttccagccaaccggcctcctgcctgctctgggagtgcaccaagcttacagggcttagcatttgctgtggcttctgcctgggactctcctccctcaacccttcacatgtctgccctcttctcatctttcacgcacagcttcagtgccatctcccagagtcatctaaacaacggcctcctctgtcacttgagtcgctctctccttacactcctatctgctcctctcacagtggttttcatttcaatggccaaattattggtttaattctgttgttttattagcaactcattcaccattttaaagaggcaaatccctaacagggaaattgtaagttataaagcagcccaagtccatggcttcctccaggtctagagagcttcccacccaaaatacaaaaacagagagggggtgaggctgaactcacaccaggcagctcattggccactgagtgcagcaccttgcagcagctggagcccccagcagtgtgactcctgcaacagaatgggcccccacccctcctccagacatcccgaatgtccatgctgttgtccatgtaacacaatgactccatcattatcagtaacatggttaatgtggactcccgtcagctggggatggagtggccagcctcagcctcatgtaacccattgtttccaaagggctgcaggctgcagaagcccccaagctctcaggccagctgtggcttctttgctgagatggaggtatagccaagaaagcagcctgaaaagtaaggacagaaaatcaaggcaaagagggtgggtgaaccaggccatacacgtcggccatgcagcagcagcccatctttcccgagggatggactgagggcttggctactcccctgaccataaatggcttggccagggttctcttggagccacctctcagcctgcctctgcagctttgtcagttaactgttcctacaaatgaaagacacaagccaataaagccagtgagaaaggagcttaccaaaggcagtgtacgaagaaggttcctgggagactgtcagaaatggtgagtgaaagctggcatctcttctcaatcgaactttcatttcttactataaaaaacctccaaattcaattaaatgtacaatgaagtaaagggactttattttaaattattttcctatatgcaaaataccaataattttttaaacttctcacctaatatttgctgatcttgtctttcattttggtattaaggtttgtttttaaaaccccacatacaagagtacagagtagatgtttcacctatgttccctttctagttgaagcaatggatctaatcaacgattttatctgtcttacttgtttaatctggctttttgttccatcatcagcaacatggatggtcatcattgatcagaaattttccatctttcttgtttacttgtgataaatattttgttgtgactcaatcaaatgaagtttgctaagttagaagagaaaacaagagggttctgtgatttactaaagaattatggaaacagcctaggtgtccatcagtggatgaatggataaagggactgtggtttatatgtatatatacaactgaatattagctttagaataggaggagaccctgccatttgccatgtttgtcctatttggacctggagaacattatgctaagtgaaataagccagacacaaaaagaagaatattgtgtaatctcactttcttgtggaattttttttttttttttttttttttttttttacaaaaagcattgttaaaaggagtagagctcagtctgtggagttagggagatctgtgatctaacctgatctctaccacttaaaagctggtgagcaaaaacctatcttggtctcagtttccacaggtataatataggaataatagtgctcccttcatggggaggttgtgagtatggggtcttatacccagcacaccttcaacagcagtaagtttttatcctgtctcttcctccttcctctcacaaactgcaaacttataatgaaggacgttcagccactgagatcccaaaatgc

SEQ ID NO: 4856 - DNA, 6000 bp, Homo sapiens
ggtttgataaattgtgctctgttcatttccaagcaagttattaagaacataaaatagtcttcttcattcattcctgctggccagacactgtgttcaccagggtggtgaggggatgagtaggaggttgaaagatatattctgaattctgaggcacaacttggaattcacttctcgtaaaaatcataaaaaataggttcttaggtgttctgtgtgggaaatgcgcgcgggaggagacacacacacaatacctttaagggtaaacaagctttatcccaaatggcagtgcagatataagcaaatgatataataagcaaattgcaatgggaagggagaagggaaaagatatatatatgtatttacactcaccagactatggaggattcaccaccagactgggaagcaacagcctgggctccagagttggccactcgtccatgcagacaaggagaggtctcatgaagcttcggcgcagtctggaaccctagctctttttgtaacgagttgtttggcatgaggtccagtcacaagggccctttgtgaccaggatcaaggaacacaaaaaggtcaacttgtttttgcggttgtctattgtttttcaataactaatgtataggaatagattgaaatagagatttctccgaaacaacgctggatgaacgcctcaaagagctcacacaatccgttctgggacttggtgaccatcgtttgtgtccatgttcaattgagttcaaatttaatatttaggctagtcgccaaagcccatttaggataaaatgtctttgctatctctgcagtaagagttagcatggtatagggaagagattgtttcggaagccaggaaacctggtcttttattttggtgtgctacttacttgacgagttcacataacttgactaccttgttctatgtttcatcacctacgaagtggagagttgtgtctttggtaacagtctaggtctcttcaactctgttaagtctaagtctcagaaagagggtgtggaatcgctttgtcggaagaagcagggagacagccttagtggcatcaccacctaattggcaaggctctttttattatgtggcacctgctgttccttgctctgtctcactgttatatcagttaaaaaactgagagacagtgaaagaggaaccacacaaagaaactaatggccttagttgctcttcagtccaagaactaaatgttctcagtaatggcttcctaaagaaagaactcagagcaatcatgaagatctgtgtctagaacattacagccagaacagaaacggtggaggtggaaaatggcaaatagcaatagacgaactgtcgcccaccctgctgaagtacataactggcaagacaaacataacaaagtagaaggaagaaatagaatttcaaagaaaaagtagctgatgatagaaatcagaagatatgtggtcaatccataccctaatactttttttttttttttttttttgagacagggtctggctctgtcacccaggctggagtgcagtggcacaatcagctcactgcaacctccacctcccaggttcaagccatcttcctacctcagcctcctgaggagctgggaccacaggcacgtgccagcatgcccagatacttttttttttttgtattttttgaagagacagaggtgtcactctgttgtccaggttggtcttgaactcctgagctcaagcagtctgcccacctcggcctcccaaagtactgggattacaggggtgagccactgtgcctagcccccatacctaatagttttgatgatcatgtttacccagaatgaaaataaaagactgacattttggttttctggattgcttgctggtcataagctctttaaccaaaatggagtcttattagagctaccatagaaaagaggctgtatagccactgggggaggtgggaaatgcctttcaccggcattttctccccaccgctgccatcctttttggtgtcagggaatgaggtcattcacccagatgaaataagtggtgaaataaggtatgttaatgtttttcactccccagtttagtgaaacaaccctaattttgatggtgacctgagccctgttttgtcctgttgaggtcatcaggcacctaggatctttgaagccacacttcttttactctaatcagttactttatctccctttccttctttccacacctactgctgtcagacttgtatcacctaatgccatttatcagcataattcccctagtacctaccagagtgcctggtacatagtagaggcttaataaataatcgttgaattaatggctctacctgctcttccatccattaaattttcccaaatactcctctgaaatagggtttctttccacttctctcattgcccattgcttttactgcctgttgaccatttgcacagttggccagcttttgtgttcctttttaaaagtacactgtcatgcctgttctttgttgtgtgtgtagtttcctggttttaatctatcctccctaaatgaatatactttttcttgtgtcctccctacctccaagcatttgccaacccagtcctccccaaaacacctgccacatgcatactacctcaaatctgtggagggtggtgatggatacttaagaaactacacatccatcttaatgtagcacttacacggcttgttcttcaattgcacatcatcacttcattcaagagcagtgattattcattcacagaattgactgagctttcactatgagcaagtcaccctgctaggtgctcgggaggatatacaaagatgtataagatgcctcctctgatttctacagcaattactggtgtatgattcattcagcaattaatcatgtactgctttgtgatgtttcttacactatctagaaagcattcttcaaatcttgctatgctatttgacttttcacttgttaatgtcttcattcattcagcaaagagttgaatacctatgatgtgacaagcactatctcagcagctgggacagatataaagacaaacaaatcatagtccctgcaatcaaaaaggtccgaatgcagtgtagaagaggaaatgtgaatagataattacaacacaacacgccaaatgctattgaaatcccaaagaaggaatgctccatttctcaagggatcatgcaaggtttcactgaggaggtgatcatcagctaggtctgaaaggataatatctaaggcacaaggtgaagcagagcatgccagataaagggagtataaagagcaaaggcacagaggtgtaaaaatatatacgggtgaatgcagagcatagaaattggtggaaggtaaagttagggaaataaattagggataaaataggcaaaaatttggactttatcctttagcagggaactttttttctgattacatagttagcacatgctcactgtaaaaaataaccaaacatttataggcatgtacaaagtagaaagttaaccactgatagtagtttgttataatctttcagattgttttctatgggcagactaacatattgccatataaaatgaagttaaactcttattttcttcaacttgaaaatttaacagaacctcttggttatcattccatgccagtacttacctatttcctttttttaaagtggctgtatagttggtaaatcattaccagcaaaaagacctattatggagccagactgagtgggtctggtgtttcagcaagccactcaagctctctgtgcttcagttacctcatctgtaacaggaacattttcaccgtacctgctgcatagggtttctgtgagaatttaatgagccaatatcgttcagaatagtgcctggcagatgaacgccctcgtggtgactccatgatttatttacctaacattgaagaactgttttaagcaagggagtgagcgatataatctggtttctttttagaataaaaaaaacatcaccctggcacctgttggggatgttaaacgggaggaagatcagtcagtgatggatatcttcttgtgagactcttgcaatacatagtgatacggaagactggttggtactggcagaggaaggagaggaaaaataaactcttgaaccacttttaagagaccaaatgctagaacttgttgactgctgatggctgagaagagacaatctgacaagttcgagatttttggcttagtggcctgtgtaaatggtggtgccacattcgtatatttttttttttttaaagattttttgtttcagtgtctactacggatctggcactgttctaggtacaggaaatacggaaacaggatctctgctccgaggagcttacactccaagagatatttatgactgggaagaggagacccagaaatagttaagtaaacacataaatgaacaagaatggcaagctaacttagcatgtcttgattgaacagtaggggtccagtaaatattcagtaactttaaaacatccaaccctgtacgagtttaacaatctctcctaacggtgattacaggagcccgtgattcattcacagcggcagacgagcgccaggaaagggttatttgatctgatccctcaagttccggaggcagcaggtcagacgatcggccccatttggcagccaggaaaaaagcttaagcattttggccaaggttacacaacccgaaacaccgggacgcggcccggaggcggcttcggccttgcggtccaggctaggccactgcgccggggcccagcctgctcggcgcccgcccgagtgctcggcaggcccgtagcgccgcggctcccaggagccgaggggcagccggcgcgcaggcggcggttgccgggccctccctcggcccggcggcggtggcggccccgcgtcgcgaggcacttccggcgcgtgccggggtggccggatgacgtggctgagtcagaggaagaggctgaggaggcgcggggggcgggggaggctcaggagcgggcggtgacggcgacggcggcggcagaggaggcagcggctgggccgggccccgtgcgtctgtccgcgccccgtggatgcgaatcggccgcggcggaggcggcggcggcggaggaggcggcggcgggaggaggagtcggtgagccggctccgggccggaggggcgcggaggatgaggccgctgcctggcgctcttggcgtggcggcggccgccgcgctgtggctgctgctgctgctgctgccccggacccgggcggacgagcacgaacacacggtgaggcgccccggccggcgcggccgccccgggctagctccccagttgcccactgaggcaggccccacgcagcctggagtgcccggcggcccggtggtgccccactgcggcccgaggactccttccggttgggcctggcggagcaggaaccttgggagcgtggaggaggcatttccgtgcgctcccgggacagggctccgctcccgagtgacagggtctccttcccccggtctgggcctcagtggcgccgcaccccagggtctcggggttcctgggaccctggggccaggaaggagcctgggaagggttgaggttcatccaccgcgggagcggggcaacgggcaggctgggctcggggcttttgccccccagggaaggagactgccttctggctactgagggctgcgacgccgaggaagatggatgcatcgtgattacccggcagccactaaccaggaaatatcctacactttatggtctcctttggcttttatcgcccgcttctgcccagaccggattaaaaccctggggtggggcagcattaataaacttgaattgaagagcagtttatacttacttgtaagtgcacccaacctacacgcgttcaattcctaggcctttcttgtaactttctcctcaccttccagcccctaagtgagacccccatcccgatagtctctaactaaggcagcttctgacagtaaagggtcttgacgtttcccagtcttcaggtcagggccagaaacagtcccttttgcatttggcctaaaggtgattggcagt

SEQ ID NO: 4857 - DNA, 6000 bp, Homo sapiens
tgaggtctcagcctgtgacccaggcacagggccccactggaggatgataatgtcttcagagacttggaagggctggggcctagagtctgaactgacttcagtcttctctgcagcgacgctttctcacattaacacactttatgctctctctgctctaggtgagaggaccacttttttttgttgttttttgagacagagtctcactctgtcacccaggctagagtgcagtggcttaatctcgagtcactgcaacctccgcctcccgggttcaagcgatcctcccacctcagcctccgagtagctgggactacaggtgtctgccatcatgcctggctaattgtcatattttttgtagagacggggtttcaccatattgctcaggctggtctcgaactcctgggctcaagttatctgcctgcctcagccacccagagtgttggcattacaggcgtaagccaccgcccccggcccactttgtattttcagtaagcccatgaagtgtaatatacatgtaagcagggcatggtggctcacgcctataatcccagcactttgggaggccaaggcgagcagatcacttgaagccaggagatcgagatttgtctgggcaacgatagcaagattctgtctcttttttttttttttggagaaggagtctcgttctgctgcccaggctggagtgcagtggtacgatctcagctcattgcaacttccgcctcctgggttcacgccattctcctgcctcagcctcccgagtagctgggactacaggtgcccgccaccacgcccagctaattttttatatttttagtagagacagggtttcattgtgttagccaggatggtctcgatctcctgaccttgtgatctgcccgcctcggcctcccagagtgctgagattacaggcgtgagccaccgcgcctggccaagactctgtctcttaaaaaaaaaattagcttggtgtggtgggtatgtgtctgtagccccagctatttgggaggccaaagcaggaggatgacttgaattcaggagtttaaggttatagtgagccatgatcatgccactggactccagcctgggtgacagagtgaggccctagctttaaaaaaaaaaaaaaattagccaggcatggcaatgcatgcctgtggttccagctactcgggaggcagaagtgggaggattgcttgagcctggaggtcaaggctgcagtgagccatgattgtgccactgcatttcaacctgagtgacagaggaagactctgtctcaaaataaataaataaataattaaatcataaataaatgggattataactatgtactcttgtgtctggagtcttttactcaacctaggtcatgcatgatatatgtagcagtagttccttctcattgctatacagagtcaaatactatagtattccattatatatcaatatgtcacaatttatccattctactctatctctctgtctgcctgtctgtcttatctatctatctatctatctatctattctagacacagagtctcactgtgttgcccaggctgcagtgcagtggcatgattatagctcactctaaccttgaattcttgggctcaagtgatcctcctgccttagtttcccaagtggctaggactacgggtgcatgccaccacatgtggctaatttttaatttttttttagagatggggtctcactattttgcccagattggtcttgaactgttggcctcaagcaatcctcctgcctcagcctcccaacgcactaagattacaggtgtgaaccagtgcatccagcctcattctacggttgatggacattttattatttccattgtgaacatcctcctatatctcttttttgcatataagtaaacatctctgttgagtaaatatgcaggaaggtattgctgggtcatggagcaagactgtattcagttttagtagatactaccacacagttttccaaaatggttgtatcactttatactccaatggcagcatatgttgccagtttctccacatccttaccaacattagtattgctagtctttttaattttagccattctggtgggtgtgtagtggcatttcattgtgattttaatttgtattcccatgttgataatgaaactggtatcttttctgttctggtctgttctttttcttttttttttcttgagacaaagtctcactgtgtcacccaggctggagtgcagtggtgctatcatagcttactacaacctcaaactcctgggcttaagagattctcctgtcacagcttcccaggtagctgggaccatgggtgcacgccactgcaccccactatttttcttagtttttgaggagacaggtcttgctgtgttggccaggctggtctccaactcctgggctcaagtgatcctcctgcctcagcctcctaaagtgccggtattacaggcgtgagctagcatgcctggcctgtttttcatatatttattggccatttggatattaatttttgtgaagtgcctgttcatgacttttttattttttgtacaatacatcatgatgttcagctgtttgtgtcttttgccattcttctttttttttatttttgagacacagtctcgctgtgatgcccaggctggagtgcagtggcacgatctcagctcactgtaacctccacctccagggttcaagtaattctcctgcctcagcctcacaagtagctgggactacaggtgcccaccaccacgcccagcttaattttttttgtattttagtagagatggggtttttcactatgttggccaggtcttgaactcctgacctcgtgatctgcccaccttggcctcccaaaatgctgggattacaggcgtgagccaccacacccagccgcccattctttttttttttttttttaattttttttcttttttgagacagggtctcacactgtcacccaagctggggtgcagtggtgcaatcacggctcactgcagccttgactttctctgggctcccacctcagcctcctgagtagctggactacaggttcacaccaccatgctcagctaatttttgtatgttttgtagagactgggtctcatgatgttgctcaagctggtcttgaactcctgggctggagcaatccttcctcccctctactccctgccccccggcctcctacggtgttggaattccaggccaagcatcagccactgcacccacctgtcccttttgcccattctttttattggattgtctgccttgttcttattgattggtaggaattctttatatattatagatgtactttgttagttctatatatcttcttccaaagaatgctgctaaaggtttagaataaagctgctgggcaagagggaagagaaatgtgtcttttgtaaggtttgggatctggttgaaggattttaaggagggtctcaggggagtggggataaactggatcggttgctggttctgaggtggaattaggagaactgggaattggccggatgccaggtgcggtggctcatgcctgtaatcccagcactttgggaggtgggcagatcacctgaggaaaggagttcgagaccaacctggccaacatggtgaaactctgcgtgtactgaaaatacaaaaaaaaaaattagccgggcgcggtggtgcatgcttgtaatttcagctacttgggaggctgaggcaggagaactgcttgaacctgaaatgtggaggttgcagtgagccgagatcgtgccactgcactccagcctgggcaccagagcaagactctgtctcaaaaaaaaaaaaaaaaaagagagagagagagagaaattggagaaccagggattaattagggatggaatgctgtcataaggcaaggtggcttagcaactgagtatctccagtaataaatgaaaatagcaaagcttgtctagaacaccactgactgcttttttctcttttcaagtcaagctaattttcacactttcaagtctccataagttttgacttttcttttttttctttttttctttttttgagatggagtttcactcttgttgcccaggctggagtgcaatggcgtgatctcagctcaccgcaacctctgcctcccaggttcaagcgattcttctgcctcagcctccccagtagttgggattacaggcatgcgcgaccacgcccggcttattttgtatttttagtagagacagggtttctccatgttggtcaggctggtctcgaacatcgtgacctcaggtgatctgcccgcctcggcctcccagagtgctgggattacatatatacttttatatgaaggtatatgactttcatataaatgtgtttctatgcttaattttgaaaatagattttcaaatgtaatataaatgtactttttgttgttgtttaactgcaaaagaactccagttttttgtttgctttgttttgtttttttgagacagtcttactctgttgtccaggctggagtgccgaggcgtgatctcggcttactgcaaactccgcctcccgagttcaagtgattcttgtgcctcatcctcccgagtagttgggattacaggcgcgcgccaccaagcccagctaatttttttattttagtagagacggggtttcaccctggtgatcaggctggtctcaaactcctgacctcaaatgatccacccgcctcagcctcccaaagtattgggattacaggcatgagccaccacgctcagccaaactccagttttataaggcttacgcctgtggccctgaaacctggtcctggctggagtaagaaccccatagaacccttagcaacctaacttcctccctagcaacggatctccttggagctcctccccatccgaagccaggaggaggtgtaaaaccggatgttgactgttttaccatagtaatgcacacgaatccggaagtgacgccagaagaagaggaagtgaaggctacagggtatccacgtgggttctgagcgtgtttctacgtccctggaagccggtcatttaagctcattcctcgccacggcttagtcaacatgggtcgctcgggaaagttgccttctggtgtctcagctaagttgaagcgctggaagaaaggccacagcagcgacagcaaccccgccatctgccgccaccgtcaggccgcccgcagccgcttcttcagccggccgtcaggtagctgggttgagacccgagcgcagccgggggcggggttccaggcagacctgggtccagatgagtctggggcctctgggagagtgcggggccaggcattggacctttcgtctcttaggatgtcggatctggagccctctctgaagggcagtccttccaatttagcagatacagaaactgaggtccgcagtagggaaatgtcttgtgtaaggtaccgcgggtgtcagagttgagacagatggcttggaccttgggtagctctttacagagcgcgttcaccttcatttattttgcaggccctctgaatgtagctcccagccgattcccagtggcgtttatgccgctgctacagggaagcagaaacttttacatggaggattccctttctccttggtttttcaagtttttaggcatacagtggttttatgagactggctgtgttcagaattcagcctctcgggttggagatttggcctgggctggtttgtttcccaggggttgttctgttctcttgaccaaaaggaggcttggaccttatcttgtgcctctggctctcaggaaggagtgacctgacagtcgatgctgtgaagttacataatgagctgcagtcagggtccttgcgcttgggcaaaagcgaagccccggagacgcccatggaagaagaggcggagctggttctcaccgagaagtcctcgggtaccttcctgagtggcctttccgactgcacaaacgtcaccttcagcaaagtacagcgcttctgggagtccaactcggctgcccacaaggaggtaggggcgagggtcgggagggccataggatagtgaggagagg

SEQ ID NO: 4858 - DNA, 6000 bp, Homo sapiens
tgctcactctttgggtcggcaatatctttatgagctataacacccactgcaaaggtctgcggcttcaatcatgaagtcagcgagaccacgaacccactggaaggaagaaactctggatacatctgaacatctgaaggaacaaactccagacacgccatctttaagaactgtaacactcaccgcgagtgtccgcggcttcattcttgaagtcagcaagaccaagaatccaccagaaggaataaattccagacactggaatacaagaaaacatgactatagtacctgaggagttgcaggtgcaggaaactgctgagggtttgtgaagaatatcaccaataaagttccttgcctacttttttttctttgagatagggtctcactctatcacccagactggagtgcagtggcccaatcttggctcactgcaacctctgcatcccgggttcaagtgattctcccacctcagcctcctgagtagctgggattacaggcacacgccaccacgcctggctaatttttgtatttttagtagagacagggtttcaccatgttggccaggctgatctcaaactcctgacctcaagtgatctacctgcctcggtctcccaaagtgctgggattacaagcatgagccaccgtgcctggcctgcttacttttataattttttaggcaggtttagtgctggtgagatgtacgacagtgtgtatgggtttgtgtgcaggttaggtgcttactattcaaagtgtggtccaaggtctagcagcatcagcatcacttgagagcttgtcaaaaatgcagaatctaggtaggcgtggtggctcacacctgtaatctcagcactttgggaagctgagacaagaggattgcttgagcctaggagttctaagaccattttgggcaagatagcaagaccctgtctctacaaaagaaagagagagagagaaagaaaaagaaagagagaaaaaagaaagaagaaagaaaaagaaagaaagaaacaaagaaagaaggaaggaagaaaaaaaggaaggaaggagaaaggaagaaagaaagaaaaagagaagacaggaaggaaggaaaaaaggaaggaaggagaaaggaagaaagaaagagaagaaaggaaggaagaaagagaaggaaggaagggagggaggagggagggagagagggaaggaagaatcttaggccccaaccagacctacagaactgcagtctgcattttaacaaattcttcaggtaacatcatttatcatcacagaagtactgggctagtttatgctatggtgtggaataatcctaaaagctctgtgtcttgaaacaactaagatttatttctcactgatgctgaagtctgtctgggagcaagcaggtaacaagtagggaactctgcttcatgtcattctcaccagggccccaggctgacagagtctccaccatttgaacaatcactagtcatgtggcagaggaggaaatgtgtgactcttgtgcttccctcgtatttcactggccaaagcaaatcccagggccatgcctatcttcaaggaggtggaaaaaacatcctactgtgtacctggaaggaggagaatcaaaatactgctgaagctaggggatcctcgaggcaggcaggcctttcaaggggttatgacaatacagatgtaatcagattcagggaaagtatatcaatacgaaggaaaaggagagcataaacagaagaaacagttcagaatgatgatgattctgaatgggcagtcaaggaagactccagctttagagtctcatctattgggcaaataatgaagactttcatggaaaacgaacattttggaggaatgggttggggtggggagtggaaaggctgagcttggaatggacacgctgagtcagaaatcaaggtggatattcaccccttgtttatctttccaacttcgtgttgtattccctccccactcactcaccatgctccagccacactggccttctttctgttcctcatgcaccaaccttgttctcaccttagggttgtcgtacctactgttccttctgctggcatgcccttctccaagtctgtcatgactggctcctgcctatcattcagaactcaccatacatgtcgtctcctcagaaaggccttccttggccatacaaatgtagccacccagtcacactatatcataccaccctatttcaaaggtcagcatagcatccagagctgacattttttgtgtgtatttttctctgtcccacctccccaccctcatcattaaaaagctccatgagaacatggactatgtctgtcctgtatccccagcttcaagtacacagttggtacacaataaacattactgaatgttcccatggaaatttcagttaaaagtatgcaataagggaaataaagatagggttccaatgaggacaactggtttggaatggcaaagttctctaaggtattaaagatgaccaagaagcattaaacgtttagggatgttccacttcaatggctagagaagtgtaagcgactgagatgtctaaaaggtagagtggtttctgaagctagtaaaaagtgccaatgtggtgtggcggcaagtgttatctctgttaagaaaaacgggaataggaaaaagaccgatggatttggaaaggtcatttatgaccaatgaataaaagagtgaaaaatgtaaagagcttaaggagagaaaggacatagaggtggataggtcattagtggagtaatctggcagtaaagggaattagtactctagcaggattgaatgggtttttgtgagacctattcatttctcaagctaaatatgctagagaaaaggagagactgaacatgctgtgggggagaagttccttttaaaaaaatttttttgagacaaagtcttgctttgtcacccaggctggagtgtagtggcatgaacacggctcactgcagcttcgacctccctggcgcaagcaatcctcccccaagtagctgagactacaggtgcacaccaccatacccagctaatttttgaatttttgtacttttttgtatttattattttgtagagacggggttttgccatgttgtccaggctggtctcgaactcctgagctcaataaatcgtcccacctcggccttcacagtgttggggtcacaggcatgagccactgcgccggccagggagaggttaaccaggttaatggacccctagggtgtccacatggcaccttcagggactctgaaacgcagaaatgatatgcaaaattttgagtgcacacaggggatgggaggtggaagtaggagaagagaattcgtagttttattattttccaaacggtcgcgacctaaaggttaataacaactgctgaagagagtagaaaaagtttttaaaaaggaagcccagagaagagctaaactttagaaagaaaaaaggaaaacatctttcctatccaaggaaaacctatgaacagatggagaagtccacagttgcatcatctgggtaaaacagagaagacagagctggaaaccgcgggcagcttgtgccaacacgctcggggaaggcaaatggaagaagacgcccgtgctccctagagcaggaggtcctaaggccgggaatcgctggccttgcctctcaggacccgggctgacccgagggagggagaagccctcatcgccaggcgggggacccatcagcgcgccggctcagggacaaaatactgatgcttcagactcggccaggccgtgcgtccgagcttccccacagccgccgcacttccctgctgcctttgggatgcggcctccagccccgcctcgccaccggccgtcatctgtgaatcatcccgcccatttcgacatcttcctcccccgccttcggctcttggcctggcgcagagcccagtgacagccggggcccggggaacctcattcattcaacacttgttgggtttactctgcgaatgtggatgcgaggctcagtgccgggcgctggggcctgaggagcaccgagtccggccagagggcccaatactccagacccgaccagagtctagcgggccgccgcggtcccccctggaggtgaggcggttcccagcccgcatgtcgcaacggcttcccggacaggctgcgggtcgcgccagccagggatgaccggcccaggccggccccgcctcacgcccgcgacgagatcccgcgggaacacggctctccggggccagggccgcccgctctccagccacgcgtctcagaatttgaggagcgcacgggagcgcgggtcgtaacggcgcccgtcagcagtttgacgttgaaggcctgtcgccgccccgcccccgacgcgatcccgcgcacagggaccgcagctctgcaggcgctagtgaggggcccgaagtcggcccctagagtccctgggcgcgtcgctctttctgtagccaatcggggaccgacgtggtgcgggccaatggccgcggtcaaagtatcaagagtggttgagcctatcaaagttcagccttaagtttctcccgcccttctaaaagtcagaggcgggttgatcgcacatgtcggccaatcagtgaccaataaacaagaagcttctaagatcaaaggggaaaaggtgggatgtaggcgctagcaacgcctcagggcggaggaatgacaggcgacttcgctaatactaccggctgatttttcgtacgtaaggaaaggggtgggtctaacttggcgtctccaccaatggttgcttggggggcgtgtccgcggggccaagcgggagccggaggccccgggctctctgggccgcgcctgaggcggacactacggggccggggggcggcggcggcagtggtggcagcggcggcgggggtgggcgccgcagctggcccgggtggatggagttggaggggcggggtgctggcggtgtggcgggggggccggcggcagggcccgggcggagccccggggagtcggcgctgctggacgggtggctgcagcggggcgtgggccggggggccggcggcggggaggccggggcctgcaggcccccggtacgacaagatccggactccggcccggactacgaggcgctgccggctggagccactgtcaccacgcacatggtggcaggcgccgtggcagggatcctggagcactgcgtgatgtaccccatcgactgcgtcaaggtgagacctgcacccggcttcgaacccgacctggggctgacccgacccctgggtcttgtccggagccaggatcccggctgagagccggagccgacatgggttccttcctggctcctgccactaccacatgattcgaaccgacactccattcaagcaaggtcccagctgggagttgatcccagtcaggaaccaggacctatttctaaccgtcagtgaaatctgaatcgggactcaggatcgaaaatctgtcagccaaagccctggaccccacctgggactaaacaggaatagggtgggatggggtatcccgaagctcaggtaagtgctactaactcgattaaggtgaagccaactggcgtgaaccagaccctgaaatggatctaacggcttgagatgttttctgggctagtgcttttacaaactccttgctgtatcttcccttactgacggggcaggaacccgaatctgggatctctcagctagataaaggacttacatgttaaatcttaacacatgagtgattggaaatcattgtgcagtgagaatgcagaattccagactggaagtaatgtgggaaagatcgtattcaggaataggtttcagtttctctgtgaagcaagcatgataccccacctatttcctgaacatgaaaattgagctgggattaggactgtatgttcagggagcacatcagcctccaaacaagagagatgaaactgatagcatatttctttggccacctgaagttggcaaaaagggagaagttgcctagaaaggaagtgtgacggtattagaaagtagatgtaagtatgaagaaaatggaaagagatcaacaagaggacacg

SEQ ID NO: 4859 - DNA, 6000 bp, Homo sapiens
ttcttcgaatgttagcttttgagaatgcgaaccatgagtgtaaaatggccatgcattccgtccaacaacaaaatttacctgatcgtgaggtgttgcctgagtatattaaatatgaaggcattggatcagacacaaagctattctgtgcccacaaagctattctgtgggcacgggccatgaaggacggcaatcaaactggctcgactgattcttttcttggagcctgctataattgtggtcaacttggtcatactcgaaaaaattgcacagttaaaaacttaaaggcagccaagccggctcaaaaaacacagccaaatgctcctgctactgtttgcccttgttgttgtaaaggtaaacattgggcaagtacttgccactctaagtctgatatagatggaaatcccttgccacagaaccagggaaatgggaaatggggccagtcctaggccccaatttcaaatgggacacctcagactcagacgaatgttgcctttctgcttcaatcggtcccaacgcagcccccagcacaaacaaatttacctacagccaacccagatgtgtcccagcctcttcttctgtctcagtacaacgcttatctatgctccagagtaaggggaggggcggtcaatctctgtagtaccattcctctaaatttactacctaattctttgcctttaattcccagaccaatacctggaaacctggaacgattataacatggggaagagggtatgcttgtgtttcaccaggagatcatcaatcccctgtctgggtgcccactagaagacttaaacttcatgtgaatactgacaataaaaaccacagggaagagacgtccacgtcagagaccaccctcatacctggtgagatctgtgccaactcctcagaaactggcacgccaaatcaaaatgggtctggttcaatcctccctaatggcaacagaaacccctctaactaatcccacttctcctaattccctttctttttctccttacgaacctaaaaatctcaccatttctattagcctgaaaataacatccccttattcttctattcctccttcagcactggatcttgcttacaataggttttatttaataattctcttccttatactttctgtctcaccagtttcccctcacattgatttacctgctacacaaaattattcttgctgggcttatgtgccttttcctccacttattcaacctctcacctggatggatgctcctgcggaaatctatactaatgatagtgtgtggatgcctggagctacagatgaccgttgccccactcaaccaggaaaagaaggcactgcatttaatgttcctacggttataaataccctcctctgtgcctcggacatgcaccttgttgtatccatctagaaactcaagtctgggctgcgtaccttctggagagatcagccacaggggaacggggacatttggtctccagcctctccctttctcctttaagacaaatgaaagggggagtaataggagataccccctactttcaatataaacctgtaggaaaaccatgtcctaaaatttttgagggcccatctaaatctttaatttgggaagattgtgttaattcacatgcagtactattaaaaaatgactcatatggtttagtaagagactgggcaccaaagggctatttgaaaagcagttgctcttctgctggaagggaatgcctggaggctacttgttttatttcttattgggaggacgaggatcatcatcctactttgcataggaggttcagctcattctgtcccttaaaatgggaagataagagcattaccccctgccacccgaggcctcttatgatatcccccattctgagcccagaacacccagaactttggaaattggctattgccatgtccagactgcgagtatgggaaggggaaacttttctttctgttgtccccactaccacccctcacatccgtgattctgaaacccatgataaatcccctttggaccattttcctctttttgatgccagtcctcctttatgggactctgattggcattatgataattcttctggacccaggtatgtccccctacctcttcagaatccccgggcacctcggattgcttctttacggcatcaaacattgggcgttgccaccgccactcctccccctcggtatcaacgtagattcaaacattctgctttgtttacctccagcctgactattatacagagttgtgttaagcctccttacatgctgttagtgggaaatatcaaaatttggatgaacaatcaaaccgtccaatgcattaattgtcatttatccacttgtgttaactcccgttttgactcaggaaaagtgtaatgttggttcgagcttgagaaggaatctggataccagtaactttacccagaacttgggaatcttccccctcagtacatttaattaatgaagtgttacaacgaattctcaaaagatcaagagatttgttttcactttaatcactgtgatcatgggcctaattacagtcactgcactggccaccactgccggagtggcattacaccaatctattcaaatggctaattttgttaatgattggtaaggcaattccacccaaatgtggaatcctcaacaaggcattgatcaaaaattagctaatgatttaagacagtctgttatttggcttggggaccagctaatgagtctcgaacatcacatgcaaatgcagttcgattgcaacacttctgatttctatagcacaccatattcctacaacgagactgatcatgggaaatggtcaaaggacaccttctgggtagggaagataatttatccttggacataactaaattaaagaaacaaatttttgaagcctctcaagctcatttatccattgtgcctggagctgaggcgttagatcaggtggcagaaagtctttctggactaaactccacaacttggattaagtctactgggggctccactgtaggaaattttggaatcatgtttctctgtttaatcggcttgtttttagtgtgccagaccagtcaaagaatcctgcatcaaaaccgagagaacgagcaagccttcatcgccacggcacatttatataaaaagaaagggagagatgttgcgggaagtcagggaccctgaatggagggactggctggagccatggcagaggaacataaattgtgaagatttcattttaatatggacatttatcagttcccaaataatacttttataatttcttatgcctgtctttactttaatctcttaatcctgttatctttgtaagctgaggatgtttgtcacttcaggaccactgtgataattgtgttaactgtacaaattgattgtaagacatgtgtttgaacaatatgaaattagtgcaccttgaaaaagaacagaataagagcaatttttagggaacaagggaaaacaaccataaggtctgactgcctgcagggtcgggcagaaagagccatattttccttcttgagagaggctataaatggacatgcaagtagggaagatatcactaaattcttttcctagcaaggagtattattattaataccctgggaaaggaatgcattcctggggggaggtctataaacagccgctctgggaatgtctatcttgtgcagttgagataaggactgagatacgccctggtctcctgcagtaccctcaggcttactagggtggggaaaaactccgccctggtaaatttgtggtcagaccggttctctgctgtcgaaccctgtttgctgttgtttaaggtgtttatcaagacagtatgtgcaccgctgaacatagaccctcatctgtagttctgcttttgccctttgccttgtgatctttgttggacccttatcagtggttctgcttttgccctttgccttgtgatctttgttggacccttatcggtagttctgcttttgccctttgtcctttccctcagaagcatgtgatctttgttagacacttattagtagttctgcttttcgccctttgaagcatgtgatctttgtacctactccctgttcttacaccccctcccctttttgaaacccttaataaaaacttgctggtttgaggctcaggtgggtatcacagtcctaccgatatgtgatgccacccccggcggcccagctgtaaaattcctctctttatactgtctctctttatttctcagccggctgacacttatagaaagaacctacgttgaaatattgggggtgggttcccccagtacgctagtcctgctgatgagcaaagaaggtgttgatggcattttgatcaacaagaaatgttatgaaacggcctcccacctctggcattcctagtactgacctatctctcccttcccttccaccgctccccacagcttagcacccctttcgttcccatacacatgtacatttttattttggggaccattaacccacagcccttatcgctgccaaaaccacatgggctggagggccagggctgcatggacagtcacaccactgcacaccagcctggtgatggagcaagactctgaaaaaaaaaaaaagaagcataaaagacctttaacagtccctgctacttgtgaccctcctgaatctgtcatctgtccagtgattttgattttgcaacatggaaagttccaagccttgactcctgagcccagataccattcgcactctggagtcattcaagcatggggagctcctcagagggtgatcaactgacctcccttacctagctcctcctccggaggtttgccctggagttgagccagcccttgaggaggccttcactcccaccgcctctctcccttctggatatgagctcaggcctggctgggctccaggagaatctttccacaaggcaagagataacacaaagtcaaggtgaagatcagggtagccctttaaaaggcctccttgtgccctagagttgccacagctcttctactccactgctgtctatcttgcctgccggcacccagccaccatgtgggagctcgtggctctcttgctgcttaccctagcttatttgttttggcccaagagaaggtgccctggtgccaagtaccccaagagcctcctgtccctgcccctggtgggcagcctgccattcctccccagacacggccatatgcataacaacttcttcaagctgcagaaaaaatatggccccatctattcggttcgtatgggcaccaagactacagtgattgtcggccaccaccagctggccaaggaggtgcttattaagaagggcaaggacttctctgggcggcctcaaatggtaagtggtgcccatctcctccctgcccccttcaccaccccctgggattgttcaggtcttcagaccatgcctagaatggggcttccagctccaacaacctgtaattcttcccaaagtagactagtgggatgatgtgaagggagtgaaccttcagacccccacccagcctctaaattaggcaggaagaattaaaggaatgtctcctctaccaggctgcccaggaggtgggatgggaggaccacagtggtctgaggggtcaaggaatcctcactccactcctctctctgagcctagacttctctaatggactgagaaggtgcatgtacagcacttagcctagcacccagcacagtaagtgccccttatacagccaggattcatgttacttttcatggaaaatgggggcagtgactactgtcctccatgaaagctgctggggagaattagcctagctattgcaggctgggattgctgctttcctggtgctatttccagctactcaggctcacaggggcagttttctacaatgacatttcagggttgctgatgagcctcccactcagcagggcccccagcctctcagcattttttttttttttttttttttttgagacagagtctctctctgtcgcccagcctggagtgcagtggccaatctcagctcactgcaacctctgcctcccgggttcaagtgattc

SEQ ID NO: 4860 - DNA, 6000 bp, Homo sapiens
tcagggccttggcagctgtcattccacctgacctttaagccaccacatcataagctgagagggccccagaggccacaggctgcctggcctatacatgtttcatttggccttcagagactgaattctagattcaactttagaatttgttggcatcttctaaaaaccagaatgggccgggtacgatgtgcctcatgtctgtaatcccagcactttgggaggccaaggcaagaagattgctagagcccaggagttcaagaccagcctagggaatatagtgagaccctgtctccaaaaaagaaaagaaaagaaaaaaattagccaggcttggtggcacatgcctgtagtcccagctacacaggaagctgaagtgagaggattgcttgagcctgggaggtcaaggctgcagtgaaatgtaattgtgccactgcactctggcttgggtaacggagtaagacctgtctcaaaacaaaaaagtaaataagattaaaataaaaatcggaatttttcacataaaaatcagattttcaagttggaaatccagaaaatccagccccaccaggcccgcgtgtactcctggaacaggctggggtgcccccagcctatgcacatgctcagtggctccccaccccgtgtgctctgtcacgacctgcctggccccataggcatctgggcttgccctcagccccagtcctgatctgcccaagtgcttctctgtgcggctggggcctaaccctgaagcgtgggccaggggagcatcctgccccgtgccctgcagtgaggtgacagagcagagctggaaccaagcgcagggtgctcttcagcgcagagtttgatttcttgcctgattcgcctctatgacccctgaaggcccagctcagaaccgacacagaggaggtgctcatttggcactggtgacaatactaggagccaaaggagaggttcaggactcagaggaaaatgggccactatggcctggggagatcaaggaaggcttcctgaaagaagaggcacagtaagtaagtgagggcctattggcacaacagtaatggttaatagtcactgagcactgggtaccaggcactgcactaagcttatcacattcagtcctcacaacaacactctgagataggtgctaccaccagctgctttataggtgtggaaactgaggcacagagaagttgagtgctttgctcctggtcaactagtaaatagtggagacagcattcaaacccaagcagcctaactccagggtctgcccacttaactcctgggccctgggtgccccgccagcacggtgggtgctttacccacgtgatcttctttccatgaggtgcacctatctccattatttcaatttctatgcccattttacagatgaggaaatggaggccaagaggcaagctcacttgcccaatttgtgctctttgccctagaggcactggcatagagagtgctttgggagtctgaacaggctcggaggcccaaggacagtgccccgtgactctctctcatcttcccacaggcgctgggctggtccttcgtgctgctgaccactctgctggcattcgtggtgcgctctgtgcggccctgcttcacgcaggccgccttcctcaagagcaagtactggtcccactatatcgacatcgagcgcaagctcttcgacgagacgtgcacggagcacgccaaagcctttgccaaggtctgcatccagcagttcttcgaggccatgaaccatgacctggagctgggtcacacccacgggacactggccacggcccctgcttccgcagctgcccccacgacccccgatggtgcggaggaggaaagggagaagctgcgtggcatcacggatcaaggcaccatgaacaggctgctcacgagctggcacaaatgcaaaccgcctctgcggctgggccaggaggagccaccgctgatgggcaacggctgggctgggggtgggccccggcctccgcgtaaggaggtggccacctacttcagcaaagtgtgaggtgtggccagctgaagaggcaggaacggggatctgagcccacagcccctccaacccccaaaccaggtggaaaaaggaagggtttcagtgctgggcagtactcccctaggcagatccacactccctagcactcgcctgcccattggaggcaggaaatttggagctggaaggggatctgatgccttcaggtgtgacactgccctggatggccctagggcagtgggcccatgagcagtattagtctaaaggggtcggaactgtcatggcaggtacagggaccaatggctcccctctgcccagcccttcccaggctgatgttcactgtctcctcccaggttcaacagacatccctgccccagggtccaccctcgtctgtggctgttcagtacctctcttcctttatgctccgggctcggggagtgggaatcatcaggcgtctcatgaagtgggagccctctgatttgggcaagcgtgtcgtaggtgagactgggtgtgccggggcaggtccataaggacatgacacacagcctacctggtgtgacacacctggggtgacaggcgatgagacaagatgtcagaagctaggttcacatggaagaggtcagagtgtgtggtcaccatgggggtcatgtgacaattgtccaggtggactgcatgtttatttagcacaaaccaagcacaaaagtcctcctgtagaggggtctttgaaaaaccaccttaatacccccgtcacatccaggtctccaggggaaatcagaccatccccaaggcttgagaagttagacacagaagctgaagtctctccatttttctcaaagaccccacctcttggggatggagttctaagaggctaagaggagctccaaggctctagcccaggtgggatgagggtggaggagagcagtgtaaagagaaagcagctcagattccagagtgagacagaactgggtcaaatggtgtctctaccactcacaaaccctgtccctgggccagctgcatcactgcctgtgccttcgtttcttcatctatacaatgaggatgaggcccccccggcccgccatcatggggttgctgtgtgtaaaagcacatggcacatagtaggcacccagcacagggtggctaatgtatttgttgatttctgaacctaaggacttccttcctcctcccctgggcagggatgagacagcaacacaaacactcgagcttccatcttgttgaggaggaaacagaggtacagataggtttctcagcaccgccctcagctctgagacataagtcccaagcatctaaggattcattttgatcttggcatgattccatccttttttatccatccttccctctattcccacttctggggtccagtttccctcctcttaattatttgggaggagttgctcagatctttgtgggccaaggtgggctgggagggctcttccaggaggtaggagttggtatgggccctgaagtcagggaggattaggatgagcaaaaaacaaggtgtatgttggtgggtggcagcacttccagtgggaagagaaggcccggaggtatcaggaggtacaaatgtgatgaagagcaaagctttgggtcaggcacacctgagttcaaataccagcactgcaggacttgtggccagtcacccagccactctaagcctcagtgtgtctgtctataaaatggatattagaagacctgcttggccaggcggagtggctcatgcctgtaatcccagcacttgggaggccaaggagggaggatcacttgagcctgggagttggagaccagcctgggcaacatagcaagactctgtctctgtaaagtaataataataataagaagaagaagaagaataaagagaagatttataatttttttaaaatgaaaaaattattttttaaaaaagacctgattttcaggattgtggtaaggatagaggaagataacttttagggaaggatctgggactgtgtttagcacatgctgggatctgaaacaaacaaataaacaagcagaacttggtaccttttctttccttcgtacatatggtcaagcccagctcagggaggccagcgggtcactcggcagctccaccatgacggaaccacgagcactgcagagctgacagatgtcgggggtcctctccctccatgctaagggtcatctagcctgtccgtagactctcctgtgcagcattcctgacccgtgacgcttcagcccgcatcttgaccacttttagatacaggctgggcagctctgattattacacagggcttccttcagaaacctgcctccttgtaactttcacccaccagttggagctctgcctgcaggacccggagaatccctaggctcctgaattcaatcctcagccctccagggatccgaagcaggtcccggggagttagctgactataggtcaaagagtcagcattggggatggtttgtccagtcaatggacaactctgagggagaagggccagtagagggtggggccctggccctgagcatcctgcagggctcagcgcgggcctgacgacaccctcccttgaccctcgcggggtctcctttggtagcttctgcccagcgggggtcaagtacgtggggtgctcttgaaactgtcatggggggcaggtctgggtcagatctccccaatgcctccacatccccacgtggccctcccgactggtcccattggtgtggagcatggcccggtccgggtctgggccgagggcggagggccagcacggcccagggacggcgagcagcgggtcggtgggacgcgcagcagctgcagaacaggcatctcaacttcctctcggctcctctcctctcgcgccgccctcggggcccgccctcctctgcctggtggcgccgggaggctgtttttccactcactggcgcgcagactccatcccactgttttcttctctcttttctggagttagattagtctgaagccgccaccagccccaggcccccgtgcagaagaaaagcgggagggaacggcggaggccgccgctgccctgcaccgccctcctggaggccacttggagagtccggccccgaggaggccatggccacaagtgcccacagctggccccaggtaaggaaggggccctccctggggtgtgccaggtgtcagcggagcatggtggggcctgtcccacgctgcccagagggagagaggcccctagctgaggttccctccacccggttgaacagggagcagtcctgcccctccccgagccgccagtctcctgtcgtcactgatgttggaggaggtcccactgggggtctggatgtgacccatccttggcctgggggcagtggtctcagaagatggcctggcccatcctctgctcaccacccaccctgtgcaggtatcttgtaccccactttgagccagtttatgaacccagggcctccacagggagctaattaggagcctagaagccaagaagggaaaaggatggggcaaagggggctgactttaacccattcttccccagcagtgatgcaaactgcctttcccaggaagttaggctggaagctccaggctgtgaagtgggggaagaatcagactcctcctcctcctcctcctcctcctcctcctcctgttgttcctcctggtcctcctcctccagcttctccttttcttggagtctgcatggccacatggctctgcctgagcccatctggcagccttccttggcagggacagaaggggtgatctagaaggggtgatccctccatgaagcatggaagggaacagggctaggtctgtgtttggcgctcaccccatccctccactccctggcttcctctggcctggggagttttgtttttcaccctccagagggggaggacatggggccacaccctggcctgtctctcaggcttgtgtgggtggaggctgggaagggagttgggctaaacttcgctgttgcccgaggccatggccacttcccggcaggttgccagcgtcgcta

SEQ ID NO: 4861 - DNA, 6000 bp, Homo sapiens
cagtgagctgagatcacatcactgcactccagcctgggtgacagagtgactccatctcaaaaaaaaaaaaagagagagagagagagagaggtaggaggagggtgagagtcagagaaggagctgtgatgagggaagcagaggttggaggaatgcgatgtcacaagccagggaatgtgggtgtcctctacacagtagagaatacgaggaaatggattctcttctagagcgtccagaaggaacagcctgccagccacttgatgttagtcagccaagatccattacaggctcctgaccttagaactacaagaaaaaaaaattcatgttgttttaagccactgtatttgtggacatttgttacagcagttaatagaaaactaatacagattttgaaaatgcactactgaagctcaggtgcagagatgatcactattattattacaatgttgtaaagatggttcacgaccactccttgtgtgcctggcgcactgcgaaactcttgacctgcacagctgattgaatcttcacaaccacctgggaggcaggcgctatcattctccccatttcacggatgagaacgctgcagcacccagaggttagatgacttgcccaaggtccctggctagtgtgtggccagactgagacttgaacccagatcactggttgggttgctcttagctctgtgacatggctttttttttttttttttttttttttgagagggagtcttgctctgtcgcccaggcagtggcatgatctcagctcactgcaacctccgcttcctgggttcaagcgattctcctgcctcagcctcccgagtagctggaattacaggtacacaccaccacacctggctaattttttttttttttttgtatctttagtagagacggggtttcaccatgttggtcaggctggtctcgaactcctgacctcaaatgatctgcctgtttcagcctcccaaagtgctgggattacaggtgtgagccactgcacctggccagcttcttggtaagagaaaaatttgaccatcgagtggaagaaacaaggagtgagcaggtggagccgggatgtggctttggatgggcagtgaggcacgaccgtgttccaggagagcagcagcgtgagggaagggtggtgcctgggagcccaggggtgtccctgtgtccaacagcttgggccacagtaacaaaacataccacagacaacaaacatttatttctcacagttcaggaggctgcaagtctgagatgagtgtacctgaggctgggttctgccttctcactgtatccttgcagagtggaggtccagggtccagggtcccttctataagggcaccaattccattcacgagggctccaccctcatggcctaatcacctcccacaggaggtgtatccatgatgacgttgatatacaacactgggccacagtgagggaactaggagacatccatgggatgcctggtgaaaaaaacaaaaagattactatttctttatcttatataattatgataggaaaaaatgaaatataaagtattaggaaagacttgtgtaaaacatccaaatgaaacctcctaaacttctcaaaatgagaaatgagcttgctttcgtgagcactttttaatatgaggtgtttttttgcatgaaatgaccacaggcaattcctattcgaggctctttattttatttatttatttatatttctgagacagagtctcgctctgtcacccacactggagtgcagtggcatgatcttggctcactgcaacctccatctcctgggttcaagtgattctcctgcctcagcctcctgagtagctgggattacaggtgcccgccaccacacccagctaatttttgtatttttagtagagatggggtttcaccatgttggccaggctggtctcgaactcctgacctcaggtgatcctcccgcctcggcctcccaaagtgttgggattataggtgtgagccaccacacccagccatttttgtatttttagtagagacgaggtttcaccatgttggccaggctggtctggaactcctgatctcaagtgatccgcccatctcggtgtcccagtgtgctaggatttcaggcatgagccacaccactcccagctcatcaggtcttttttttttttttttttttttttgagatataggagtctcactctgtcacccaggctggagtgcaatggcgcgatctcggctcactgcaacctctgtctcctgggttcaagcgatactcctgcctcagactctcgagtagctaggactacaagcgtgcgccaccacgcccggctaagtttttgtatttttagtacagacagggtttcttgatctcctgaccttgtgctctgcccacctcagcctcccaaagtgctgggattatgggtgtgagccaccgcacccgccctcatgaaggctctttaatgatgatttcttcaaatgttggataaacaccacccacaaaaaaacttaccccaagtaggtgataattttttttttgagacaaggaaaaaatacaaaaattagccgggcatggtgatgcacacctatagtcccagctgctcaggagcctgaagtgggaggatggcttggaggtagaggttatagtgagctgagatcatgccactgcacagcaggctgggtgacagagtgagaccctgtctcaaaaaaaagaattaaccctcactcttcactctcactgacaactgtaacacatttttttttcaggcatagagactgggtctctctatgttgcccaggctggtcttaaactcctgggctcaagcaatcctccctccgtggcctcccaaagtgttgggattacagctgtgagccacagtgcccaccctgcaaccaaaattcttatgataatgattgattgagaatctaatcaaactattattattattattattattattattatttatttagagacaaggtcttgctctgtcatccagactggaatgcagtattgtgatcatggctcaccacagcctcaaactcctgggttcaagtgatcctcccaccttggcctcccaaaagtgctgggattacaggtttaagccactgtgcccagcctcaagtattttaaaataacactgcgcttagaatttgcagaatgtgtatatgtggttagagcacgcagtatgggcactactagaaaggcacattatctacaaacagggagctgtgtgcaatatacaagacagaattccaggtggccccctgaaaccactcctcctggtttcctggaccaccccaagcccaccccagctctggcatcagctcacacctgctgttggccatgcacgcaaacactgcaggagacgtgcagggtaggtcgcctccatcactggacctccctcatcctgccatccacctatagtgttccctggggagcctctgcaagggtcttccggaggctaccagcctgggggctccatttgccccaagcccagcctgacagcaagaggagcaacatccttccccactgtatcctattggtgacactccagcatctccacccagaccagcagaacaggagcctgatttgcccagaagagaaaggccaaaaaacatttcctgacccctcctccaccccccactcccagccccacgagagagctagcctgggttccagtcccactcctccacctacaagctgggtaactctcagctgataacttaacctctccaagcctcagtccccatctctgtaaaatggggatggcagtacctgtcccataggattgtaagaagattacacaggcaatgcatgtaagtgcctgccatggggctccacccagggcaagcctgggtcaatgctggttctggtcagtgatacagagaccctcagacacaaagatcactaacgtggtcacacacacacacggatacacagatgcagaggcccaaaggcacagtgagctcacatgtgggcacacacatggggaggcacagatctgtgggccccatggggatgtcctggccaggctctgtctcagccccagaccccacccctttccccagacaggagccccccggctggagctggatctgacctgcccttgggaggtcagggagagccctgggcatcagagcgagcatgctcagctcctcctctttgatgtgtctgtggaggagggctggccaggtttctgcaggcactctggaggcccaaactccaggcatgaaaccccatcaccccacccatttaattttttcacccccttgctgtcagcatgcagacccctttattttttgattggggaagtagaggtcggaggtggagccaggaaagggtttgccatccacagcccacaaacacacaggcacacccacagagacacaggcaggctgacacaaggacccctgcagcacactcacaggccacagcccctgcccaggcaacttatcaaattcaagtcctctgccagcaaatccaggatgtttcattctacgccacgtccacattagcaccatcccctgcaccaccactgccatcccctctgtggctagtatccccacgaccaccagcagcaccctcactgcagccaccaccaccgcagcaccacaccgtcatcggggaactgatggaggagccctctaggattctgatacagcatggaggagacccccagtgggaagggcaaaaggagggcgatgagcttcctaggagcccagaagacaaggtccaggacctcaggcccctgcagcagccctggactctccaaactccagccctgctggagacagtgtcttcccagtctgtgtctgagccttctctcccgcccctccctccctccctcccacacccacagaaagctggtctctagcaggtgctagcgccggaggtggaggcggctgcagagagagagaagcccaggagggaggggcacagccctggctgaacccacaggattggtcaatctgcatcctctcagccagcacctgactaaagattcctcaaagcgacagtgacctcagcctctgctctgagctctgttggtcccagccaggagagcccgagtcatgaggtgggcacccagtgggcagggtgggcagcaggggccctcttggaggcagcagtgagttgggaagaggaggccgggccccacagcgggcatgatggacaagttccggatgatcttccagttcctgcagtccaaccaggagtccttcatgaatggcatctgtggcatcatggccctggccagtgcccagatgtactcggccttcgacttcaactgcccctgcctgccgggctacaatgcagcctacagcgcgggcatcctgctggcgccacccctggtgctctttctgcttggcctggtcatgaacaacaacgtgtccatgctggccgaagagtggaagcggccgctgggccgccgggccaaggaccccgctgtgttgcgctacatgttctgctccatggcccagcgcgccctcatcgcgcctgtcgtctgggtggccgtcacgctactcgacggcaaatgcttcctctgtgccttctgcactgccgtgcccgtgagcgcactgggcaacggcagcctggcacccggccttcctgcccccgagctcgcccgcctgctggcccgggtgccctgccctgagatctacgatggcgactggctgttggcccgagaggtggccgtgcgttacctccgctgcatctcccaggtgaggggccgcatggcttcacgctgggtctccctggcagatcaaggtccctctgggagggccctatccccctacctctcaaaatggggcctctgctcaggtggagctccgaggtgtggggggcatcttcccaactgaggctgaaggcagagccacgcatctgccctcagcccagggccatccggagaacgtgctttggctccctctgtccagaggcttctggtgagtgggcctgacccctatcctgaggtccccagagtggacctgcatccccatcctgatttctgagcttggaagctggaggaatt

SEQ ID NO: 4862 - DNA, 6000 bp, Homo sapiens
ccatgatcgtgccactgcatccagcctgggcaacagagtgagaccctgtttcaaaaagaaaaaaagtattatcaaccagggaaacagttccatgttctgttcctcagtcagaaacaatgttaagatttaaacctgattattttgttttatgtcaataataatactttaatattattattattactatttgagatggagtctcgctctgttgcacccaggctggagtgcagtggtgggatctccgctcactgcaacctccgcctcccgggttcaagtgattctcttgtctcagcctcctgagtagctgggattataggcacacaccaccatgcccagctaatttttttttttttttttttttttgagacggagtctcgctctgtcgccgaggctggagtgcactggcgcgatctcggctcactgcaagctccgcctcctgggttcacgtcattctcctgcctcagcctcccgagtagctgggactacaggcgcccgccaccacacccagctaattttttgtattgtttagcagagacagggtttcaccatgttagccaggatggtctcgatctcctgacctcgtgatccacccgccttggcctcccaaagtgctgggattacaggcgtgagccaccgcgcccagccaatttttttgtatttttagtagagacagggtttcaccatgttggctaggttggtctcgaactcccgacctcaggtgatccgcccgccttggcatcctaaaacgctgggattacaggcatgagccaccacatctggcctgcttcattcttttaatgactgcatggatcccattttatggctgtgtcatattttatttaaacagtcccctgttgatgaaatttagattgcttccagtttgattgtcattaaaagagctataatgaacattcttgtttgtttatcatggctccttctgcaaagctacccatgggatgaatacagactttgtaattactaagtcaaagggcatgtgtatttaaatttttgctttaaatgtattgctaaactgttccatgaaaaacctacccatttgtactccaaccatagatgaaaagtagctatttccttaagcctcatcaacactgggaagtatcaatctttcagttgctaacaacttggcaatttttaaaggcaactggtggtttcatttcttatttaattatgaatgaggattagaattttttcaggatgtttggtcacttttctctctctctctctttttttttttttttttttttttttgcaaataacctgttcaaatcctttacccatttttctagaggattgttcgtcttttggattgatttatatgagccttctgcaaattaagaaaaagaggcctttgtgtggcaaatacccttccttcagtttgttatttttattttgtttattggtatgtttgcccatagaagcgtctagtttttatgactcttacttgtccatctactcctctacagctactaaattctggggtctgttcacaaaggccttccttagcctctgattatgaataaattcccttacgttttcctgtagaatttttatgattttaatttttatgttgaatctttgaaccatgtgaaaattattttggtatgaagcatgaagtagagattgctcccgaatggctagccagttgttccagcgccatctgttagatggccccatttcatttccagcctgtctctgcccttagggctacacggctctgtggagtcaccagagtggggcccacagaagtgccacgttgctttccccgggtctgccaggaccgctcaaaggcctgtgtcctcagggaagcagagaatcacgccaccgagagacagaaagggcaccaccctctgctagacacacagaacaacagtctcccagtcctgagaagtgggacgcacgttcaatgccttccctgtgaaggaaaaagaaaagaaagaactgtcaggggagggcatactcaccatatacaaagtaggaagacggccacacccatatgtatgaaaacacacatgcatacacacaccaaatatgtacacatgcactacgcacatacacatacatgtgtacacacatgcatacacaggtacatagacacatctctcacacatcacatacaacgagtttctccagtagggggcatctagtcctaaacagccctctcaataacaggaactccaagaacggtgaagccagtgtttctcaaataatatccagactcctttgcaaagatcaaaaaaaactggaagacccccaagaatatatctgcaagactccaatttgaaaataaaacaaaataacatgaagaaagtaccaaagatttattctataaagatcttccaattgcaaattaacacatatttacaactggttttaaaaaaaaaaaaaagattaaatcattattaaaaagaaaaatgtaatttatttttagtctctctttgttgcccaggctggagagcagtggcatgatctgggctcactgcagcctccgcctcctgggttcaagcaattctcatgcctcagcctcaagagaggcaattctcaagcctcagcctcccaagtagctgggattacaggcatgcaccactatgcccgactaattttttgtatttttaatagagatggggttttgccatgttggccaggctggtctcaaactcctgagctcaggcaatctgcctgcctcggcctcccaaagtgctgggattacaggcgtgagccaccacgcccggccagatctgcaatttaatatctttccatatgtgtgagtaaaagaagcctttctccatttattgctgcctctagttctctctctactagttcagcagggccaagctccaggcaacaaaatggaattctcctttttgccttgtccttttatctttttatgtttttctaattaaaatgttttatgatttttgctggaaatagttaaaaatcattattatgattatagtaatgatttattatgtctactattataaaagtcgacaattcagaaaatagagatttaaaaaaaaatgtaagccatcccctctctttgacagataatatcccttttgtggtgggcttctttctggcctgtttctttactgaagtatttcctgtaaatacccggcaagggtcagccccgctgcagtcactcagcacctgttgccctgcagggctccagggacccaggctgacctggtagctctgtcttacctctcagaggctggagctgtgaaaaggttggcctggagtctttgacccagttttcttcaaagtgttcttccagaagcattgtctattgttttctgaactctcaaggttagagtggctggggacccttaggacactctatccctccctgagactagaatgggattgaggggtgctcatgaccctcccagcccagttagctccccgcctgctccacaccagccctgctggttcagggtcacgaagcctggccttgggccaggacagtccccttttctggtcagcagcccagtgggtgactaaggctgaaaggcacagatggaggatcccagcttcctccctggctctgtccccgccagggtatgtgacctccaacagcccctctgggactgtacccacctgaagttgtggtggtcctcctggcttgaagggtttctcacccctgccccgccctctcctccgctcagagtcagactcacagggccactggtggctctccccatcttctccagtgcctcatttccctcacacagggaaatctgtctcataggacctagagtaacgtacaaatatggaaaataaaaatactaagtggccaggctcagtggctcatgcctgtaatcccagcactttggaaggccaagggggccaaatcacctgaggtcaggagttcgagaccggcctgaccaacatggcaaaacccctgtctctactaaaaatacaaaaattagctgggcgtggtggtgggtgcctgtaatcccagctacttggaagctgaggcaggagaatcacttgaacccgggaggcagaggctgcagtgaaccaagatcgtgccactgcactccagcctgggtgacagaacaagactctatctcataataataataataataagtaagacccaggtttctgtctgtcttcatcagaagtacagaccacacagatggttacgaaatttgcaagacttatttgggatgatctgacttacaatatgggccaagtgacctttacaaaattcgttttgcaggtttcaggggtccctcaaacatctgggctgtcatccttcggagagactggaactgagacacaaggagagacctagtgatgtgggagagttaggagaagaagcagtgatttcaaacgcatgcccctcacacggaagaagggcagggggaaagccatgcaggtgtgggcgtggcacttgagcagcctctcccatgggcacccagtggttaatgcacaatgtttagcacgtcgcccagggaggccatccccttccgctacccctttcatggcaaatgctgaaacatcgttgaagactcctctcaagggtctcctcttccaggaagccttcggtcaggaataggtgccccttctggctcctcctagcctgaaagccaacatgaaatctccctgggctgagctgagtcgtcatattttgttgttgttgttgctgttgttttactatgcctgtgagacaagttcagagtcatgcttttgatcaagaccagaaaatatactaccttggctccatcagcatcttttcctcaccacacccagaatttgcctgtcccccgaaggaagctccaacggctgtcaagcctgagcatccagaccgtaaagcaaagagaaatgggccgggaggaatggagtgacagggcggggcccatttgcctagaggtgctttgggctgcccggtcacagagggtgactcactcccccagacaggaggggagtggcaccaggggaccattgggctgggcaggggagcctttgtggtgagagcctgtccctgccttaagtgcctactggatcccgggagcctgggctggggcctgggcactgcttcctccttggcccctcaggcccttggaagcagagagagaacctcttgcagatcccaggctcgtccccagcacagcagacaccaggaaggtggccagagcctcactgagccgaaccgacggccgcccacccacccaggctggagccatggataaattccgcatgctcttccagcacttccagtcaagctcggagtcggtgatgaatggcatctgcctgctgctggctgcggtcaccgtcaagctgtactcctcctttgacttcaactgtccctgcctggtgcactacaatgcactctacggcctgggcctgctgctgacgcccccgctcgccctgtttctctgcggcctcctcgccaaccggcagtctgtggtgatggtcgaggagtggcgccggcccgcagggcaccggaggaaggacccaggcatcatcaggtgcggtcccacaccactcagtgacccatgagctttgccaggggctccccagccaccccacaggcactgtcaagtgcacccccagaccccaaccattctcattatcaggggattctccacccaccctacaggtactgccaggtgcgccctctcctttccccaactaggaattatcggctcacagagagccacttgccagtttccactctggaaacatatttctgttcctatcgtttgtcacctttccgtggccagtgctgtaaacataggaatgacacaggattcccaattacccaggccactctaggggctgcgggaaaacttcctctttgccctctgaagctctgctgaaaatcaactgacaaaaggcagattaataagagaaaaggcatacaaatttatttgattaccgttttatgtgccacagaaccttcagaataaagacctaaagatacagaggaaatggttcatttttatgcttaggttcaacaaggtttggatagcc

SEQ ID NO: 4863 - DNA, 6000 bp, Homo sapiens
tactggattcagagctaggtctgtatttgttgatacctgaaagtattttaagggacagattttaaaaatcccatcattctgttggcaggcaatgagaatagcctgcatattattctccccagttttctttctgtggttcttcatgaaattgatctgaaatgcaagacaagacactttgtctcaatggtatccaaggggagccaaatattttgagaactattaaaagacattgttcaaacgatgaggcatataaatgtgatttagtgcaaactgaagccaaagtagccatcaaaaatcaagagacttaggaaaaagggaagacaaaaaaccaatgagacagttaacctgtagcttatgctgtaagattatgtggggagtggttataacattctctttaacattacttcccacacacaaaataaaagcaaatagaaatggggagtatatatattcccctcagcctaaaaaaagtgcacacttgttcccaaaattgcttgctcagcattactaaaaatgtttcaagccaattagagtgcctgacacatagaaaatcatcaataagtgttatctgttattagttggatttggagtaaaacagtatttcataaaatcaagaacatactgggaataagaatgcctacgtagaaaccttgtctctttgcactaattgctgtgtgaccctagttacttaatatcatctgtgaagtggggagaatgatagtacttatgtgatataagctttgtaaaaaaaaaaaaaaaaaaaaaaaggcatgagctggtacatttaaactccatagcatagtttctggcatagagtatatatctgatttacaaagtactagttactaagagttgtgctcctaggcttgttatactggtgccacccagctaaccagccattatttattgagcacttaattaactaggcactgaaagaaatgttgaaatgaggttaatgttgaaaataaatgttgaaataaggagcacagggcctttatccacatgtggattttttggaagttattaacaaaaaacaggtttaagtaaaataattaaatgctgtaatatacgcttagaaagatctggcaagagattgatacagaaaatgtggaataaatttcttctgtaggcagaggttcaggaaaagtctctctaaggttgtatatttaaagtgaaggtctcaaaaaagaggagtcagccatatgaagtggggttggacggtggacgttctaggcaggcggaacagcatgtgcaaaggtcacgaattggaaaaaactgggcacatcagcgaaaaggatagcccctaatggttggcgtattaggatgagggtagagaatcctgccaaatgtgatggagaagtgagtacttggtcagccatggtaaggagtttggatattattctgtttgtgatggtaagctggcaggaagtattaagcagttacaataaattatattttttatccttttgaaagactacttttgctgccttgtagggcagagtgtccacacttttttgattgtgcacaccaatcagtatacaatgactaaatgttcatattctttgtctttctgcctctgcttctttctctatctgcttctgtctctctctttatacatatatatgcatatatatgaatatatatacatatgtttatattgtatataaaactgtatataacataggtatattaatcaataattaaatattttagcaaggctaaattttaatctttctgattaaaactaaatatatcaccaaattctattattttcatcttgcacaaaaatggatcacctgagtgtgcttgtgcccttgtacttgtgtcatctttggagatgactattggagagaaggaacggaacagtgcaattatggagtagagtgagcagtaagaggctgttgtggtagtccagatgagaaatgatgataacttagatgaagtcgtggcatatttgtcacgtgcacaatgaaaagactccttattggaattacagatttatgttctctactagcctttgatatcaattactttcctaacaaatgactcattcttattatattatattaataaaaatctattggattgcttagtgggttgttggattgaaaacatcttgaaatagactcccctccatgattagcctatttattggagtcttctagataaggggaataatttaggaaattactggtactttccgcttctgtttgttggcaaaagtaaacggggagcagagccataagaaataaaatgaatccatctatctacatatgaacaatacggcttgcagccaatgtcatccacacttgtgtaacttctgtctcaaatgaataattaaaatcaggcattaaaaacttgcctgctctctatgaactcccagcaaatggactgcaaatgctttcattttaaagggatcattctgacaggtgtgtttgaaaagaggttgtaaattctgggaaggaaaaatctactctacttgtacgagcattcttcaggaagcgcttccattttgaaaccaaaataacataaatggtggtagggcaatgatagactaaagccaggaaatctgaatccactaatgtcttcttttccattttgcttcttccagcctatatttggatgataatttatttgggttctgattctttaatctgcttttcctttcttggaggaattcccatgtacttatccagactggaaaggaggttagcagggcatagaaagaagtcattaagtaaatgatcctgcaaagctctaaaaacctttctgaggaaagaaaaaactaccgctctgggttttgacaaagaacatttgcaatttgaggaggagagaggacctctggctctcctctcctccatctagaggccatagcctgccagacagcctttctgttttggaggattcaggcataaaggagcttttgcttgtatttcttctttaacgacaaacaggacactcttttaggtccttttaggtactcaagtttaatggctgagaagcctgccctccttgcatttgcactttttctgcgctggtcgtaagaacaagaacttaggccgatattttacaacacctctctggattggattgatataacagacgttttcttggacattagaaagaatttcattaattgaagagtaattatcactctgtattactttgaacttggcctcatcgcaaacacggtatacagatttttcagtgaggttattattctagtatgaaaatgaacaaaaatgtaactagaaactggaatcggtactattttgttgtgtcattcatttattcaatcagtaaatattcattaaataatgtaataacatgtacctaagagaatattacgtatatgaagactgcaaagaaatctgaaaccatttcaacccttagaagcaaactgtctactttaaaaaggattggattttgagaaatcctttgccgttttcaaagcccattcacctgctataaatcttcatctgaacttacgaatagtagcagggtgctaggctgggcagatactataatcatacaattatagaattttaggagcggaagggattttaaaggtcatctaatgtgaccatttaattttaaagcttaggaagctgacagattgtgatttgtctgaggtcccaaagcaaaccagtggcagagcaccatcacagacttgctattagggatctcaaagcatgtggcagtagcactgggccaggcaccaagtgacacagaataactataagtactgtgcctcctttcctgtatttatttgttatgcagatatgcattagactcacaataaatatttattgaactaatgactggcagatttcctcccatgtagggtactgtgccacgtactgaggaaaatggtaaacaaaaaacaggtcacttcctccaagttgctcgaaatttgatcttcctgtcctcaatgagtttgcagtctcttagggaaaccaagatatatacgcttaaaaaacgcgtagtggaaagcgttttcttaaatatgattgcatgcaggaagattgggttcaaattcagtgaatgctttaggaggttaggagagaaatctaagcgttaaaattgatgggaaaaaaaatcccccaaactaacacacacacacacacacacacacacacactcacacacgagatcatttaattacatcactctctgctgctgcctttccgggatctccccccaggctgggacacacaggctctgctgcgggtaaggtcaagatgccaactcaggaagcataagagagggaaggagcagaagcccacccatccctatctcctcaactagaaaagaccagaaagacggagaaaaaaggaaacagcaacatagactcatagaaacaataaagcaggaataggaagctcccgacacatcgactgctccgggagcccggggtcgaccgcccccgcgggcagggtgcgcggactcagcgccgggacccgcggccgcgggggcgcagagtgggcggcggggagaggcggcggcagcgcctgcgaggccgaggggaggtcgccggcggcgcctccagcgcccggagacccggtgcgcagcgcagctcggccgcgggacgcggcgcccggagtcccggcagcgcctgccctccctcccgcgtcgcccgccagcgcccgcgcccgctccgccagtgacttcagctcagctccacccccgcgcggcggcggctcgctccgtccggacccgcgctcggcacaagcccagcccgggcaagcggccgccacctgcccggcgccgcctccgcccgcccccaccgcggcgcaacttggatggagttggggtcctgagcgccggccccccacagccgccagcgcagagctcgtgccgccaccttcgttctgggacccctctctccgctgctcttcgctcccgcgatgggaaaagttggcgccggcggcggctcccaagcccggctgagcgcgctcctcgccggcgcggggctcttgatcctctgcgccccgggcgtctgcggcggcggctcctgctgcccctcgccgcaccccagctccgctccacgctcggcctcgacccctaggggcttttcccaccaggggcggccaggcagggctcctgccacgcccctgcccctcgtagtgcgtcccctgttctcagtggcccccggggaccgagcgctatccctggagcgggctcggggcactggggcatccatggcggttgctgcacgctccggccggaggagacggagcggagcggatcaggagaaggcagaacggggagagggcgcgagtcggagcccccggggagtgctaagagatggagggcagcaggagcctgggactcgggagcgggacccggacaaagccacccgcttccggatggaggagctgagactgaccagcaccacgtttgcgctgacgggagactcagcacacaaccaagccatggtccactggtctggccacaacagcagcgtgagtagaatgggactgagggtaaaggggtggaaagatggaaagggttaaagtcggctgtgtgatctgatggagaattggggggaaatagggtttctggacatgggagatgctgcaaactggtctctgcccacttcccccaagagttaacatcacctactaggagaccaacctccccatctctcccaccaacaccatcagagtcctctccaaatgccacagcttcaaactgaggagtcaaatccctatttcctgttgccttggtcgcattggtgtgtggaactgaagaccaggtaaacagaggggttaaagttctcctaatacagagatgaaagggttaaatttccaggcaagctgacatcccctcaagtgactttccctttacttgccagacctatgtactggctcaaagaagattaagaagacccatatatgtaggcgttttattttattttattttaatttcatgcggagctcctaaccccttcttctccacaagggagaactgcagtggagagtatataaggtgttcttt

SEQ ID NO: 4864 - DNA, 6000 bp, Homo sapiens
aatacctcgaacatctggaaaatggcaaaacaaaacaaaatgcaatgtacacagaggtacatgtgcattactttcacaaacacagggtgtgtgccattttcataattggcttaggtatcacaattcattatattttcagagttggccaggagattgtcctgaacaaaatcatagagagggaaacagagagggaatagcttctctgctggtacaatgggtgggaccagctttttataggatctaatcagactcaccttatgaagacaggaaatctaacatctggtacaccaccctgaaaacaaaaggcaactagcttgggtaatgaaaggctgtattactgtgtatacagaatttgtagtgctgtcactcttcttgttcctaatatcaataatgtgtgtcctcctcttttttccttatgaatctggctagaggttcattaactctatggattttctcaaaaaattaactttcagtttcaattgttttttattttcctacttaaaaatttttctgctttcgttgatatctgccctttattattttctgtttttgttttgcttattttgggtttaatttatacttttttcttaaggctgaatctgagataaataatttgagatctttctttttttctagtataggtgttttagtgccataaatttctaagtactgttttagctgcattcctcaaagtatgatatattgtgttttcattatcatttagttcaaggtacttacaaattttcatttttcttttttacagcatgattttttaaaagtatgtgagtttctaaatagttaaggattttccaaatacctttaagttagtggtttctaatttctaccgtgctcagagtatatgttttatgatttggatccttatatgtgcatcaagacttgttttatgatccagaatatgacctatcttggtggatgttctgtgcacacttgaatgtttattttcctgttattgggtggcatgttctataaatgtcaattagatcaagttgggttgatagtattgtacaagccttttacatccttattaattttttacccacagttctattagttattgggggaggggtattgaaatggctgactacaattgtagatttttaaaatttcttcttgcaattcgattagtttttgatttatatgttttgaagtgctgtattagaggaataaatatgtagaatcagtttgtcctcattatgaattgacccttttatcattataaaatgatcctctatatttctgataatattctttgtattgaaattatatgatattaatatacccacctatatttcttttgattagcattagtatagcatactgttttctaaccttttacttttacttgtcttaatatttaaagtgagtttttaaataggtggcatatcattggatcttcattttttttccagtctgacaatatctgccttttaattagggtgattacttatatgagcttaaatctatcatcttgccatgtattttctctttattctatctattctttcttttctcccccatcatttactgccttcttttgaattcattaaacatcttaaaaattcgacttaagcttctttgttgatgtgttaacaataactcttagttttgctttcatagtagttgctttaggagttaaagtatacatttttaacttattacagtttaccttcaagtatattatactgcttggtgcgtaagataagaatcttacaacagaatacttctcccttcctggactttgtgctgttgtcatcatacattttatttgtacatgttataaaccccacaaaatattgtttttgtttgtgcattaagcaatcatgttttaaaagagttttaatggctgacatggtggctcactcttataatcccagcactttgggaggtcgaggcaggcgcatcacttgaggtcaggagatcgagaccggcctgggcaatatggtgaaaccccaactctactaaacatacagaaaaaaattagctgggcgttgtggcgggtgcctgtaatcccagctactcgggaggctgaggcatgaaaattgcttgaacctgtgaggaggaggtttcagtgagctgagatcacgccactgcaccactgcactccagcctgggtgacagagcgagattccatctcaaaaataaaataaaataaattaaaataaaagggtttaaaaaataagaaaaattatttacctacgtatttgtggtttcttaagctcttaattcctttgcatagattcagaattccatctgacagcattttttttttgcctgaaagactttctttaacattgcttatagaacggtcctgctggtgatgaattcttttggcaattcgatgtcaaaatatgtttttattttatttttttgatatatataaaaatatataaaatgtacataccatatattaatataaaaagaactcttgattgataggttcttcattcagtacttcagatgctgctccaccatcttctggtttgcatttttctgatgtgaaatctgctgtcattcttatctttgttcctctgtacagtaatgtctttttttttctctctgatagcttttaagattttctctttatcagtggctttaggcattttgattgtgatgtttcttggtatggttttcttcatgtttctactgagtttgttgagctttttgggtttataagtttatagttttggtcaaatttggaaagttttcatcaattattctttcaaatgcttttttctgtcctccctaatctattctcacctcatatttctcattttcttcagggactacaattgcatgtatactaggctcactgatactctacttttactttcagtatttttcttcccttagtgtttcattttggatagtttctatcacaatgctttcaagtttttttttgtttgtttgtttttgtttttgagacagagtctcgctctgtcacccaagctggagtgcagtggcacaatcttggctcactgcaagctctgcctcctgggttcacgccattctcctgcctcagcctcccgtcaggttttttactgtttcttttttagtaatgtctaacctattaatcctgtgtgtgtgtgtgtgtgtgtgtgtgtgtgtgtgtgtgtgtgtgtctgtgtgtgtgtgttagggtgttaaaaatcttagatgtggttttattatctcctagatgtttggtttgtgtcttttttttttttaaagatttttcacatctctacttcccatgctcagtttattttttctacttgttgaaaacattgaatacagtcataattactttcttaatgtccttgttctcttattttatcatctctgtcatttctgggatgatttcaattggttgatttttttttctcatttcctgcttcttttcgcatgcctgataattctgtttggattccagatgttgcaaattttaccttgttaggtgttggttatttttaatttcctgtaaatattcttgtgctttgctctgggacactttgttctcaaaaacggtttaatcctttggtggctggcttttaagatttctaagatagaatcagagtagcttttacattagagctaattttgccccactactgaagcaaaaccatttgagttgtgaattatgaggttttccagtcggggtgccaggatcaggcactatttctggtcctgtataatcactgggtatctttctactctgccttgtgggagcagaattaatttcctaccctgtgcaaactttagtaattgctctctcttttcttcatacatgattatttcctgcccttaggtagcttcctcacacacatgctctaatcagcggaagactggagtgagatctgttgtagatctccacagctccttctttctctgtgtagctttctcctttctgatatacaactcacagttccagctgctttggcctccctgctctcccagttctatctcttcaactcagggagtctgcctagctctttttggctgctccctctagttagtaaatcaaggcaatcatagggctcacctcatttgttttccctcctcaaggaccactgtccagcacaacgtttaaaagccattgtcttataaatgcctgtttgtttttgtttttagttgttttaggcaggagagtaaattcagtcctgttgctccatcttagctggctagactggattgctataaattttaaactatctaaatagttgcatatatttagggggtacaaatcgatgttatgacttatgaatacaatgtggaataactgaatcaagctaattgacatatccacctcaaatacttctcagttttcatggtgagaacttttgaaatgtactcttagcgattttgaactgtataatacattattatttactatattcaccatgctgtgtaacatatagtccgaagggggaaaaaagcccttatttctcctaactgaggctttttatactacaagccttatttgcttcttttcatatctcattttcctccttaaaggaaaaggcactcagccactttggtagaaattacacaacatggccatttgcaatccctgcctctcccattcgtagtaaatcctacatagtcttacagatctcataaaaagtcagaccacacacataacctgatagcccacgcgcacattcccaacagagcctggaagagggacaagctcccggataagctgaatttacacaaagcagaatgaggtacccacacacactcacacacgcatggcctaggcagggtaaccatctgtccaggcgctcacacactatctttagccacacacaggcacgcacactcgagtacacacattacaccctcggatccgctcacgctccctgaggctcgcaggccgggccccgcccccggcgctggctagccggcggccccgcgtcaatgccacgcgccggttgcgtcatcagggtgcgccactgcagctggcattggccgggactggaagtgcgggcttctgcagcagccgaagctggagctgctagggtgcgaactgccagggcaggtgtgggctgcgggaggctactcgggccgggagcgccgggacaagtgcatggaggtggtgcgactcctgcaagttgctggggcagtcgtgtcccctattccctgacacccgagctccggtcttctccctgagaaatcggtcgggctcgtgcaggggtggggatcaggattcatctctcctggggagactgcgctggggcatgggttcccctgggttggaaggagtccttatggactcagtcccctaagtatctgcacgcgcggaggcgccgccagccagcccgcctgggtccctagggaacattgaggcagtaaggggtactctgagagcagccggtatgctggagataattaatgacagcgttaccattgattggactgagcgctcactgtgtgttacacactgtggtagaccctttgtttatattattccgtcctctcaacaatccaggaggttaagagctatcattctgcccattttccagatgggaaaactaaggcatagaagttaaccaacttatggtaataaaaaatcacacagatggtaagcagtggaagatttaaacctcacagctggtcttccagcctctgtccttttcagatcctctagtcagcttctctcagcgcatgctgctggctggtgcctctgggatattgcttctttattactccttgacctagagcgaactgtgcggagggaggaagtgcaaaacgtggacctcctgttggcacaaacgagcctctttgtcctctcctcatcctctcttcacttcattttctcaggcagcagcggctcccctgttgtatggacattctgcacccgaaactgatagctgagtcctgaagttttatgttatgaaacagaagaactttcatcccaggtgcattggtttattctctcccctagcctgttatgttagattgtacttatgttaaatttttaaggacataggtggttatgcc

SEQ ID NO: 4865 - DNA, 6000 bp, Homo sapiens
catatgttactattaaagtgaaccagaaaaagagcactctattacaataatgggttttgtttaaaaaaattcaaatgtcaaatccccaaaggaataatacatatttgatactattattagaacagcaataccagtaattgtatgaggtacttatattttgcattgttcatccagtaaagggattttatgtaaacctttcagtaaaattattgtgtcagaggaaaatgaggaacagcatcactcattattcatgcaatcaatatacatttattgggggtgactgtgtgttggttatcagtctaaatgctggggatgaaaaaaaagactaggacagcttcctgccttcaaggagcacacattccagatgaggagacagatatagcaactaactacaatgcaatgttacaatagacatggcggaggcttcagtgaggccgtggagtatactacagggaactatgaattctgaccaaagaggtccatattatcgtagtgtcctgtttgagctgagccgaaccttgaaatatcaggatgaagcacgcattaggcagatggaaatgaatgggcaaaggtatagcagtcaaaaatgtcatggcacacttagagactggtgaatagttttttttttttgtaactaccgcggtaaatctgtcaagctgtctgatgtcaaatgttgaactttcatggactagaatgagttaaaaaaatctgaatgctttttaagcagtagaattttacaaaatggagggccaaggaaggcaatgagagaaacagacaaaatgctgcatggaataaaactgtcattctcatcctgactcatctgttaacttatgaaaatacacttacatcaagaaatgccagaaaattgctcacttcacgtgcttatgggtagattgaacctaattttgtggcattaaaaccaattttctgctgagcaacatgtcacagaggattacatgaacctttataattatcaataatatttgatactttgatgtcacctttcatcctgagatcagtcccatacacataggaacagataagctccaaggaaacagagatgatattaatacattaagtcacaatgcttttctgtcttcgatattccaagggcagtgtgtttctctcacctttagaagttagtggatgtaggccgggcgtggtggttcacgcctgtaatcccagcactttgggaggctgaggtgggtggatcacaaggttaggagtttgagaccagcctggccaacatactgaaatcccatctctactaaaaatacaaaaaaattagttggttgtggtggtgggtgcctgtaatcccagctacttaggaggttgagacaggagaattgcttgaacccaggaggcagaggttgcagtgagctgagatcatgccactgcactccagcccaggcgacagctcgagactctgtctcaaaaaaaagaagaaaaaaagaaaaaaaaaagttaatggatgtagttgtaaagcagtgatttttttaattattatttttattagctcctactacgggaagtcttaggctacagtatgggccacatctttctgttcacagctttccttggaagatcagcttttgacatatagattctcctactccctggcttctttgcctgctgatctcatcctgacataccagaagtgggctgtgtcttcatcgattctttgacttctacaagagactaacaaggcatcatcatcatcatcatcatcatcatcatcattatccttccaactacaacccccagtactgctgctgcttatgaagtaagcactctatgcactattctactattctaaaaactttatatatgtgtatataccacattaactaattccacaccaacattatagggtagtgctgtccagtagagcttgctgcaatgatggaaatgatctatatctgtgttgtccaatatggtagccaccagccacatgtagctattgagcacttgaaatatggttaatgctactgaggaactgcatttttcttttatttaattttaattaatttcattgacatagccacatggctagtgactattgtattggacaacacagttacagcctctgggggtttattgttacctttttaaaaacaaagctctgtattcatcagcagcacaaacttaataaggacaagtgtgagtgaatggttcagaaatacattattgaagctaaaaatacagatgatccttgacttccaatgaggcttatgctctgataaactcatcaaaagttgagaacatcataggttgaaaatgcatttaatacacttaaactaccaagcatcacagcctagcctagcctaccttaaacatgctcaaaacacttacattagccggcagttggggaaaattatctaacacaaagctattttatagtaaagtgttgactatctcatgaaacttattcaatactaacctgacagtgaaaaatagaatgattgtatggtccatagtcaaaatacagtttctactgaatgtatatggcttttgcaccatggtaaagtctaaaaatataagtagaagcatcataagttggagatcatctgtattttaaaaagaagtcccatattctacactgggagagcttttagttcacccttcccccaccctgttaaaatttgattcaaaagaattccgtggaatatatagggtaacatgaagtcatttctaaacaaagaacatttacaaaagatgtggatgatgtcttaaacctcattgtaatccaactatcccaagtaatcagcaccggtaagcactagtccctctattgaaaattgaaattccaattactgattttccaaaagaagacattctcctccacttacgaaatggaacaatgaaagaggattttctgtttggggtgaccggggagaaacggagtcttcacacaaagtcttagttcatattcagccctcctttccttgaaaccacatccccaggatttatctggcttgtttgtgaaaatatgggaaaacattttaagtcgaagaaactgatcagatgacttaattacatttctgcttagttcagcctgtaacttagactgttagagagagagaacttaagtagcccttggtttgaaccatctgtcgcgaaaatgtgacatatgtttgctttgtttactcaacaaccaagtgtaaactgatacactgaactagagtatccctgaatgatgtggctatgggtgtgtgtgtgttggaggaggggtgtctgatgagggcgtccgtctcctcatacttaccctggaggaacacgcgtacagcacaagagaagtgcggatccgtaggatgtcccccgggtttggggcgcgccccgaggcgcagaccctctttggcgactccacacaatatgcagcccgcctgcaagcagccgctgcagccgaggggcgcgcctggctgatgtgtggttgaatggagagcggcccaaccctcctccttcctcctcttcttctccccgccctgacacccgggcctcaaacttcaaccaaagcccgtgcccttttcaatttacccccctcgatcaaaatgagccattcttgtctgtcctccgcggcggcccattgtctggcgtgataggtttgcagatttgacagctgggcgcacgcagatttgattcaaactcggtctccccgagagatgaacttggacatcagcaaagatcccgagcactgccggctggctcctagaccggtctcccgacccagtgtagacttcggtgccccgggcgccccccggcgtgcgggaaggggagcgtgtgtcaggcgtggggggcggggggtgagcagcacgactgggaaccagcggtcccaggggttggggcgaagggctgtgtacatgttaggctttttttgttgttgttaatttactctcgaaacagccaaaatggaggtcagcttataaattttctaaagccaggtctggccgggtttaaatgcagtgggctgggggctccgcttttgtctccttgtcggagctccaggagagaggtagagactgcgtgtgcatgtgtgcgtgtgagtgtgagtgtgcacgcgctggcgtggacgaacggatgggcgcatcccaggatcgccgctccagcgtcctgggtctgagtgtgtcttgaaagcaccaagtcttgaatcacagccactagtgacgtgggggaaaactttgtgttccgaagaagggtctggctcgattgccctaagaagaaagagcccttgtgcccgtgtatgtgtgtgtgtgtgtctgtgtgtgtgtgtgagagagagagagagagagagagacagagagagagagagagagagagagtgtgtgtgtctggcagcacccgcggccggctgcagaacactgcgtgtcctgtgcgcgagtacgggtccggccgcgggtcccaccgcaagcgggcgtgtgcagctgcggctgcctggcgggcgagcttaggagggagctggagctgcggagcggcgggaacaggagcaggccgagggtcctctggccagaagaaatctggcctcggaacacgccattctccgcgccgcttccaataaccactaacatccctaacgagcatccgagccgagggctctgctcggaaatcgtcctggcccaactcggcccttcgagctctcgaagattaccgcatctatttttttttcttttttttcttttcctagcgcagataaagtgagcccggaaagggaaggagggggcggggacaccattgccctgaaagaataaataagtaaataaacaaactggctcctcgccgcagctggacgcggtcggttgagtccaggttggtggcatttggagtttttttcgttctgtttgggaacccattgccgcttcccgtccctcttccccactccttcttcccccctcctccggccacccctttctttttgctggcgtctcccaactttagggcccggggggcgctcgtggcgccgggctgcacctgccggggcacgccgggactgcgggccggcgcgctcgccctgggctggggtgcggaagcgcccgagtcctgggcaccgggcgagagtgtgagaggagcggacgcccaggagggagccgaggacgcgcggcgggtagggggtaggggcgcaggaaccgggtttcagccccagtcgggacatcggttccccctggcttggcggcctctggagggagacgagtcccggggagaaggagggcggcgactggggctagggattggcgatcggagtggggagggccggcggctgagcgagctcgctggctgacgcgaggagggggaggccaacttcccgggagaaggggctctttcggcgccagggctggctagggagctgccgccgccgccaccgagggctcggactccaggcagctgcaggctccgctcgcgacgctcggaaagtaccgtttatttatttatttgcttgcgttcagcgtctcgggttgaacccaacagacacccccttggactttaggaaccctcttcagacctctccagccctcacctccatccccgtgtcagcggcccctggaaaacacgcacatgcaccccgacctgggtgggggtgggtcctcaccccggtgttggaaattccccaaaggcgggaacgggggaggggagagggttctgtggggggagtctccggcgctctccgctctcatctcaaagcgcgccctcccttccaggttgggtcggacctgaacccctaaaagcggaaccgcctcccgccctcgccatcccggagctgagtcgccggcggcggtggctgctgccagacccggagtttcctctttcactggatggagctgaactttgggcggccagagcagcacagctgtccggggatcgctgcacgctgagctccctcggcaagacccagcggcggctcgggatttttttgggggggcggggaccagccccgcgccggcaccatgttcctggcgaccctgtacttcgcgctgccgctcttgggtaagtcgaggcccgccgcgggctttc

SEQ ID NO: 4866 - DNA, 6000 bp, Homo sapiens
tgagaactcactaattttgcagttacctctgtacccgttttaatattgagattaacaagagagagaagctgagtctggcttataagataaagacttttgggagtctatgggccctgctctgtcccagctctgcctcaccttctattggtggacttcagctggctgcaccctctgggaacagtttcacctcaaaccccaggctcccagtgcctgacccagggagggagaagcatcttttatcctgagttttctctaacctgccttttccatgagtgattgatacctgaaatttccacatccttttaagacagactgttaaaacctgtaggttaaataaccggacacagtgacacacacctatagtcacgctacttgggagtctgaggtgggaggatcagttgagccagaagttcgaggctgcagcctgctgtgatcacacctgagaagagcactgcactccagcgtgggcaatacagtgagaccctatatttaaaccaaacaaccaaaaaaacttctaggctaaacatatctgcatctgtcacagtaacaccaacacagaagataaacacagaccactgtggtagcgtggttcatctcattacatgctgctacatgattaaaagtgatgggcatggttttctgttttgcatagacttagagcctgtacattctttctatgaagatttttcccgtgggatttccccccatttacccaataattcattcataataaacagttgttgaacctagataaaatacacctctgtctcttcccatttgcctataagtttcttgccaagatgtgatacagcagctcaaagaatgcttgccaagtcactaatagtctttgctctctctagttcagtgactttccgatactgtgtaacattcagggcactatgtgaacttgtaagtgtgaccatactgcatgttttatggtgacctggtccagtactgcctttgttaaagcatctgtcatcagtaagagatgataagttttttgcacaacagtgaaaaccccacctttaagcatatgattacgcttaataaatattttattaaaaggagaattaaagacctaaaagggaagaagttagactgttctagttctggtactgttgaggcactgatgaggataaatgatcatgcagaggtctcttcataattgaccccaatggagtcatcaagcatttgagcgtcaacgatctcccagtgggccgaagcgtggaagaaaccctccgcttggtgaaggcgttccagtatgtagaaacacatggagaagtctgcccagcgaactggacaccggattctcctacggtaggtttttttccccaaaagcagtgaggtccatgttctctcagcctcgagagctattgacctgaaatatccacaaaagggagcccactcttgaagcaagcgtgcagatgatatgcaaatgggtgaagctgctgtggggtagagggggtggggtggggagccaggaaccaattatcagagacaggcaggcctttttttttttttttgagacggagtcttgctctcgcccaggctggagtgcagtggcgctctctcagctcactgcaagctccgcctcctgggttcacgccattgtcctgcctcagcctcctgagtagctgggactacagggcgcccaccaccacggctaattttttgaattttagtagagacggggtttcaccgtgttagccaggatggtctggatctcctgacctcgtgatccacccgccttggcctcccaaagtgctgggattaccggcgtgagccaccgtgcccggcctagagacaggcaggccttaatgaaactttcatctttatgttttaaaggaaatctttaaaagtttaaagaactttaggttaaaaattgggagattgccactcacttttgggactattattatggtaaagtcacagttacctaattaagcttttgtattttcagatcaagccaagtccagctgcttccaaagagtactttcagaaggtaaatcagtagatcacccatgtgtatctgcaccttctcaactgagagaagaaccacagttgaaacctgcttttatcattttcaagatggttatttgtagaaggcaaggaaccaattatgcttgtattcataagtattactctaaatgttttgtttttgtaattctggctaagaccttttaaacatggttagttgctagtacaaggaatcctttattggtaacatcttggtggctggctagctagtttctacagaacataatttgcctctatagaaggctattcttagatcatgtctcaatggaaacactcttctttcttagccttacttgaatcttgcctataataaagtagagcaacacacattgaaagcttctgatcaacggtcctgaaattttcatcttgaatgtctttgtattaaactgaattttcttttaagctaacaaagatcataattttcaatgattagccgtgtaactcctgcaatgaatgtttatgtgattgaagcaaatgtgaatcgtattattttaaaaagtggcagagtgacttaactgatcatgcatgatccctcatccctgaaattgagtttatgtagtcattttacttattttattcattagctaactttgtctatgtatatttctagatattgattagtgtaatcgattataaaggatatttatcaaatccagggattgcattttgaaattataattattttctttgctgaagtattcattgtaaaacatacaaaataaacatattttaaaacatttgcattttaccaccagtaactgttggatcagcttattttgggctctcctttccttctcagattatcaacaaacatttattgagcatttacctcaggggccacaaagagaataagatgctggttccgcactcaaggaactcggtttaggggcaagacagatagggaaacattttctcgttgtttcagtaaatccttgagtgcctaccccgcaccaggtgctgttttccaggcacaagagcgaacaacggacaaacccctgcttttaagctcttacattctagaggggaaacacctcatacatgtagtaaaagtagagtgtttggaaggaaaataatgtggagtgaaactgctgaagcggagttgtaggtgttctagatggggttgtcaaggaaggccttaagggagagcctctctggatcaattttctcattgtaaaatgaggacaataattgtacttatctcagggttttgatgagcatcgagggagagaaaacgcgtagaaagtgagagtattacggggataagagacttctaggcagagggcagggaaaacacaaaggccgtgaggcaagagtgggctcagagcggatgcagatttactaggaggccggtgactatggctgtggtgggggtcccagagtgccttttggccaggccaaggactttaggttctgttctggggtggggaatgtcaggaaggatttgaaaagaagagtgacatcaacttgttctaagagaatcactctggctcctttgttaagacgacatagcagtccaaagtggggaagcaggccagcgggctggctttgtgacatcctggagggtagagacaacagaatagaacagcacgctacatactgcactggtgcttagatggatttctgcggcataagggtagaagtggagggggcaccttactcaactcggagggtcagggaaggcttcctggaagaggagataaacccctggaggttaagaaaagtgagctaggcaaactgagcaaatacagaagcagagtcatacaggcctgaaggacgccatgagccaatttcctgttcctggaggcgcagggcaagggaaggaattggcccgctggaggttaatggccaatactgagcacttctgagggctcagtgctgtgttagggatgttttatctcctttgatcagaaacaaaaccctgagataggtacaattgttatcctcattttgcggatgggaaaatagacttcgagatactgacttggcgagggtcacacaactagatgatgtgctgggtcccccagtcctggactccggaggccccctgaacgacctaggcacacttgtggcttccgtgaatttaagtgcacacagcccccgcctggccctgtgctggggaagggcaggtgggaggaggaagggaaggcaggtttttctttacaaatggtacctatttggtagtcaacaaaaggaactggatttgccccaacactggaagaaaaaaaaaaacaacctgttgggctgagggatagtgcactgtgcccagggccctatacttggtttgatgctctggtgttactctcttgaaattctcagtaacatgaataaggggcaccgcatttgacattttccctgggctgagaccatgatgcagccggcctgactgcgcaacaccatgcacactggaattcgtgggccatcggagggattttcgagggtaatgaccaggggtagggcgcggcagaagcgcagggtgaggttgcggacggcctcactcacaacctttccgggtcttcgcattaggtactgtgatgacgggttccgatagtgaccccttggggcctggagacggcccggctccccaaaggtgcggagcagggcaagcagggttgggaggacgtggcccgtgggagagctgcgctcgccggaacagtgggcgcgcaagggccccgaggcgctgtgacacgggacgtcgggcgcgcgggcctggggcgggaactgcgggtgcgcgcggcccggggcggggctcgccgcccggctcctcctccacgcgcggcctggcggcggcggccactctaaccagcgcaaaatgtccctggaacaggaggaggaaacgcaacctgggcggctcctaggacgcagagacgccgtccccgccttcattgagcccaacgtgcgcttctggatcaccgagcgccaagtacggcccgggcccggcgcgactaggggcagggagggggcgggccgggccgcgtggagtcgggctgacccgggtgaccttggccaggccacgtgggcgccccctgtctccgtttcctcctctcggagttgtgccgggaacgcgcaccaccggccttcaccccttagggcgcggcaggggacgcaggggaaatcgaagctgccagatgcccacgaccacaacgtcaccctccagattgccctctcggaggggcccagtccgcgcaggtggctgctccctactgcctgagctgtggctgagcagcagattggggagaaacaggctctcgcaccttggtaagctcagccactttcggtgagacccccgaggctttgggaagccacccttgggcaggacataagcaggacttatctccctgcagcgtctagggcagcaccgtccaatagaaatatgatgtgagccttacaggtaattaaacattttctagtagccacattaaacaagataaaaacagctgaaatttttaacaatacagtacatttagcctagcaggtgcaaaatattaacatttcaacatgtaatcagtaaaaaacattgctgagatattttactcgcttttttggtacagagtgttccaaatccggcgtctgttaccttcacagcacatctgggttcagccgcatgtggcgaattggagagcagggctttagggggttctctttgaggcctctcctaaagtggggtccagccctgttttttttttaggtggggaaattgagaaggggcggtgagctcaggttgctccagcagagccaaggcttaaagccagaaccactacaaagtttagagtttgctggagcaaacctctttttccccagtgtgaccccagctgcaccattgagcccttaatggggcgtccatcctttgtcactggagtgaagccttatagcaagcagagagtgaggccacagactcttgagatattctaggccattgcttcgaggtcgtatgtgagatatgaacgtaagaccatttgaaccccc

SEQ ID NO: 4867 - DNA, 6000 bp, Homo sapiens
tgggcaacataatgagacccctgtctctacaaaaaatacaaaaattagctgggcatggtggtgcatgcctatagtcccagctactcaggaggctgaggtgggaagcttgcgtgagctcaggagttggaggctgcagtgagctgtgattgtgccactgccctccagtctgggtgacagagaaagatcctgtctcaaaaaaccgaaccaaaccaaaacaaaaacaattaagtgccgggtgcggtggctcacgcctgtaatcccagcactttgggaggcaggtggatcacttggtgaaatgccatctctactaaaaatataaaaaaattagccgggcgtggtggcaggcgcttgtagtcccagctacttgggaggctgaggcaggagaatcacttgaacccaggaggcagaggttgtagtgagccaagatcacgctactgcactctggatgacagagcaagactccatctcaaaaaaaaccaaaaaacaaaaacaaaaacaaaggcaaaaacaaaacaaccaaaaaaacccgaacaaataaaaaaacaaaaacaaagaaaaactaagtgcttgtcacgtcctaactcatttcatcctcttagtgatcctattaaagatctaggagaggccgggtgcggtggctcacgcctgtaatcccagcactttgggaggccgaggcgggtggatcacgaggtcagcagttcaagaccagcttggccaagatggtgaaaccccatctctactaaaaatacaaaaaattagctgggcgcggtggcaggcacctgtagtcccagctactcaggaggctgaggaaggagaatcatttgaaccctgagggtggaggctgcagtgagccgagatcgtgccactgcattccagcctgggtgacagagtgaaactctgtctcaaaaaaaaaaaagaaaaaaaaaatccaggaaataagaaccattattttccccattttacagctgagaaaatggaaaactcagataactcaagcaactggcctgaggtaacacagcgtttgtttgtttgtttgtttgttttttttgagacggagtttctctcttgttacccaggcgggagtgcaatggcacgatctcggctcaccgcaacctctgcctcctaggttcaagtgattctcccggctcagcctcctgagtagctgagattacaggcatgtacgaccatgcccagctaattttgtatttttagtagagacggggtttctccatgttggtcaggctggtcttgaactcctgacctcaggtgatccacttgcctcggcctcccaaagtgctgggattacaggtgtgagccaccatgccaggcctttttttgttgttttttgagagggaatcttgctctgtcacccaggctggagtgcagtggggcgatctcagctcactgcaacctcagcctcctgggttcaagcgattcacatgccttagcttccagagtatgtgggattacaggcatgcgccaccacaagcggccaatttttgtgtttttagtggagacggcatttcaccatgttggtcagcctggtctcgacttcctgccttcaagtgatccgcctgcctcggcctcccaaagtgctggaattacaggcgtgagccactgcgcccggccacaggtcacaaagctattgagtaaagaaagctgcatccagcctctcaccttaagaaagccattcccctttgcctcaaagtgaggctatacttccagaaggactttgtctccggggaagccttggctttggaattcaggcccagttctaagtttaaaatcattgatgctgttcagtagtgggatcaatgattttgcttcacttaaatgccacaagctccctgaagatgggctggagctgtcacagcatccagcccctccccttacccagaagtaaatactcttatcatagtcctccgactattctatatccttccatttgagtgcttcttttatgccgagggcactattgagatgtagcttagagaatgaaattcctggtgttgcagggagctcagatccacccgggaaggttcatgagcacttcatgtcagcagcctttatttcatctaacgtttccatagagtgaaggaacagccacccattacaaaacaaattattaaaagaaaaattccaaatcttcaaaggagagaggcccatggtagtgagcgctcccacccccttctcctttctcttcccatcaccaacgggctagcagcacaatttgtttcttgaaacttttgggggcatcggagttctggtgtcctcatttttcttccttcccattgatgtatcattactagagtgaaaaaagaagggcgtctcgagggcttttgaaaaaaaaaaagggtgactactcaagacattttgtaaaggggggaaaattgcgaagaaaagagacctcagtagggggtggaggaactgtgaatgtgtccttgtctggcggttctttcagctgaaacctggtgctggcgttcgcagttcagttcaaactgtcacctttagttcttactggcttttctgcccttgccccagaacctcaacagattggggcttatttacctattcacactccgccgtggaagctcattaataggctttattagcaacaccattcatgggaggccattgacgaaaggggttccagccacttgaagagggaagagaaaagaaaaaactgtaaagagattattttctcattcagaagcctcagtggtgtgaaggttttcctggatggtctgaggtcacttgaagactaaatatggggacataattgattttttaaaaataattctaaacatacttcccccccctcctcaaaactgaagagtttcctgttgtggtcttgtgggtttcagtcccttatatatgagccctctttagggaataaggagcttttgatagattggtgtcttttcatttctataaaaaatacattctgcaaactgtgcctggacatgaaagtaggtgttcttatttgtcattttcagcggaaagcttcctttccattcaacatgcataaagctattgatgaatgggggatagggacagcggcttcctgcaccattaatttatgtgagaatgtgttaacagcattttcaatggctgatggatgcggtgtaggatgggaaaggaactgtcctgagacactcgagtttcccattggtggggaatataaagatgtaagtggcaacctgcgagcaggcagacacgttcagctgcatcccttttctgagaacttgaaaacatactgctatcagaacaacccgtgtgggagtgaatggctaagtgtcaacctgggctgaggtgtccgttaatgtataggctctggggctaatccaggttagaggacttgaccaaaaacataccctcccaccaagcatatagagggataattttgcttaagaaccagtttttattttgttgctatcaaatttccaaaatacaatgttatagccttttgcctgaggcagttaaatggatttcttacttgtgtggcttttaaataacttgcataaacgttttctgtgctatatttgtgaataaaaatgattttctaatcatgtagcaccttgaaaaatatttttgtaaatgttatgaagggtgcaatgttagtgacacaggtgcaaatatgtttctaaatccaggaaaagtctgttttccaagtcaggtttgttctcaatgcttcatctatcttcaggcctcaaaaggattctaaagcatttctgggtttagtgaccttttctaaagaaaaataattaaggttttaatctatatggtcttgaacttaagcacggctgctcaggagctggatgaataaggagggagaaaaagcatatttaaaataaattattccgaagacacggcttagtgaaaaggtaaatggacataggaactttaaccagttacagcttggtgtgcagttgaagaatcagattttgcatttatgatttttaatctaagattcagagggaggaattactttgttcaaggtctatttatggtagagttgtctttagactcctttgaatttctttttattaatccaaacatatattattaaacactttttttttttgatgcaattttggctttttctgagagagccacattcaaagtcaggctgtcctagtagccagctgtgtggtcctaggcaaattacttaacctctctgatcctgtttccttatcagaaactgggaatagtactctgcagggtggttgggcagatgaaatagaatcacctatgtagtgtgaccctcccatagtagggcctccattaatattcagttttttcctctcatttctattgtttagaaggacagaaacatgcaatgtcctgcgaacatttccaagtggcttcctctcctccaaaagcttcagctgcctggcaaccctccccgcagtatcaagcaggcgcattttaaagtctctttagcgggagggcagggttagagccttcggtcatttgttttctaacttgacataaaacaacgtaacgcagtcgctcagcgagccgttggccagcctcgctcgcccggggaggagggaggaggtggcgcggggcgcgggaccaggccttattcggaggctgtcgctgcatccctacggccgcatcgcggccgagccctcgcctcccgggccggtgtctccggctgctcggaggcgtcgggagccgcgcgggactcggggcggcccgggcgcgcggcgctgattggcagagagggcgccgccgtccaggaaacggctcgggtttcagtgggggcgtgacccgccgcgaggaggcgggggcggcggcggcggcgcgggcggcggctggaggagagcgcggtggagagccgagcgggcgggcggcgggtgcggagcgggcgagggagcgcgcgcggccgccacaaagctcgggcgccgcggggctgcatgcggcgtacctggcccggcgcggcgactgctctccgggctggcgggggccggccgcgagccccgggggccccgaggccgcagcttgcctgcgcgctctgagccttcgcaactcgcgagcaaagtttggtggaggcaacgccaagcctgagtcctttcttcctctcgttccccaaatccgagggcagcccgcgggcgtcatgcccgcgctcctccgcagcctggggtacgcgtgaagcccgggaggcttggcgccggcgaagacccaaggaccactcttctgcgtttggagttgctccccgcaaccccgggctcgtcgctttctccatcccgacccacgcggggcgcggggacaacacaggtcgcggaggagcgttgccattcaaggtaatcgccgcgcaagacgcctcggggagcttcgccagccggggacgtgggcgccacgggagcccgggacgccgggtgcaccgtcctccgggcggggggcgcggaaggactagcattgtggaggacgctccgtgtcctccctctgtggctgcataggtgatgggggaggtgggtgcgtgctgacggccggcgttctggaagttctgcctctgctacccccatccagatgctgacatctgcttctggcgttgacgcccccctccctgtcaaaccctggcgggcgcattcccgctgactgggcgcgtttctccgaccccagagcagacgggcggaaggttcgcctgcccgtggcacagccccgcaggccggttcccggggtcatctccgaggtgccccatccgtgtgtcctgggaacttccgtaccatccaggccctgcggagacccctttttcgggagggggccgctggggtggggccggtgacatcccgtaggggtggcgatggccaggggtggcactgctggggaggcgacggctccggtgcctgggcgcccctcgcccgcagccgccgtcggcgctggagggagcgcagtgcgcctggggctagggggcgaactggaccgactttttctagttcgcctgcctgctctgccgcagcggctgggagatgtcgaaagcgcaggcgagttcta

SEQ ID NO: 4868 - DNA, 6000 bp, Homo sapiens
ccatctcaaaaaataagtgaagtagcattcaaagctctcactatgacctagctgaaatctactttaaacttcccctattccccttctgcttcagagaaatgaactactactcatttctcagctacatccaattcttttagcattgaagattttattcagcctattttttgtctgaattggccttcttccaaatttacttgcctaatcctgtcctttaaaggcctagataaaaataccacttcctttagtgagcctttcctaatcttcttcatccctccccatttatatgtcctagaatgtaaatccttaaagacaaattataaactgatatctttgcatcatgaaatgtacccaaactagtgccttgttcactaagaaggtgcttaataaatacttgctgaatgaatgtgtgaatgaattcatgaaaaagtgtgaagatttgtagtcaaaatattttgtaggagggcaagtctatgaaatgttattttttacacaagtaaataaagataacagttaaatcaattacaaaatttcaaagaaaaaatttacatcactacatgtatttataaaaagccattacttataatttttaatggtatctggaaagtcatccatttctacttacccactgctgaaacctaaccatattaatcaattgctgagctccaggagataactttgaccccatggactccattatggtttggatcctgtctagttctattcttgattttacagcaggagagcctgttgaataatttgctgaaactgctctcatgtgtatcacaactttactgatgaacacacactgtctttcaccaaaggagcgcaactattacaatacaaagttcaggaaaataaataataatattaaacaatattcactatttaaggtcactcctttgtattatcaacaagagtaaagtattcaggaaaacaaatataaactttaaatatattttcaagttttccctaatacagtaatggtcagaggtttcaatttattatgaaactcagaagaacaatttatataagacaatgtcattttcaaactaaaaaaatatactaaatatatgaaagaaggtaaaattaaagtttcatttatttaagcaactcagaatagactatgccaatctgagactttaacacacagctgcttactataatattctttaatacaaaataagggtgttcagaagcccatccaaagtgtttactgaattactaaatataaatgagccatttagaattataaggcagggtcaagatggtctcacgtaacccactggtttacacatttaaaaagatgaagttagaggtaattttctaacttgtcaaaggattacccaattagtaaaagtcaggcttagaacctagctctcctggctgttataacagtgccctctccaatgctttatgctgcctctcttcattcatgtttatgaaccaaaagacatttcatgtgtggcaccaaaaacagtatcaaaatggaaaggaaacaggatttagaatgagataaaccagagttcagttatgagtctgctctgtatagcctgtatgatcctggacaaatgccaaaacacaaatcagaattaacatgagggaggatcatatcagtgatttcacatggtggttgggattatgtgctaaaatttccaatgagtaagtatttgaaaatattcatcagtaactatttttgtaactttcatattctgctgcctcagaataagctttagtaggcttgggattttcctaaatgaaatgaccctttgcactcacatatacttccatagaatagttacaaaaaatactcatcttcagagagacacacagaaccatatgtaacccaaagacacaggtcaattcagacccatggcaccaaagatgtgaccatccttcacaattaagaaaacactgttaaatttaaacagtcgcctctcatcctctctcttatcccctttctgcttcttaatccttatagcctttctcaccaccaaacaaaacacaattttattcagagtgtgctcattacctgtctcatcccatttgaatataagcaacacaagggtagttgctccattttattactgctgcttcctaaatgcctactacagtctgtatctggtatcagtaggcactcaaatatttgttgaataaatcactttatttaaatgactttggaagcgattaatatatactacctaaaacaatgtcttggaacaatctgatctgtaagtttgttacttgcctgctataaaaatcattaactttttccttattctttttatttttttctcttttttgagacagagtctccttatgccacccaggctggtctcaaactcctgggctcaagggatcaccctgcctcggcctcccaaagtgctaggattacaggcatgagccaccatgcccggccaactttttccttaaagtaagtctcacaaccctgtataatgtggagacaaaaagaatacaatgctttattttctttagtcttctaatttacccatgaggtaggtccaaagaaatgtagagattttcccaaggtcactcaggcagtaactaacagaactgcattaataccttgggctatttgtagctcagtactcttaactctgatgacatcactaaagttcacctcaacaatatttttcatattcagggtaccagtccaaatagcttttaggtgcttttctctgcaacttctctaattcttgtctttttaaacataatggggacaaaacgtggttttcttggcaccatagtttcatataaagataaacaaggactaagttggactaactgtatgaacaaaccaacagtacataagtatattatacatacatttgcaattgtcaaattagttaaaatttagtgatgacctacctttattttacaggcatgagtggaggatgccaatattaagtaatttttgtagaaaataatttcgcgtttactgaaaatagaataaaaattattttttcacttatataaattatcagtttaaacagctgcagtaaaaaaaaattgtttccaggccattacttaaatcctgagattcagtttgcctggtaggggacaaacagttgagatcccttctcaagtgacctggtcaataaccctgtgtcgtgtatttattatttccaatatgcacaatatgtaaaatagttgacgttttgatttatattaaggcgcgattagtgtagaatgttcctataagggactagggaaaagatcaaactataacacattgaatatggactaaataggctggtgtggcaccaccttgggcttgtaggttccttaaaaaatatgtgatcaaagtttcagactgactgtcaaattaatttctggaaaacagaccattgtgagtttatggagagagtcaagaagcagcaataaggactgcactcttgcctggacactttaactagtatgaccctctccaggctcacctctcctttattagctctaaatttctgcattcctaaaaatgaggaagctgaactagattgcctagaagatgctttaatggtctaaccttctatgccatagtaggtttttatcttctcttctctaatgtaaacatcaatgtcagagagtcaatcaatattgcaaaaggtgaacagaataaagacaccaattcaggagaacactttcccgtgtacaagtcacacaactgtcatccaagacagtacaaacattcttgcccctactggttccacagtactcctctcctaagtacacttccatatttcttgctgaacttaaaatgccaatagaagcgatttcttcacctccatcagggccacacctcaggtaaaggaagcaggggttttcatcttggttgttcaatcttctcttctaaatcaccagattctggctgagaagaaaacaggtgaaaacatcacacagtatagtttctgaacatggctcaaaacccacttgttaggccatgaggtttattctaacaaatgctcaacacagaattcataaggaaatggaggcatcacacatcagggcttccccctctattttttcctcaatcatcaacgttctactcagtcccctgcaattgattctcggatacattactggacacctactgtgtgcacaggagtaggagcagaacacaatagaagacaaagtgtatctttttcgaaattaagtcgacggcggtcgtctatagctggactttttacacagcctgttttggtggagaggaggtggcttgtttgagggtagatgggcggactgactttgatagcagccctgacgacccgtcacgcctgacggggacgtttatgaaattccaagtcctggtcaccttcccccgctcatgcctcggggcctcgggtacttcccggccagacctaccccgcctccgcccaccccggtcctcgcctccacctcgcagccccgctcccccgcagagacccgacaccaactgctctcctggatcccggactcagaccctcacgttccccgaggagcgcggcagtcgccgagcgcagcgacccggtcgccggcggcccggcgcaccgtggcgcaggtggcgccagaagctcctcccagtcgaagtcgcgggcgcagacacgagcccgggtgaggaggctgtgagttagggccccgcctgcggcatcccaggaagaggcaagcgtggggcggcgggtgaggcccccgtcctcggaccgcgtgtccactgcgccgcctcctgccaggcctctcttccagtgcttaagtgtcggccagtgcagcgcagaaacgggcaggcagagcgactcccggcttacatcatttcaaatgcccgccgcttctggatttggtgagaacctgcaccagagaaacgcatgcgcataagccaactggactcgagaggcgttcaaactttgctcaggaagcgctaaagagcggagcatgcgcactggcaggccctcgctcagcctttggagaccatgcgcaggcgcggtgcactgtgcgcgggcaccacggcggtttttcgacgctggcggtggacgcaggcagcatggaccacggttgctgggcggatggggagcgtctatggtcaggtaggtgtcgtctcttcgctctacgcgatgtgcaggaccgactcctgacctcgttctttcccgagtggacgccagggccttttctgcctccactccgtcgggtctgcagcatttgtggcagcgaacgcggcggaagcgctgtccattcgggttaattttactccgaactctccctgcctctctcatacacattctcgcgttagaggggagttgaggtagatattgaacggcgttagtggtggacgctgggccacacgggccttccccaggtgccatctcatttgatgctccctgatcctacggcgttgccaggactatgctggatgccctcgtgacagaaatcagaaggttgagaaagatcccaggtgtttggatggagcggtcgcctgagggagttttccagatgccccatggaataggaagtagatcttgcctctttcttccttttgtactccagatgcattctaagttgtgtacaccagacttcctgttctttatgcccagcccattgtagtcataagttaactttgatacatgtcatcataattggacagtctaaaggaaaataggctttttagaattacctatctgaaacttcatgagcaagatcaatactataagctggattttgacttccttaaataaggcagaaagcctacagcattttgtcgtctcccctttctttcaatctcgtatgttcagtattatcacccagtcttgttttatttttggtttttaaagaaaaacttccctgtctttctccatctctgcctctctgttttgaaatactagctttcatcggaacaattccaggagtttctttactggttgatagtcattatctcctcacctgcgtttcattttctgcactgccctctaatcttttatcaattgtcctgatgcttgatgctttctgactgaatcacca

SEQ ID NO: 4869 - DNA, 6000 bp, Homo sapiens
tgttgaatgggttgtagatcttatgacagaagcaagtaagtgagaacgctaccagctgtaaactttatcttattggcgaaatgtctattatgcagctaaaaacatctacttaataggtgctgtccttcaacagttggtagcaacagagtcttacgtggtgataacaatgacattatgtctcttttatcacctgtaggttctttgtattgtcaattactggctgcgtattccttccggcctcagaggctgtaggataaacaggttgcaccattatgatgatgtggtcatccctggaggcactgggggtctgcatctgattttccttcggaggcttctgcctgtattttaggatccccagtcttcatcaggacatagtgaaaatcatatgaagctaacgaagtctgacggatgagtaagtgctaatcaagccaggtgattccaactgggtcattcgtaaacatttacaggctctgagctaggggaggggcatgcagagacatacaggactccgttcctctggaatagagttctgaaatcttaaagctgcagcagcacttttggaacaagcgaaccgcccctcagggggaccctgtaagagcagacggcgctcgtgaatatacaagtctggacattggtttaaaacaagccccattccttttttcactgaaggtttgatgcagagccgaagtctgctgttctaaggaaccactagttgttattgtcctaaatccggtagaggttttggatggggtgtaggaaattttcacaagaacccaaatttcacgtggatttgtgatggattagcataccaaaatgggcttaaagtgcacttaatggatgcattactgcagaagggagccgcctaaccagagcattgctaaatttatgaaattgaaatgcacttcaggttattgagcagtctaaatttgtcaaagtcacagagtgggaggcaggtcgttactggtggcagaggtggcagaaatctgaagccaaggctgccaaaatgaatttgaagtcctccgcaatgaccccaagggctccctcacacccaggtgcagcccttttcagtggcaggagcaggacctggggctcctgagcctcagtgtttactgagcccctcctagcatgcaggaggcagagagtgacaaggtgtgtccgttctttgccctgccccacagcgcttccctaatgggtctgcccactatgaatttgaattcatgggcactggtgcacactcatggaataggcatggccttttgtctttgagtgtttggtttgtaagcctcagtctcccggcctgaaaaatagggataagtaatactggcctcataggcatgggaaagtgcttagcacagtgcttgtcacaaggtgggactttgaaggtccctttcttcaggagggggctgagtcttagtgaccttagtggttcccacattcagccctgtgagtggcacacagcaggtgttcagagagtgtctgctgaatgaatgaatgaatgagtgagtgagtgaatgtgattttaaggattgtggcaagtccctgacattccaggttgctggtgtccttgtagcatctcttacagaatctttattcaagttatacttattcatggattcaacctcattacgtaattgcatgttaacaaacattcaattatgtgactatcatgggtaaaactacttgcaataataatgattactaataagaactactattttcaactcttactgtgtcctaggaattgtgctgagtatttttaaaatactttgtcttcagtcttgacactagcccactgaggccatgtatcagccagctacagccacaacaatgctgtgtaacaaaacactttgcaacattcagtggcttgcaacaataagcattttccctgccttgctcatgttctgtaggttgcctaaagcagctctgagtcctgctgtatgtggagtgacatggctccagacagcgaatcaagttcaggtttcttccttgtgtgttcattctgaagcctctctggaagaggcagcaacatgttcgtctcatggtggaccaccagagcagaggaaagcaggtctggccctgcaagcacattccaagcctctgatccagttatattccccattatctcattgtctaaagcaagtccaaagtcaaggaatggggaagtacagtccctgcactggaaggctgtgacaaggatgcagacgtgtgataaccaccacgggagagtgaggagttgggatcaacagctcaattgactgctcgtaggtgctaccagaagcctcaaactgaggcatggaaagaagtgacttgcccagggttgctcagctagtgggtggcagaagtagaatttgaacccaggcaatttaaatccacagttgtgggggcctagagtgcacacacgggaagcggggatttattttctgaaagtatctgcatttttttttcttttttctttttttgagagggtgtctcactctgtcacccaggctggggtgcagtggtgtgatctcggctcacggcaacctctgcctcccgggaatctacgggcttgcgccaccacgcctagctaatttttgtatttttagtggagacggggtttcaccatgttggccaggcttgtctcgaactcctgaccttaagtgatccacccgcctcggcctcccaaagtgttgtgattacaggcgtgagctaccgtgcttggccggtatctgcatttttttcagccgtgacttgctaataccatgttggtatcaacctctcttgcagttacacatttatttgtctatccttccacccatccacagggacctggcatttgggtgttctttcaattctctgcagtaacaggctcaagtgcaattcttgggtaattttttgaaattaaggttgaaaggaaaaaaatcaccttctagttaatctcaggcacgtgtataaatacctttggaaagtccctggtggaattcatatcaaagcggcaccgtgatttttacttaaaaacaattttgctccatgtcaaccgtggtttctgacacctgaatttgaaagtgatctgggtgggcccagcgccatctccataacggagttatgtgtttacttggagggaggagaggaaaggcattattccctggcagtatgtgtggccctggaataatgttccacacacccttacagaaggggatttcctccttgctgtttccacagacccttccctgtgtttgtttaaacccgttgcacactggtctgacagctgcctggcccagggccttccttgcagacgcatgtacaaccaaccctctttaacagcaacctgctctgtgtcccctgatgcaattactcgagtatataaacctcactgaaaggcaggcttttcttgggagctaataaataagccccaaagccacaacgtgtgtgagaccttgaaaaatggcatcatcatctattgggaattgtgaaccctgcaaaaagcagctcgttgtattttcagaaataggtttttgtttaaaaaaaaaataaagaacaaaaatcactaagtggagtctatatggaaaaagcaatctagtctgagattctaaggcaagtctctttgctgcattcatctttcttcgcagattttatgtaagaggcattatttgcaggaaaacaagacaggattttaaagaactcccctctcatcccggtttcccatctgcagttataatcctctgatggtgacctctgcattagttgccatgggtgctgagcagaagtttatgacctcagggtggactgtagcttcaggggggcgagatgaagcctccggcaataaagagataatggggagaagccactgtcaggaatgacccttcggtggcatgtagtctacagttaacggagcactttcatttccacttctggttgcttcgaggaagagggtgctggactctggccacggggacacaggccggcaagagactgcagattctttttgtcccttggacctcagtttcctgagaggctgggcttggtgctccaagcgccctctgagcgaatctgccagaatttcatgtgtcttttctttaactgatggcatcttcagcccagagtcagtggagtcggccactggtgccgctttcttgccctcgggctgtccaggtggttccctggggcagccgactccaggccactgcggcaggccgtggcgatcggggtcctgcagagctttacctcccccgcggaagcaaaacacgccgggccaaagagccgggccagccttcccgggatgcaaaaatacaacagagggcgccgaactcaccagcgctgtggccttgaatattaatgtacgggctggctccagaccgccaagttccttaaagatgtctctggcggccgggcgcggtggcttacgcctgtaatcccagcactttgggttgggggggcggacggatcatctgaggtcgggagttcgagaccagcctgaccaacatggagaaaccccgtctgtactaaaaatataaaattagcctattttgcgtggtggcgcatgcctgtaatcccggctactcgggaggctgaggcaggagactctcttgaacccgggaggctgaggcaggagactctcttgaacccgggaggcggaagttgcagtgagccgagatcgcgccattgcattccagcctgggcaacaagagcgaaactctgtctttaaaaaaaagaagtatctggcaaggtgtcactgccagatttcaggggtttcgatgtgcttttatttggaatcaccgcaacacacaagcagtgttgactcggagggggagggggcaggggccaaacccaccgctcggcgcacacgccttgatctcacattccagactggagctgatgtgtgtcagcgcgacatggggcggggggagggttctcctcggatgtttcattcgccgtctgcacgtcactcccaaacttttcctcccagcgctcggggagtcaggttgacgcgccctggatgcggggctagaggctcggggctgggcgcgctcccgcggagccggagccgcagaggctcccgggctggactcaggcttctcaggtacaagttaggtgccagacgccgaggtggggtcggcgaggagcggcggtaggaggtctggccctgggctcggggctccggcgcccctccgcgggttcgggccaggcagcgccggcggcggccggggctgggcgtagggagtccgggccggcggaggcggcgcgcagcctcactccccgcggcgctcccggcgcggtggtggcggtggcggtggcggcggcggcccaggcagacaatgaacttgcgagctcgacgagccgaggcaggtttgggccccgggctccttggcccggcctccccgaggcttcagcgatccccagcgggaggagtcccttcgccattggtcctggccgcgctccgggcgccctgcgcgcttgaggaccccgcgggaagggttacccagcggcgacacacgccccctccctcgcagagaggacgcggccggagcgaggggacaggggaccgagcagtggcgtggtggcgccgtggatagccggaggccggcggggggcgcaagccgcgtggaacgcaccggcgggctgtccgggagaaggagcccagtagtcggaatcggggcgcccctgcaccgcccagctctgggagccgcaggcgggggaccgaccgacggacagaccagtgctttcacggtgtgagcgcgcgtcgtttggcggtaggggacggggattccccccagccttgcgctccgcccccacacccctatcgcactttggggaagtttccaggcgcggcccggggcaggtaagtgggcatccgccactctctccccggttgcgagctcggatgcgcttccagaaccctggctctagccttgcggcggttccgggcggggaggccagagctctcccgcgcctaagcccgtgggacccggttcagggaagggggatggcgggggcgggcctgggaagagataggggagcggc

SEQ ID NO: 4870 - DNA, 6000 bp, Homo sapiens
aggagctaagctatgagtgtgcaaaggcacacagagtggtataatggtctatggagactcagaaggggaaggatgggaggggcatcagggataacatatactacttgggtcccaggtgcactaaaatctcagaattcaccaccatataattcatccatgtaaccaaaaaccacttgtaccacaaaagttattgaaataaaaaaaaaagagtcactaagcccagcccacatgaaaagggaagatgattaagccctcttttttttttttttttttttgagacgtagtctcgctctgttgcccagactggagctggagtgcagtggcacgatctcggctcactgcaagctccgcctcccgggttcacaccattctcctacctcaacctcccgagtagctgggactacagacgcccgccaccacccccggctaattttttgtatttttagtagagacggggtttcaccgtgttggccaggatggtctcgatctcctaacctcgcgatccgcccacctcgacctcccaaagtgctgggattacaggcgtgagccaccgcacccggccagccctatttcttaaatgaagtatcctcaaatgtttggtcattcttgtcatagttcatgtttgtttttgagattccccttttcctttcgctgtgtgctggctttgcactcagcctgcccccgctgatggcgggagagataagcacctggtctaggaggctgtctcagcagctgctgctgctccaggaggtgtctgtttctcttagtactgtcagtcacttggggtacgtaaaatggaatctgggggtgtgtagggaggggcataataagtttcccatcacagtacagtcatgagtcaccaaatgacattttggtcaatcacgtggtacgcacttgagcacttgtaaggatgctcccataaaattataatggagcttctctatccgggtgtaccattttttaaaatcttttccactgtatttttactgtacctttctgcctttttgctgtaccattccctacagtattcagtggagtcatgtgccatacaggttcgtagcctaggagcaacaggttataccataaaacctagatgtgtagtaggcggtaccacctagatgtgtgagtacactctgtgatgttcacacagcgacaaaactgcctaatgatgcatttcttagaatgtatctttgttaagtgaagtatgactgtcacttggttggagaagttgactggtcagtgggtaggtgacatagatgaatatagatggggtgacctttcctgtctcttgtgacacagcgcatccccgagttccttgtccccagccccaggagcattctttctttggcgtttagtgctacttaagtgctaattctgtgcaataatgaaagcatcagagacaagagggtttaatctgcccagaagaggttcactgggggcaggtttctgaggaggtgaaggcatggattcttgaagtgagagatctaggaaaagaaaaatggactacatgttattataatacgccgagaggagcaggagttttcatctctccaagagatagaataaaaatgatttccaagaatcttaatcttggggtgatcacatttgtttacgtttggagtaagccttgggaactgtgcttggagagaggaaagctgttctgcaagcctgtgtctgaagttctgtcaataggtcactctgcaaggaggccggctcttcacttactgcagaaattagcagtggctgcctgtaaattcctggcttaggaaagtttgtctccgtttttcatctgcttgtactcagagcagattgagcttacatgagcttgggtaagaaataagtgccctgttcgttgtgaatgcccaggctgttaaacgaaaatagcacacaggaaacagtattgcaaaggtcaattcttccagaaaggaagggacaaccagccatctatctgaaattttcgtgtgtagatcctggcctctgaccccacaccattacctaacaatccagtattgaatgtgatgtcggcttccatttcctgtgaatgaggaggcagaatttccatccaaagacagaccatctgccagacgcaggatttgctctttgccttagctggctgttattgatgtctatgaaggctttgtggagacagtgtcagcccaggccgcttgcttcacagagatggtgaattacagggttgaaatccagagcttgcagccaggattttatttttcttcatttttcctctgcaatggctgttttctttcgttcagtcagaaacaaatcaaggacagtcttggggcacatttagttctttggaggaagctttgcaacatccaggtttaaaagaaattggacttttacagtcaacattaacaattgaatatgaaagagcgaaaataaattgatcattaagagaaaatgtatacaaggcccccagcccagtgcacagcacatgttaggtccattgtgaataaaccatttaaccagtcagaaggatccgagaggccagtggctgggctcatctgcaagcaaatctggccctttgagctggaagaaaacaatttttaattctcttgcgtcgatgtgtctgaagttctatgggccacaagtatcaggatcacctaagtacttgctaaaacttgtccttcccagacctttctaatgagaatctccagtgcaaacgccagaggaattgaattcttaacagacatcccagggatcaggtgggttgggagacattgcattatttcacctggtgctcacaaccacctgggaggtttgtattttaccttcacttaacagctgctaaaactgaaggttggaactcagccttaaagaaacaggctttatctttaacagatctgaggttgggctctgacctacttcactgtgtggtggtgggaaagctacatctctatgctgcagtttcctcatctgtatattcaggacttaaaaaatgaaataatgcaggtgaaagacgttagcacaatactccgattatacgaggtatgtaatgaattatgaagtagtaaatagtctgttttcgtgctgctgataaagacatacacaagactgggtaaaattatacaggaaaaacgtttaatggacctacatttccacatggctagggcagaagacatgaaggggcaagtcatgtcttacatggatggtagcaggcagaaagtgagagagagcttgtggaggggaactcctctttttaaaaccatcagatcttttgagacttatccactaccatgagaacagcacaggaaagacctgcccccatgattcaattacctcccaccaggtccctcccacaacacatgggaattcaagatgagatttgggtggggacacagccaaaccatatcagtaaacaagcctaatcattattaactaggttaagtaactagctcacactgtccaataatgatgatttatcagtttgatcagaaagaaaagtctttgaaggcaagaggctttctcgtttagtttcccaagttctaacatagggttgctcatgtagattgactgaatgaatgaacaaaagaagtacactgcaacgctggttggtagtacggttagatatgacacagggcttgaaccaggcctggtttccagatctggtactgagatatggcagcattgggaagggggctggagagcctgtgcttcccactaaggttttttaaaaagaaagtcctgcaccttgttaggaggatcgacctgggttttgggaacactgcaaaacctgccgtgggagggaactcctgagaaaactcctctgcagtgggaagagatggtatggaaggcagcttcctcaaatgctggataaccgcctcctaggagtgggtgctccgtcaggaatcggtgcgaggtcgcaggaccaggatggaatttctgcaggtggtcctaggtctgagcagcacagtagaatcacctgaggctttgaaaactattgagctccacgcattgtgggaaactgagttaactggtgtctggggctggcaatgtctttaactcttactattctaataagtccccaaggttgggaatcatggtaacccgcagggtgggcatcagccatcctccatagctccagccatttctgtctgtgcgggccccctcgctgctgcttttcatggtctccctgagggccgagcgaggctgaagaggtggggtcagcccggaacaaggatgagaaggcaaggcgcaccattctttcattggtgtttctccaaacaccctgggctcccctggcctcacagcctggagagtctcattctgaaagcgtaggagggcgcccgggaatctttttaacaagccaacccaggtgcttcttacaatcaggaaagtttggggaacgtcactgtacacccttttctgggtccaggtcatggaatggaaacgtgagccaatctatcaacgtaaaacctaacactgttgatcaaaagtaacgcccaggtgtcttgtgcctgcgagtccaagcttgtttctcgggcgagagatgcccctttgggcgcttagggccgggcggggtcgcgcgccgggctgtgggccgcggtggagacctgacccgcactccgagggttcccagagagccggggagcgagtagcagagtcatcgtttccagcttcagcctgaaaagctggaccgtgccgccgcatgtgcgcttggcagccgggcgccccgggccctgcggccacatcatcctggggcggggacgtgtgcgctccgggcgcccggacgccactgagccacgtctgagccgcccaccctcgggggtgagcgagccgcggctcggggcgggaccctggcggggggacccgagcggtctctaggacccgcgggacgccgccaactggcgggggtgcgggggagacaataatttgttccgcggtaataagaacggtgactgctggccgtggatccatttcacaggcctgccttctctcactaacgctcttcctagtccccgggccaactcggacagtttgctcatttattgcaacggtcaaggctggcttgtgccagaacggcgcgcgcgcgcgcacgcacgcacacacacggggggaaacttttttaaaaatgaaaggctagaagagctcagcggcggcgcgggcgctgcgcgagggctccggagctgactcgccgaggcaggaaatccctccggtcgcgacgcccggccccggctcggcgcccgcgtgggatggtgcagcgctcgccgccgggcccgagagctgctgcactgaaggccggcgacgatggcagcgcgcccgctgcccgtgtcccccgcccgcgccctcctgctcgccctggccggtgctctgctcgcgccctgcgaggcccgaggtaagtcgccgaactagggcggctcgctgcccgccccgccgagggcaccgcacgctgcgcctgggcgcgccgaggtccagggctgccccgaggggcgacgcgccccggcgcatctccggagccccggggcttgcgcttccagcgcggcgagaccgaccccccccccccaggtgccaattccttggggaagggcgacacttggcccgcagccccacaggagccagtacctgccccggagggcacagcctcgggaccgctcccccgtcctcaccctcttgggtgacatttgcagatgtctctgtatcttgacatttacacgtgtcactcgggacgatgcgtgtcgggtcctcttgctggccctatcccgcagtgaatatccccaccccaggctccgggccagcccttcaccaggtttcctttccagccccgcctcccccgctaacacacttaggggggcgcgcagcggccccgcaggtgaggcagccccctcctccgcaggtgtgcctgctgctctccacagcaggctctattttcataaactgactctcttacctacttctttagtttcctctctgcccctcttcctggcttccaggtcactccctagctgtcagtcgcaggcaaactttagcggaattctccctcct

SEQ ID NO: 4871 - DNA, 6000 bp, Homo sapiens; identical to SEQ ID NO: 551

SEQ ID NO: 4872 - DNA, 6000 bp, Homo sapiens
tccggggtggcatggtggggtgggcagtcccgtgttcacacgctggagctggagctggcagagaggagttgggtttggaagcgtgggggccggaggtgagggacactgagaggcgccccgacctccttgctgagaaagctgctgggaaagctcgttcatctcaccccaaaggagagtgaccacctcatcccacgaggcctggagtgtttctctgagtgctgggttctcaggaatgttttttgatgtcttttttaccttgaatctcctgaaaacatcatggaacccatgttttctatttaagaaaaggggaagggaaaggacaccggcctgctgggaacagtgtggagccaagaaggcccacggtgggggtgggcatggctcacgcaccccggctttctttccagcacctggctgagcacgcagacactgtgcagctggtgtccggcttcgaggccaccatcaacaagtttgacaagaacttctcagcccacctgctggacctcctggcccggctgagcatctatagcaccagtgactgtgagcacggcatggccagcgtcatctccaggtgggtgggcgccaccccggctcagcccttcctcagctcagtccagcgcctgcccctgcccagcaccgccctggctcagcccttcctcagctcagtccagcacctgcccctgcccaacaccgccctggcccagtgctgtccctgctcagccgtcccccagctcagcccagcacctgcccctgcccagcactgccctggcccagtgctgccccggctcagccttcccccagctcagcccagcacctgcccctgcccagcaccgccctggctcagcccttcctcagctcagtccagcacctgcccctgcccaacaccgccctggcccagtgctgtcccggctcagccttcccccagctcagcccagcgcctgcccctgcccagcaccgccctggcccagtgctgccccggctcagccttcccccagctcagcccagcgcctgccccggctcagcccttcctcagctcagcccagcatctgccccagcccagcgccaccccagctcagcacctgtccctgcatccaggccccatctcccctgcaccctcccctggtccacctggtgtagcctccttcagaaggtggggcaggtctgtgtcctggtgctagtgctggtcatatgccactccctgaagtcaggctagcccagctctccctggggtgtgacattctgtgcaactgggctgccccattggcaccctgcggctgtgtgtgtcctgtggggctgatcaggcctgggtcagcttccctcatgctgcactaacacctagcctgggggaaagggccaggtggccaaactgccagcctggaaggggtggtgcccttgggggtgctgtccttgggaaggtgcctatttgtgcttttggaccaccctgtgccctgtgccccccacaaatgttctgattttctgagcagggatttctgaggccaccctgcattgagaaccactgcttggttctccaagcccctgacacctcaggccccattgctaggccctgttggggtgatgggagccccaactttctggggccaggagagaagaaacctgtgtttgtgcctttgagcaggactgaacaggactgaaaaccttcctgtggaaacattagttaggagcgtgcctcaccctcacccctgcagggcctcttatggtctctgtagctgaacacttccccatggtaggagcagggctgctcaggacggacccgcagaaggagtgtgtgccccagctccactgtccttcctcacccctgctgcccagcacgcacccgcagaaggggtgtgcaccctagctgcaccgtccttccacacccctgctgcccagcatgcacccgcagaaggggtgtgcaccccagctccactgtccttcctcacaggcttgacttcaatggtttctacacggagcgcctggagcgcctgtctgcagagaggagccagaaggccaccccccaagtgcctgtcctgcgggggcccccggctcctgcacccagggtcgcagtcaccgcacagtgagccctggctgtgacaggaaggaagggtgtggggtcagcagggactggtgcaaatgggtccagaattttcaaatcgaatgctctgtgttctgtctttgcagtttaaatataaagcaggaatgattgactcagctcactttgtttctcaaggcgctgggtttcgttttatagaagctgcccaggcagggtggatgtctccctggatttgctaatctgtttgctttttgaaattacactatcacctttttgggtgtttttggcctcaaagtggaaatacatggtgtttaagccaggagcaagcaaagatgcatgtggggtaagatccaggcctggtgtccacatctttccgggtgagctggggccgggcttcctgaggtctgtcggaaccgggacaagcctctggaaacggtcagggagttgtggaaacccaccgggcatcgggtgtcgggtttgctttggccccagaggcagccccgttccttctcctgaggactcacccgcctccacgaccctcctcctgctgctgctccaactggtccagggcaggaggccacagacagggccctcaggcaccctgggagcccacacctccccctccgtgggagtgggtcgaggggcaggctctgctgctggctggaaaccccaccccgccctatccggtaccgccttgttacgtagaacttactcagcagactgacacccaatccccctcgggcgatcatctgccctgtcttcccacctccagggctacagtgggcagcaccgccatccccagtgtgacagggccctgggagcctcagggctgcccggccaggttggtctgctctggttacattctggccaagctgccccttcctgctgacctgcatgtgtattgttgtcaccttcagctctcagcacctcggcccccttgggcagtgaggaagggccctggaggcgaggttgggagaaaggatagctagaacaggatcctgcggggaacaagggttgtgggcagctctcacccggggctgcctcactgagagcaccgccgagtgggggtgggggtgtccaactctccagccacaaaccgcttcctccttgtctgcaggctgtgcaggtctggcctgtgagtaaacacatttatcagcaacccaagctgtcagtctcagtgttgtgcaaatgccggactggtgagcagaggagcctgctagctttcctgcctggccccgaggcccagaaacccctgatcttgtgtcctggggtctgggaagccctgggccttgagaagtggggtttgcaggtggtgataggaggaggggagggaagcctccagggctgtggggttcaggctcccagaccccccggcacctgctgaagaggagagctgtgttctgtgggattgggtggaacttcctcagcgcgggaggagcctgttctggcccaagctggtcctgtctttttaggaataaatccctggtagctcagcgtcggcaggggccttgctgtgcctctgatgtggccagcgtgccgcctttgcactttgctgttgagtaacttgcaccatgaggtcaaggaagggaagtgtgattgccagctggccattgttctataataacagggtcacctgcatgagctcaggcacaggccagtatccccagccctacctgggagcctctcggcagcctgggggacctcgtcctgtgccacacaggcaagcggacacacccccaggcagcagaagtcacctgcggcccagtgccagcccttgctttcttgcttttcatgccattcacattagggtaagaatggctttgagacaaaatgtgacagcatcactcacgccagcttagatcctccgggttccctgtcctcccaggataacgtccgaggccccggcctcttcttgccactgccccttgacctctgtcctctgcccctaggcccgtgcagttccctgactcgccctgccctggtgccctctctccaggcaggactccctccagccccttgctggccctgccctgcctctccccagggaggccctgaggccccccccccccatgtgatctgtcagcagcgccctgtgtggtcatctgagctgcctttcctgccaccaccactgttcccactccaggagggcggcctggctgtgaaagccccagggaggggtcctgggtggaccgtctggggagctgtggtgtcagcccaaacctgcaccctcgaggctgagcccaccacggggaatgtggtcaccaagggcaagcacgcttggccgcaggcctggagacgccggagccaggccacggtgggctgctgcaggctttggtccacgtcggccagcgtcagctgctgtctggggatcttaggctagggacggcccctgcacctgccatcacctgggctgggacccccacctagggctccccctccccacttggacgcctgcgggcccatgcctatcccactccggtgaggcctcagcctggtggagggggcgcaggcttgggggggagggtggcagagcttcccacagggctgaacctatgcccacaaagccatgacttgcccctgcctgaggctttctgttccccaggaaatcagagaccccctctcctgaaaccgccaggcggccctcacaagtcccttcccctccaggacctgcctggcgccacctccttccagccgccgggtccttcgagaggccccctctcggggctctggccggacttgggacaggctgtgcctgagtttcctcacctgtgcaagggaggatgctggattgtggggagaggggaaacggaccccgcccccaggtgccgcgcgccccgcccctcccaccggccgaggggcccattggctgcggggcgccggggcggggcgcgcggaaaagagcctcgggccaggagcgcaggaaccagaccgtgtcccgcggggctgtcacctccgcctctgctccccgacccggccatgcgcggcctcgggctctggctgctgggcgcgatgatgctgcctggtgagtggttccagggaaccgtcccgggcgcagcgcggggcagggtggctctccccgcaggacgcgacgcggaccccgagcccctggcctgctcgcaccccgcaccctggcccggcttcgggctggtccctgggagcgggccatcaggtgcacagtggtctctgggtggagagccccgggccggggaggccggggaggtcggagggaaccttcaaaggtgaactgtgagagggaagtcccgcctctgagcttgttagtggggtcggggccgggccaagcaggacgcttcacctgctgcgcgaggcgccctgggttcctgggattcacctgtggggctacccacccccactatttagccgaggagggaagggagggcagacaagctgaggcctggagtgcaggggtgtgggctgaggggacccgtctcctgcctgggggaggacatggggctgctgaccctggatcccacccctgctcctggagtgacttgggctggggtgtgctgaggagcttcaggctggaggccgggttgcttcccgccagtttcctgggcagataggggctggctgctcccctgctgcctctccaggttggagatgtggtcatggagacacgtccactattgtgttttaatgggagcaaagggtcctggggttggtggtctccgaaaccctgcccattgcatgctgggaccctgccctctgctctcggataccagggagtttccagttcttgggaggtgaacagcctccgggaggcacttcctgctccccagttagatgcgatcagatgatcagaagaatggaggaggagaatggaaacgggcaggtcggcggcccgagtcctcctccctggggggaaggttcatccttgccctcgggcccctccagagatctgagacagcctggagacctgtggagtcactggcacc

SEQ ID NO: 4873 - DNA, 6000 bp, Homo sapiens
tggcaatttgttatggcagcctcagctaagacagatggctagtataaaaaagacaaaatcaaggatcaagagttggttgctgggcacggtggctcacgcctgtcatcccagcactttaggaggccgaggcgggttgagaccatcctggccaacatggtgaaaccccatctttactaaaaatacaaaaattagccaggcgtggtggcatgagcctatagtcccagctacttgggtgcctgaggcaggagaatcgtttgaacccgggaggtggaggttgcaatgagccaagatcgtgccactgtactccagcctggccagagggagactgtctcaaaaaaaaaaaaaaatcaagaggtggtgaggatgtggagaaactggaaccctcctatactgctggtgggaatgtcacatggtacggccactttggaaaaacacattttagcattttctttcaaagttaaatgtcaactttccatcaaatttggcaattccactcttcagtaactacccaagagaaagaaaagcacacgtccaccaaggttgtgataagaatgttcaccacaacattataaacagctgacaaactggaaacagttcatacggatgaatggatgaaacctggagaatccatgggttaacagcaataatggccgggcgtggtggctcacgcctgtaatcacagcactttgggaggccaaggcaggcggatcacctgaggtcaggagtttgagaccagcctggccaatatggtgaaaccctgtctctactaaaaatacaaaaattagctaggcgtggtggcacacgcctataatctcagctactcaggaggctcaggcaggagaatcgcttgaaccccggaggcagaggttgcggtgagccgagaacgttccattgccctccagcctgggcaacaagagcaaaactcctcttaaaaaaacaaaactaaactaaaacaaaacaggtcgggcgcagtggctcacgcctgtaatctcagcactttgggaggccgaggcaggcggatcacgaggtcaggagatcgagaccatcctggctaacatggtgaaaccccgtctctactaaaaatacaaaaaataatttagccgggcttggtggcgggcgcctgtagtcccagctactcgggaggctgaggcaggagaatggctcgaacccgggaggcagggcttgcagtgagccaagattgcgccactgccctccagcctgggcgacagaccgagactccgtctcaaaaaaacaaaacaaaacaaaacaaaaagacagtagtaacaacgggttaccgttcagcgtggatgaaacgcggcatgtccatgagttaacagcgggaacaatgggttacggtttagcaatgaaaacgaaggcatcaccaacgcatgctcctgtcattgctgaccacccacagctgggagccgcactcaggcaaatgcctatggagcgccttctgtgtgctgggcaccatgcgggcgccagggccatcctcagggtgagtgagagccaaacccagctgggtctgacccagcacaaaggcggaggggacgggggagtctgagcatccacccaaggtccacctggagactctggggggggccccagaccaaggagcagccagggttgagctggccagggcacctgcccctgcacagtgaggcggcgagcgtgtgtgcgtgtgcgtgagggtgtgtatgtgtgagatgtgtgtgtgtcacatgtgtatgtcaggtgtgtgtgaggtgtgcgtgagggctgtcaggtgtgtgaggtaagtgaaatgtttgcgtgatgtgtgtcaggtgtgagaggtgttttgagtgtgtcaggtgtctgctggggtgacaggtgtgtctgagtcaggtgtgtgtcaggtgtgtgtgaggaatgtgtgccacctgtgtgggagggtgcatggggtgcatgtgtcaggagtgtgtgtgcctgaggtgtgtaggggtgtgtgtgcatctgggatatatgtgtgaggggtgtttggaggtgtctggggtgtgtgtcaagggtttgtgtgtggggttgtcagtgtctagggtgtgtgtcaagagtgggtggatccagggtgtgtctagggtgtatgtgtgaagggtgtgtgtgcaggtcagggatacatgtgtcaggtgtgcatgtgtgaagtgtgtgtgagttgtatgtcaggcgtgtgtgtctggagtgtgtaagggatgtgtgtgtcgagtatatgtcaggcatgtgtggctggtgtgtgcgtgaggtgtgtgagggtgtatgtgcatgggaggtgcgtgtttcgagcatgtgtgtgtctggggtgtgtgtgcctgaggtatgtggagtgtttgtgtgaggtgtgtgtgttaggtgtgtgagggtgtgtgttaggtgtgtgagggttgtgtcaggtgtgtagatctgggggtgtgtggtgcgtttgtgaggtgtgtatctgggttgtgtgtgtctgatgcatgtgtgaggtgtgcatgggatgtgtgtgtctggggtgtgtatctggtgtatgtgtcaggcatgtgtgtgagttgtgtgtgtctgggatgtgtgaggtgtttggggtgtgcatgtcaggtgtgtctggtgtgtaagcagtatgtggggtgcatttgtgaggtgtgtctggggggggtgtgtggtgcgcatccggggtatgagtccagggtgtgtctgtgtgtcgggtgtgtatcatgtatgtgtcaggtgtgtggtgtgaggtgtgtgtggcgtgtgtctggtgtgtctgtaaggtgtgtatgggggtgtgtctagtgtgtgtgtgtgaggtgtgtgtccagtgtttgggatgtgtgtctagggtgttttggtgtgtgaggtgtgtgtcaggtgtgggtgtgtcaggtctgcagggggtgtgtctggtgtgtgtgtgtttggtaggtgtgtgtttctggtgtgtctagggtatatgtgaggtgtgttgggtatgtggtgtctgatgtgaggtatgtgtgtctggggtgtttgggtgtatgtgtcgttgtgtggtgtttgcggtgtgtgtctgggtgtgtggtgtgtgtgaagcgtgtttcctgggtgactggtgtcaggtgtgtgttggggcgtgtgtgggtgtgtcttgggtgtgtgaggtgtgtgtgtttgggtgtgtctggtgtgtgaactgtatgggtcaagagcgtgtgtgaggtgtgtgtgaggtgtgtgttgggggtgtgtgtgagaggtgtatgtgatgtgtgtatggctggtgtgtgaggcgtctgtctgaggggtgtgtggcgtgtgtgaggtgtgtgtttgggtgtgtctggtgtgtgaggtgtgtatttctggggtgtgtgtcaggtgtgtgtctggggtgtgggtcaggtgtgtgtatgtcaggtgtgtggtgtgtgtgtgtcagggatgtgtttgaggtgagtgtgtttgggtgtgtctggtgtgtttctggggtatgtgtcagatgggcatcaggtgtgtcaggtgtgtgggggggtgtgtttgggtgtttctgctgtttaaggtgtgtgtttctggggtgtgggtcaggtgtgtgtgtcaggtgtggggtgtgtgtcaggggtgtgtgtgaggtgtgtttgggtgtctggtgtgtgagatgtgtgtttctggggtgggtgtcaggtgcgtgtcgtgtatgtgagatgtgtgggtgtgtctggtgtgtgaggtgtgtttctggggtgtcaggtgtgtgtgtgtgaggtatgtctggggtgtgtgtgtgaggtatatctggggtgtgtgtgaattgtgtgtttagatgtatttggtgtttgaggtgtttctggggagagtgtcaggtgtgtgtgtctggggtgtgtgtcagatgtgtgtttctggggtgtgggtcaggtgtgtggggtgcgggttaggtgtgtggggtgtgtctcaggtgtgtgtgtgtctggggtgtgtgtgaggtgtgtgtctggatgtgtctggtgtttgaaatgtgtgtttctgggggctgtcaggtgtgtgtcagctgtgtgtgtgtctgaggtgtgtgtgagatgtgtgtttggatgtctggtatttgatgtgtgtattactagggtgtgtgtgtcaggtgtgtgtgaggtgtgtgtttggatgtatctgttgtttgaggtgtttctggggtatgtgtgtcaggtgtgtggggtgtgtgtgtcaaatgtgtgcctggggtgtgtatcaggtatatgtgttgttgggtgtgtgtgaggtgtgtgtcaggtgtatgtttctgggggtgtgtcaggtgtgtgtgtcacgtgtgtgtcaggtgtgtgtcgggtgtgtgtgaggtgtgtgtttgaatgtggtgtttgaggtgtgtgattctgggggtgtgtcgggtgtgtcaggtgtgtgtgtgtctggggtgtgtgtgaggtgtgtgtggtgtgtgtgtcgggtgtgtgttgggtgtgtgtctggggtgtgtgtgtctggggtgtgtttggatgtgtctggtgttcgagatgtgtgattctggggtgtgtgtgtgtcaggtgtttggggtgtttgtgaggtgtgtgtgtggggggtgtttgtgtgaggtgtgtgtctgggatgtgtgtgaggtgtgtgtttggatgtgtctggtgttcgaggtgtggtttctggggatgtgtcaggtgtgtgtgcatcaggtgtgtgtatgaggtgtgtggtgaggcccgagcagggtctgaggggcgcatgcgcggctccctagccggggcggtgggtgggggtagagggtgcgggaccagagtcgaggccccgcctctagccgcgtttccatggcgaccacagcctcggtctcgcagctgcagcccccgccccgcccggccgcgaagcgtctggaaccgcatcctccgcatccacatccgcatcgtcgtcctccccgaccgcgtcctgcagcagctgccagtggagccgcctgtgagctatttccacatttcttgcagaatgtgggcggggggcccgaaggggtgcgggggtgcgaggcgcgtgtgcgggtgtgtgtgcgaggtgcgtgtgctcgcgagtgcgcttgtgcgtggcgcgcgtgcggatgagggtgtgagtgcgtgtgtgcgaggcgcgtgtgcgggtgcgagtgtgcagggcgcgctgcacggccgccctcctccctcgggcctcctctggctgccccaggccagtccgaccccgcggacccgagggcggtggtctccaggcttcccgtgacggcggggccccggcacgaggatcgcagcctggagttaagggtgtctccgaggtggggagggggtaccagtcccagctcccgcccagctctgtccgccggaggcggggtggggagggcgacagaaggggcgtcggaccagagcaccgaggagccgctgcccgcacgggggttgggggtgggcggtgggcttgatgggggcgtctgcgtgacaggcaagaggtggccaggaggccgggaggggcgcggctccggaaccacctgcagcaggctcgggtgcggggccacaggtggctgggctggaagcgggagcagctgcgcgcccactcccctccgaggggctgcgccgaccccgcagtgcagctgccttttaataagcggggcagccacagccccctgcagcgccaggggcgggaggctgcggtggcgcccgcgggggctgggcgggaccctcagatccgcagtcacacgcgctggtgcccggcccgcacaagcccacctgcgcgcaccccccagcgtgacgcagcattccatggttggggggggcgcatgcggaagcgagtctgtgacgtgacctccagccgagcttccgtggactttcgactgagagcctgcacccccgcccccgccatccatctgtccatctgcacggcctcactcacccgcgcccccacccatctgccatcagcatcccacgccttccccgccccagagacaggagccgggcactgcctccctgccagagcgcggcgggtggggcgcaggggacccgcaga

SEQ ID NO: 4874 - DNA, 6000 bp, Homo sapiens
ctgatttaggtcatcaaaatgggctctaaatagaagtatttagttaaaacccaaaaaatctgctctttgatgataaattaaaatataatcaaatcattagctgtaactactctatcaggttttcaaaaaaaatttttatagagttgagctttcaactctgctaatcaaagaataatccttgagatcaaagagacagcaaaagagtgttgtagaaaacagacattaataagaaacataccaggcacagaaacagaagagagattccattttttagacttaagttaatcaattctcattgagcacatactttatacaaagtgtcagacaagtgctcaaaggagtaaaatgggtcattagtgaattttcaccacagaaactactttcgctcactttcctctacttcagctcattatccaaaatacattgctgcatattatattaaccttgttaaacatattaaatctgtaccttcttaaaatgacaggaaaaaaacatacaagttttgacttagtatacctctccttaatatttgaccctcattcttcactagtaatagaaacaaaaaatgtgcctttcttgtattccctatctctatctgaagcacaagcacccaagccatgaaaccagacaacatcctagattccttcttctctttctacctccaatttaataggaagtctattcagcttcttaataacccatattcagtccctctgatcaatctcactgacaccgtccagatttccacactcgattttgcttcaaatagtttcctaatctttagatcatggacctcttacacaatttttgcctcatctgtgccctataagaatcatagttattatttaaatttatttttaaaagaaacttggtatcagcctcataaataaacagtatcactttccatatattaaaaaataaaataaaatgaacaaacaatacagttactaaatcctagaaacccaggagtagattggggggataccctggctctgaccttcattctcttcagccttccagtatcaggagattacagaaaagaattaatcctttactcctttcccaaaaaaattgcatctcagtttaacatttaaggatggccagacacagtggctcatgcctgtaatcccagcactttgggaggccaaggcaggaggattgtgtgagcctccgagttcaagaccaacctgagcaacacaatgagacctccatctccacaagatattttttgaaaattagccaggcatgggtggtatgtgcctatagtcccagctacttgagaggctgaggcgggaggattgcttaagcccaggagttggaggatgctgtgagctatgatcgagccactgtactccagtctgggcaagagtaagaccctgtctcaaaaacaaaaaaaaataagtttaaggataaccaaatagccctagttgatgagcaaaagctcatttgtacaaaagcatggcagccaatcataaatgttaaaaaaaaattagaaaaataacctctttgcaactcctaataaaataactgactcaggcaaggatgctaaaacacacaggtaaaaggttaatgggaaactagatatataggtatgatttctaagtattaccccaatactcacttgctcttacaagggggaaaataatactttctaatattatttacaagctgtcacctttactcaatttaagtactaccaaacattattggcttccttatatgatgctatatgagatatacaagatcacctataaagaatactataggctgggcatggtggcttgagcctgtaatcctagcactttgggaggccgaggcaggaggagtgcttgagttcaggagtttgagaccagcctgggcaacatggggagaccctatctctatacaaataaaaaagttaattaggcatggtggcaatcacctgtggtcccagctacttgggaggctgaggcaggaggaggattgcttgagctgggaaggtcaaggttgcagtgagccatgatcgcgccactgtacacgagcctgggctaccaattgagaccttgtctcaaaaaaaaaaaaaaaaatcatattcctccctgcaaatgtttaacctgaaattaatctatcaagatcacctacaaagtattctttctccccaaaatgtttaatctaacccaatcaaagcttttagatataatttccagttgacagaaactacgagttagaaggcaaaagacaaccagaggaaacaagtcaacatatatgggatgctacaggacaacagcctggcctcctctcttcaacaagtcaatgtcaagaaaaagacggctgggcgcagtggttcacacctgtaatcccagcaccttgggaggccgaggcaggtgaattacctgaggtcgggagtttgagaccagcctggccaacgtggcaaaacttcgcctctaccaaaaatacaaacattagccaggtgtggtgccaggcacctgtaatcccagcctgtaaagtagctgggacagctacttgggaggctgaggcatgagaatcacttgaacccgggaggcaaaggttgcagtgagctgagatcgcatcactgcactccagcctgtgagacaggtgagactctgtctagaaaaaaaaaaaaaagaaaaaggggtggagggaaaatgggttatattctaaattcagaatatagagaaaattaaatttggagaaaactaaaagtcctaataactcagagcacagaggactttttgggcagttaaactattttgtgagattttataatggtgaatacgtatcattatgcatttgtcaaaacccataggatgtacaacaccaagagtgaaccctaatgtaaactatggattctggatgatactgatgtgtcaatgtagtttcatccatggtaacaaatataacacctcgttgcaggatgttgatgatgagggagactggagaggggagcggaggtcctaataaccaaacctataacagtctattgcttttgatcgaatcttgatttcaaggagcagttggaggacaactgaggaagtgtgaatgtgtattagatgataaagaggaacttctattaattgtgttatgttgatgacatatactatggttatatagaaaagtatcctgaaattttagagatgcctatttaagtatttaaaggtgaaatatcctgatattggtatttaccttaaaatattttttaaaaagtaaatacggcaaaattacttaaagtgttaagtctgggtgttacagactgcatgtctgcgtcccctcaaagttcatatattgaaccctaacccccaagggaatggaattaaaaggtgggcctttggagatgactggatttagatgaggtcacaagggtagagcctgcatgatgaacagggtgggaccgtatctcaaaaaaaaaaagaggaagagaagtttctattagagcttgctctatctgctttgtgaggatagaggcagtttcgcaaaccaagaagaggaccctcactagaatctgaccatgccagcaccttgatcttgaacttcccagcctccagaactgtgagaaataaatttctgtcatttaaaccacccagtctactgcactttatatggcagtccaagcagactaagacattagataatgcatatacaggtattccttaatagaactaaagagagtaactgtatcaatattagtatgagtcctacctaaaatacctcttccttcacttgcagaaacactggattagattattccaattgcctcagtgttcttccacccttacccaatccagtccaatctccggagaaaaatatgatcacatcactagcctgcacagcattcaatcaaccacctctttaatggggaaaagtgtaaattccatagtgtagccatataaggcttttcgagatctgcccagactccttgagccactctatatatacttcactcatttaaaactcagcgacaatcctacaagtaggtgaaattattattccctctttacagataagtaaaggggaatataagtaaataacttgcccaagaccacacggttggtaagtggccctgcttgactttaaattttgacagtctgatatatccataaaccagataaatccataattttaaccacaatattattctgtgcccggtacagtgtaggtgctcaataaatgcttgctagatgagtagtgtggaagagcttagctctcctttttcacctgatcccaaaagaggagtgaatcctaaccaccctgtttctcttaagagtcaagtcaagtaagagctgatgactgttactggcattgcccgggcgtctagtattgcagtatccccgcccctgtgaggggtgcaaaaccttttctgatttcatttctttggtggtggggatcggactggggaggaatgaggggtcgcagaacacaggctgcccgctgggcccgggggctgcggggagggacggctctcgtgcgctgagtagttgactcgcccactgcagacctcagaagcctcacgacccggaccccgggagccccagccccgcgccctcagccccgcgtccaggacctgatcctggattgccaggggccctcctgggaagacggggccactccgggcccactcacctcgtcccggcactgcttctggcacatctggcaataccagcgtagcttctgcagccccttggacttgatcctgttggcgatagccttgggagtaagaaaatccgacttccccatggcgaccacggcagcgatcactttctggaccccagtactcagccagccggaaacggaaccgggctggcggcggtgggcgggacaaatcccagctgagaggcggaaggaggtggggcctgggaagactgggttgcaacggtcgcgagactcccctcgccgtagcgcgaagaaacgagactgaagaagagagcaaggtgggaggggcgcgctggggagcttcggcgcatgcgcgctgaggcctgcctgaccgaccttcagcagggctgtggctaccatgttctctcgcgcgggtgtcgctgggctgtcggcctggaccttgcagccgcaatggtatggcagcttgcgggaagatcggcaggaccgcaagggatggaagagcttgggcacggggcagggaggaggagatgggcgcgggggcagatgtggggtcgcagggcctagctgggcccctggcccgtcggaggcgccgggtagcgggggctgcaggaagcggctctgaggtcgggcaaggtgtgcgcagggccgggctccggcggagcaaggtcccgcccggttccctgaggtcggagggccacctgggacctcgggactgcggcctgagtccaaattgacgtctgggcggtcttgagttccctcagctaatcagcacttcctgagcttccacttccactgcaagccaggcccccagtctcagggcctgcaaggtgacgggagcctgagcaatagcccaggggaaggttaagtcgtgctttttgtccttgacgccctttgaaaccctgtagtgctggacagagtgaccctttaagattcgatcgagtcagagagcgcggccgtcgagcacctcccgtgttgcagacgctttgctgggtgctgcaacagcaaaggcgaacatcctagatgcctctgagggtggttttggtgcagaagggaccgtacagatctgtctgagggcggggaagggaaggacacctagcactaccttgaaaccacttgctgaaaccgtaaccctgcaaggtcatgaaattgcccccaggtcctgggggaggagttcggtgggcttttaagtggcatttgttaactgacatgcaactaaagggtgccacgagcctcgagaattttaaacattagttccgggtagggggacctgggctgggggaagtgcatattagaaggcccgggaatgggcaggtaaaagttggtttgtgggtggtgctgttcagttttgaagcttgacggaatctggaagaattccagacacgctgctaaggg

SEQ ID NO: 4875 - DNA, 6000 bp, Homo sapiens
caagtataaagttactaaggttttctttttttcttttgagaccaaatctcgctctgtggcccaggctggagggcagtggtgcgatcctggctcactgcaacctccgcctttctagttcaagtgattctgtgtcagcgttaggccgctttggcctcttaaagtgctgagattacaggcgtgagccaccacacctggcccttttacaaaattgaagaaatgaaagggttaccccgcccaaaaaaaaaaaaaaaaagattacactggaaggaagtcacagattaaggatcaagactgttgagtctttaggttccaaaagcttcacctacatttttcttatatgtatttggatattaaagaaaataagttacatatacaccatggaatattattcagccatttaaaaaaaataaaatcttgtcatttgtagcaacatggatggaactggaagtcatcatgttacgtgaagtaagtcaagcacagaaagacaaaacttggatattctcactcacatgggagcttaaaaagtggattttggccaggcgcggtagctcatgcctgtaatcccagccccttgggaggccaaggcgggtggatcacctgagctcaggagtttgagaccagcctggccaagagggtgaaaccctgtctctactaaaaatacaaaaaattagccgggcgtggtagcggatgcctgtaaatcccagctactggggaggctgaggcaggagaattgcttgaacccaggaggcagaggttgcagtgagctgagatcatgccatttcactccagccaaggtgacaagagcaagactccatctcaaaaaaaaaaaaaaaaaagtggatctcatgaagatagagagtagatcggtggtatcagaggtcgggaggggaaggggtggggtgatgaaaagaagtagattaatgggtacaaatatatggttggatagaagaaataagacctactgttagatggatcggtaggtgaccatagtttaatcagtaggtgaccatagtttacaatatctactatacattgtgaaatagctagaggagaattcaaatggttctatcataaagaaaagacaaatatttaaggtgatggatatcccaaatacaccaatttgatatttacaaattatatgaatgtattaaattatcacatgcaccttgaaagtatgtacatctagcattcatcaattaaaaaaccccaaaagctcttactctatagaaatagtaattcattgtcattttatttaaatctgataaagcacaatctaaagcagactcctttcctcactgctaattgcaattttatttatttatttatttatttagagacggagtctcactctgtcccccaggctggagtgcactggcacgattacggctcactgcagccgcgaattcctgggctcaagtgatcgtcccatctcagcctcccaagtagctagaagtaacgtgcctgccactatgccctgctaattaaacaaattttttttcttgtagagacgacgtcttgctatattgcccaggctggtcacaaactcctggccttaaatgattttcccgccttgtcctcccaaagtgctgggattacaggcatgagccaccacacccagtctaatttttaaaaattatttaagtcagaccagtggcgtgtacctgtagtcccagcaactccagaggcttaggtgagaagatcctttgcgccaaggactttgaggctgcagtgagctatgatctcaccactgcactccagcttgggtgacagagtgagatccatactgtgaaaaataataatacataaaaaattaaacagggcgcacagtggcccatgcctgtaatcccagctctttgggaggataaggaaggcagagtgcttgaactggggaggcataggttgcaatgagccgatacagtgccacttcacttcagcctgggtgacagagtgagaccctgtctcaagaaaaaaaaaaagtatttatattactttagtgtcgtgtccctgttttctttgactcatatggggatccagctaaaattgaactgaacaccagaaatgaccttttaagagtaaaatggtatttcatcaataaatactttattggacatatagtccctatattacatttttatggaccttagaaatacacagaagtaaaagataaaatgggttgcccactgtcctcaatgggctaacaatctatttgagaagacaaagcatttaatacatagagacattttcttgttggatgtgctaaaacaatgaaagatcaaggaggtagacttgagagtctggatggatgtagattaggtggcacattgcagttaaacaaggaaaagccctaggtggcatggcatgtagtggtagaaagaatggtggaaggggccaggagcagtggctcatgtgtaatcccagcactttgggaggctaaggcaggcagatcacttgaggtcagcagttcaagaccagcctggccaacatggtgaaaccccgtctctactaaaaatacaaacttagccaggcagggtggcatgtgcctgtaatctgagctgctcaggaggctgaggcatgagaatcactggaacctgggaggtggaggttgcagtgagttgagattggccactgcactccagcccagtgacagagcgagactctgtctcaaagagaaaaaaaagaatggtggaagggtaattcacaaagtttatccagagtgtcaaagctcattcccaggctcttgaaccatggaactatcccagaaataggcagtaaaaagaggcacaggatactcttcaccttctgtgatattttcaatttagtgcatcttccccctgcccccccccaccccccgccgcttgctggagtacagtggtgcgatctgagctcactgcaacgtctacctccagggctcaagccagcctcctgaggcctcctgaaaagctgggaaaacaggcgcaaaccaccatgcccggctgatttttgttttttttacctttcatagagacgtggtctcactgtgttgcccaggctggaatttagtgcatctttattgaaaggatattgcattcatgaaattagctcataattgagtgtcaaaactgcacttaagtcaatcattttgtaggctattgtacatagtagaaaaagtaagaacgaccactctatctagaagtttactgcatatcaggggagattaggcaagtataaaaatgactaatacaaagtagagtgaggtaaggatgaattaacaggatgggagattattactgtggcagattggattttccaaaaattcccacagcggtattttgaatcccacatgttcttccagaatcttgccacaatctcccctagaggtggtgtccctaggacttgtggctgcccctacagacacaatgcagtaaaagatgctggttcagttctgaggacatcccttggaccccagctgccacgctgtgaggaagcccaggccgcttggagaagccatctggaggtgctggagctgacaccagcacccaatgccagactggggaatgagggagccacctgatcattccagtccccagccctggggctgtcccagctgacctcaagtacagcagagactcatgcaagctggacctaaattgcacgcccccctgaaatatataatttatttcatgaacatagatctgaacattagaacagattattgaggccggttttggtggcccatgcctgtaatcccagcacttggggaggctgagacagctggattgcttgagctcaggagttcgagaccagcctgggcaacatagcaagactctatctctacaaaaaatacaaaaattgggtgagtttggtggcggaaacctgctagtcccagctactcgggaggctgaggtgggcaggtcgcttgagactgggagttcgaggcagcagtgagctatgattgtgtcaccgcactccattccagcctgagccacagagcaagaccggctcttaaaaaaaaagaaagaaagaaagaaaaaagataacagtggcttcaggaaaactgttccacggtaggaggcatacgatcctgatctctgtattttggagaagacggaggggactagcttacgtcgagacagaggagttcataactattaactatacacaacgacgtgtcacaaatgtttacaaacttccaagagataacgataagaagcggccgggcgcggtggctcacgcctgtaatcccagcactttgggaggccgaggcgggcggatcacgaggtcaggagatcgagaccatcctggctaacacggtgaaaccccgtctctactaaaaatacaaaaaattagccgggcgtggtggcgggcgcctgtagccccagctactcgggaggctgaggcaggagaatggcgtgaacctacctgggaggcggagtttgcaatgagccgagatagcgccactgcactccagcctgggcgacagagcgagactctgtttcaaaaaaaaaaaaagaaggaagcaaaatacgattggttcggtcccgtccgctctcagcggctcagtcccaggcctcggggccagaaccgtgttccccgcgctacttgggcggcgccgagatcgcggcctccccgaagggtgcccaggaggcctgggtcggacgtggggcgcgaggaaacggcgggttttccacactgagccgcgaaagcctgtagacgacgaagaaccccgcagccttggcctctgcgcggcttccacgccccacggctgcccgcccgagccctgcccccaggcgcgccagccccgcctcccgggtcccgggtcctgggaccgggcccgccctgccccggcgcccgtggtcaccatggcaacgcagcggacgtcggccaacggcccgccctgggggcggggctgggccggtcgggcgcgcgggtcaggtggcgaagggcggagtctgcgcggggttgggcggagcctgcgcggggccggtaggatcgcgtcgggagccggtaccgaggcccgagccgcgggagtcgagcgaaggcagcgccgaggccgcggtttccccctgggcctccccagcagcagccatgggcagtgagtagcggcggctggagcggggactctggctgggaacgcaggccccgcctgggctgcgggcggtggggctggcgctcgctcggagtcgtgggggccagggatgcgcgggccgctccgggcctcagcggagggcacgggccgggggcctccgccgaggctcccctagccgtgcgaggccttgcccggcgggtaccgggacccggaggcccggggtttgcgtttgatagagggcgaggatggcgctgggaggccattggttttgggggcggggagttagggcaccgggtgaacctggaccactttttaatttttcaggagttaaagaaatcccgtgtttttattccctcgtcatctttccttggcatgttgcattgaagaaagctcccctaactcgtttaattttaaaaaaagtgatgcatggcgtgtgttttagggaggaaaggagtgtgcattggtaacagcgttttccttaaactgttcattctgtagcgtttactgaaaactgtaaggttttataagccttagggacaaggccttatgttataggaatgtttttcagggccctccccgtaacactcaaccccacatatgtgcacgtagctacttgcatagctgtgaagatgttcgttggatgatgggtcgtgcatacccaagcagggcacccattggccaactagtggacatttgggggaaattagaaaggagtaggagagacccgtggtaaaattttgcatcacaaggatagacagggggcagccaaaagctttgcttgaacatgaataccccttacagatgatcataaagtgtcaagaaatctgagagtggcttggattgaggtggagaggaaaagggatggagaggttctaggaagcctcctgatgtgattgatacttgtttcgcgttagcaatgaatgctttcataattc

SEQ ID NO: 4876 - DNA, 6000 bp, Homo sapiens
gtgtactttggtggacacagtttttaactgtgataaaggcctttttatctacttttttattgcttgtgtttttggtatccaatccaagaaatcattgtcaaatccaatgttgtgaagattttatttcctgacgttttcttctaagagttttatagtttttagctcttatgtttaggcatttgatccactttgggttaatttttgtatttaatgtaaggtaagagtccaatttcattctctttcctgtggatggccagttttcccagcacaaatgctgttctttcctcattgaatgcttttggcaccttgttggaaatcaactgcccacataggtttatttctggcctctctattgtattccattggcctatatggctatccttatgcctgtaccacactgtttagattactgtcattttgtagtatgatttgaaatcaggaagtgtgaatcgttcaacttcattctttttcaaaattgttttggctgtgcagactcccatgaaattccatatgaactttaggatggggtttttcatttctgcaaaaaaaaaaaatcattgggattttgatagggattgcatgaatctatagattatattggataatattgacatcttaacaatatcaagtcttccatttcatgaacacagggtatcttttcatttatttaggtctttttctttcagcaaccatttgtagttttcagtggacaagtcttttgtctacgtagttaaatttattcctaagtattttgttctttttgattctattgcaaatggaattttcttaattttattttcagattgttcattacaagtgtatcaaaattcaactgatttttgtgttttgattttgtgtcctgcaactttgttaaatttgttagtgctacagtttgtgtgtgtggtgtgtatgtgtgtgtgtgtggcgtgtgtatgtatgtgtgtgtggtgtgtgtgtgtggtgtgtatgtgtctattgtgtatgtgtatgtggtatttgtgtgtggtgtgtgtgtgtgtgtgtgtgtgtaagctttaggacttcctacatttaaaatcaggccatctgtgtacagagataatttcacttcttcctttttaatttggatgcttttatttatttttttctttcctacatgctcttattagaacttccagtactaagttgaagagaagtgatgaaagcaaataaaagcaccaatcagaacacacagtcctgacatttggagggctaaatccttgttgcccggcctggcctcacctagctgcactgggcgtgtgggctgcttcccccttcacagctgcctgacacagccataaccacagggagaagctgaaattcgctgaaatgtaccagcctctttatcaagctctcccttggatgctccaagtttctgactagactagttcccaaatacagatggtccttgacttaggattgttagacataatgatttacccactttatgatgatgtgaaatagaaatggtgcattcagtagaaaatgtatttcgaatacccatacacccattctgcttctcacttttagtaccatatccaataaattacgagatactcaacactgtattataaaataggttttgttagatgattttgaaatagaagagttcccttatgaccctcgcagggggtgcgacaggaatgaggcttgctcctttggtgccctgctgctcaaacccctaggggggagcatgcagcatgcagatgggcaggtgcagaggctgtggggagtgcttttgggctccaccccacggcagcatctaggactcctgaagcccaagtgggcgtgtgttacagtgtgctctttcagctataccatctgcagacagcttgtgttagtcagctcaatagaccctctgccttatcacaaggacagggaggcagtgtgacagcctgagttcttgcccagtgtactggaagaatcagatcacatgtgggctggagggttgagtgcaaggttttattgagtggtgtaggtggctctcagcgagatggatggggaactggaagtggggagtggagtgggaaggtggtcttcccctggagccaggctgcctaaccccccagactattctccaaccactgctggccaaactccccttggtgtccagatgtccttcttctctctttctctgctgcgccaccccactgctctccactgctctattccttcactcttctcaatgtttagcgcttgtgtctatgcccattaaggtctcaggtttttatgggcacaggatgcggggtgtggtgaatcatagtggtcttggaaatgtaacatttgcgcatgaaaacaggagtgcctgttcccacttaggtccgtgggcacaggtccgagggtggagccctcgccagggatcctgcccttctctacctagcacttctctgcctcctgtccctatcaattttgcccagttggaagctaatgtaagtgttctcaacacgtttaaggtaggctacgctgagccgtgatgtttggtaggtcaggtgtattaagtgcatttttgacttagcatatttcaactcacattgggtttaacagggcctaatttgatcatgagtagaggagcacctgcagttacttcagtcagttcctgtccatttgatggctgcttagatggagggatgaattcctggagtttcccacaccaccatcttctgtgacatcccttccccaagatttggatttattttttgccccagtggcctcttgtagcctgataaatctttgtttcaacgaggtcaaggtcatggggtaaattctttgtggggtggttggctgcattttgtttaaacttcacagattttagtactgatcctaatttttaattttactaatgtgatatacacacttatgtaattaaaaaacaaaccctgggccaggtatggtggcacacgtctgtaatcccagcactttcagaggccaaggcgggcggatcacttgaggtcaggggtttgagaccagcctggccaacatggtgaaaccccgtctatactaaaaatgcaaaaaatagctgggcatcatggcacgcgcctgtaatcccagccacttgggaggctgaggtaggagaatcgcttgaacccgggaggtggaggttgcagtgagcccagattgcaccactgcactccagcctgggcgacagagcaagactctgtctcaaagaaacaaaccaaccctgaatgtgattatatacataattcaattaaatgtatttgcttctgaaatatatataaatgtaaattaggcagtcacttttgtatatgatttatttatatttgaaagccacaaatgacccatttaaactattattttcataagccagtgaaacaatgtctgagaaacatttttgttttgtctgttctgttctataaccatcattttttttttcagtcatgtacagccttagtgacaaagaaactttggtcctctgtcctacattttcactatctttttccctccggtcaggataatctcaaatttacatgttaaaaacaatcagtaagagaactacatcacatttctaataggatggaaacttttcaactttatcacaaagacaacgaatgtggaggctttccgtttgaagataaaactattcatttaaaaaattttaaaaattacaatgtttccagtagcttctttttgaattactaacatattccacactctagtaacggtttggccagctaatcgttagtttctgctttaaaatgttctaaattcctgttctacttttgaaaaatgacaacataaatgtttggagggttattttctgcttaatgaaagatctagaaacatattttattctaagaaagaattccacttgcctttaaataaagatataccttttgaccaaacaatcagattttctttttcttttttttcttttcttttttttttttgagatggagtttcgcgtctgtcgcccaggctggagtgtagtggtgcgatcctgactcactgtaacttccacttcccaggttcaaacgattctgttgcctcagcctcctgagtagctgggcttacaggtgtgcatgatcacacccggctaacttttgtatttttagtagagacgggtttttgccatgttgaccaggctggtttcaaactcctgacctcgggtgatctgactgcctcggcctcccaaactgctgggattgcaggcgtgagccattgtgcctggccagattttctttttctagcaaggggacccacttaaacttgaagaggaccgggatggttgaggctgggcagcaaggctttactgcaaatcctttaccactgttttttctggctttctagagaacgttctagcaaaaggtttctagaactttctccttcctggcctgactgacattccctcttaggtgtagcctccttttcacttttcttctgcctggaggaaatgaagctccacggaactttctgttgaaactttccaagaaaaaaaagaaaggctctaagcactgaatgtggaaactgaaggggatgagcttcaactctgaagtgtttccagcgtaaaactgtcctttccagggcccgtgtggctgtcacttcagagtggaggttgtctgctgagggacccctgactcagctgcttcccaggggaagctccgtcttccggcacaggtaatggcctgcagcttgatctccacccagccccatctgagcaggccgggagctcccaggctgtttcacttctctccttcctgactcctcaccatcaccatcgccctctctcctccccaccccgccactcctctcccacacgtgtccctttctccccttcctctgcgtctgctcttctcagaagttagcttacgaagcaaagttgttactttgaattcctgtttttccagccaccctcatgtgacaggatgtctcctcagtagaggctttccctaaattcaggagccctttaaaagggagggcttcctctgtagttcttttcagctgggcagctctgggaacttggattaggtggagaggcagttggggggcctcgttgttttgcgtcttagttccgccctcctgtccatcaggagaaggaaaggataaaccctgggccatgaggctacccctgctcctggtttttgcctctgtcattccgggtgctgttctcctactgggtaagtctgctctgaggcaggggatctctgacctggggggccggaaccacaccttcctcttctgggttactgtgaatgggttcctttcaacatctttgtgaggaggaaacggggttcccctgcaccacgcagtccacggctaagcctgctgccttcacctggcggccaggcatgggaggcctggagttggaggagggaggaggatgcgtctcaggtctcggttgctgccctgccgggaaccctacagaccttcagtgtcctcctgacttctctcatcgctcgttgttccttccctgttttcttcgtgcagaaatttcctgctctgtggtttactctttctggttttcaattcacactatttctgtctcaccgccaacaaacaccttctgagtgtctctggctggaaggagggcagccctgatgtctccccgcgtcttaggtccgagggtatcatcgcagatcatccccccaaaagagattctaagcaatttccatactcatttttttttctgccagaatcattcagacacttgattgttagaaagttcatccttatctgtattctagactattcaaactgccgcataagcagatcgattcctgtttttcttctttttctggagattagagattactcattaggaacagctccagagttgttcaaattctcaaataccttttccagtctgtcttttctatttctctatactcagttgcttaaacttcaggatgggagtgcctcgggggattttcattcctggttctatttggagatgatttagaagagatttcaaatttgattttttgatttctgatccccctttaattctatgaaatcaacaaacacttg

SEQ ID NO: 4877 - DNA, 6000 bp, Homo sapiens
ctatttttccttgaaaaaaatcattattatttttagaggcagggtttccctctgttaccacaggctagaatgtatttgctgttcacaggtgcaatcaaagtgcactgcagcctcgaacccctgggctcaagcaatcctcccacctcagcctccctaatagctgggactataggtgcatgccacaatgcctggctaaatttttaattttttttttttttttttttggtaaagacagggtcttgccatgttgcccaggcttgtctgagactcttggcctcaagcaatcctctcaccttggcctcccaaaatactgggattgcagtatttcactgcacccagccagaacaatttttcaaaggaaatattattacactatacagagaaaattgctgtagcaatatacagctaccgctttgagtcaacagaaagactgatacaaagcttacctcctctgagaaggcttctctgataaactgtgagtttttcccatcctttcccctgtattttctggtaattttccatggggtttctgaatggtatttggcctctgctcataaacacactcctttgtcttattctcaagccctttctctagcaaagaagaaagaccaccttttgtaagggcacatgtgagctggaaagttcaacaactcagacacctgtaaagactggtctttcttggcatgcttgcttctccctgttgatctgtcctagccttctcactcccaggttccttgctcaactcactcttctattccctccccgcctggcttctatttgttcattcatcagatagaattgacaacatgccaggagtggaggttccagcccgtagagtttggcttgctctaattctgactcaaactcatgaccttctttagctccacttaccaaattctccccatgtttctgagttcaaattcctaagggtgagaatccgattgacctggtttgtgccaggctacacatagatggctggacactctatggcccaggacccattcattcaagaagatgtggctgaagaagggagatggactgtgggcaggtcacccttcccagtcctaactcgcccagagtacttactccaccagtgtcctcgggtctttgcggggcacttgtgttatctccctaagcagaacgtgagttaacagggactgccgtgatctgcacgcaggaagtgttcaaaggacaatgcgaacacatgcaactgtttctttacatggagttggacttgtggcaggcagaaagtgagaatcacagccttcctcctaaagaaaccacagccagtgaccagggcattccaggaggtagaaaacactggtcacaggtcacgtcacatgagtgctaacactcatggggtaatcttgtaaaggtgaccggaagcagtggctcacacctgtaatcccagcactttgggaggccgaggtgggtggatcacttgaggccaggagttcgagaccaccctggccaataggatgaaacctcgtctctactaaaaatacaaaaattagccaggtgtggtgatgggtgcttgtaatcccagctattagggaggctgaggcaggagaatcgtttgaacccaggagacagaggttgcagtgagctgagattgcaccactgcactccaacctgggagacagagcgagactctgtctcaaaaaattaaaaaaataaaggtggaggaagattatgaatcagaggaatgttacaggcgggaaatagaaagctagtgccagttttaaattctcataaatggaaataaaaattgagcattcaaaatggaattttaggcctgggtaagagacttctttctccagagtcaagctattcaataactctcttcaaatgctcaataattcttattcatacacaaaatttgtagcagaaattatgattcaacagagtgctagtgactcaagatggactgttaggaggttaaaatataattcatatccagtatcatttaaataggcattttcatcagggatgatactgacaattgatgtcagtgataagttattagaagtagttgacaactgggtgcagtggctcacacctgtaatcccagcactttggaggccgaggtgggtggatcacctgaggtcaggagttcgagaccagcctgggcaacatagcaaaaccctgtctctactaaaaatacaaaaattagccgggcatgctggcgcatgtctgtagtcccaggtactcgggaggttgagtcagaagaatcgcttgaacccgggaggtggaggttgcagtgagctgagattgtgccattgcactccagcctgggtgacagagtgagactccgcttcaaaaaaaaaaaaaaaaaagtagtcgacgacagaaccgctgctcagatgggcctccaccccatcctttcatattttatcattgttcctctcagtctcttctttggcttgaaagaacttctgctaaacttcaatggattcaaaatccaagttcaaataacataactagatggcttgaagaacctgctgactaattgtctggcagtgggagggcagaaggcatcaatcctcagggccacaccaggagcctccgatgcaccctggaagtccagcagcgcagggccccttctgccgggggccttgagagagagaagcctagagaaatacaggtctgcatcagtgtgacagcaggtacagggaaagccacagaagggacggggctcaatgtctgctgctgcgtcgcctccctcatcactcccgctccatttgtgttggccagggggctcttacctctagcccaggctcctctctggttcccagctgtactcctgcctccagggtaacactgctctgtccttcctccacatcagcattgaacctcctttccagatgaccaaaggactgctgtgttcagaaaaccttgctttttcactgccggctacacacccccaccaaatccttaatgggacacgccattcttacctcaacctattttgttgttgttgttttgagatagggtctcgctctgttgctcaggctggagtgctgtggcacgatcacagatcactgcagcctcaacctcccaggctcaagcaatcctcccacctcagcctctggagtaactgagaccacaggcaagcgacaccgtgcctggctaatttttgtattttttgtaaagaagaggtttcaccatgttgcccaggctggtctcaaactcctggcctcctcaagctatcaacccaccttgacctcctaaagtgctggggttacaggtatgagccaccccacctggccccccaactatttttctaacattgcctcctcctgtttcctgctgtgccacaccagattttcactaacccctgcagcctccttggctgtgtctgaaatgtcaccgacaccacagtgcccccgtccatcctgaccgtgcttatgtgcccatcctcttcccacaaccccaaggtgaagcaaggtgaagttcacctgtgtccctgtagcacttcatttacactcttctggccttggttttttgttgtggttcctcattttatctcctccattggacctcaagcactttcagaacaggaactgctgtcattcattcatcttcacaccctaacacatactaaaatgctcattgtaagtgctctagtatgtttttcttttctttttttttttttttttttttgagaaggtgtcttgctctgttgcctaggctggagtgcagtggcatgatctcagctcactgcaacctcagcctccttggttgaagtgattcttctgccttagcctcccaagtagctggattacaggcatgtgccaccacgcccctctaatttttgcttttttttttttttttgagacggagtttcgctcttgttgcccaggctagattgtaatggtgcaatctcggttcactgcaacctccgcacctcccagattcaagcgattctcgtgcctcagcctcccaagtagctgggattacaggcatgcaccaccacacccgtctaattttgtatttttttcgttttttgtgcagatggggtttcaccacgttggtcaggctgatcttgaactcctgacctcaggtgatctgcctgcttcagcctcccaaagtgctgggattacgggtgtgggccaccgtgcctggccttaatttttgtattttttagtagagacgaggtttcaccatgttggccaggctggtctcgaactcctgacctcaggtgatctgcccgcttcagcctcccaaagtgctgggattacaggtgtgagccaccatgcccggtctcaagtatgtttttcaaaggaaggatattcatggagacaattgtcattctttaaacatttgatatgcatttgagctagtcacagatagctgttaatgtgtaaatcttgataacaggcttctaatgtcaccatttcagtttcctgtgcagcaaaacaaaaataacattaatttgtgttatatggcaactaatgcacaataatgaataaatatcttaagtattagggagaatcctggttagaaagttgataaagtgaattcaaactcccttttcaagcacttgaaagggagggatggttttccaagatgaagacttaggtttgagtatctccctttgcctgaatttgcttttatgtaaaaatagagggttggattctatctattcccctttaactctaaaattatattattccagcagttttacttaacaagaattgactatcacacaaatggttttgtgctaacgttagcaataaacacctttttaaaaccctgcttttacccatgctcccgggcatgctctaaagttcatttgacttctaataatggatgtgcaaatatgttgagtgatcacttccacaatggtcctgttcctttaagagaccacggttgttaagttaggagatcattgaaccatatgagggtcaataaaagaataaaaagtcactggttagcgattcgaggacaaggaacttgatcccagttcagtgtctgtgggtccatatgctgcccacagtcaaagagggagtcccaggttcttggcagcttgcttttcctcaggatggcttctggaaggctcattaagttcgtggtttttgagctcctagagtttgccgctttctccatccccacactcgtgatcacagaacagtttgccaccgcctaccaaggaacaagggctagatctgacaacacacactactggctgatcatctcctgttctattgcctatgttgcgttagtgactctactgatctgggttcctgtaaaagttatcctgcacaagaaacgttatatttacagaaaaattaaaggatggtaagtaaaagaattttcttttttttctttttgatttggagtctcgctctgtcacccaggctggagtgcagtagggcagtcttggctcactgcaacgtccgcctcctgggttcaagtgattctcctgcctcagcctcctgagtagctgggattacagtcgcacaccaccacacctggcttatttttgcatttttagtagagacgggtttttgccatgttggccaggctagtcttgaactcctgacctcaagtgatctgcctgcctcagcctcccaaagtactaggattacaggcagaagccacaatgcccggcctgtagaagaattctttagtagggaatccccatgatgctgtcaaagatacgtttgtttgtttgtttttttgtttgttgtttgttttaactttaaagttcaggggtaaaagcgcaggtttgttacataagttaacttgtgtcattaggggtttgttgtacagattatttcaccggcatgcaccaccatgcccagctaagttttgtacttttagtagagacggggttttcatgttagccaggctggtcccgagctcctgacctcaaatgatccacccatcttggcctcccaaagtgctaggattacaggagtgagccaacacgcccagcctgtaaaagaattccttagcagggaatccccgtgatgctttcaaagatatatttgtttg

SEQ ID NO: 4878 - DNA, 6000 bp, Homo sapiens
gtactttggtggacacagtttttaactgtgataaaggcctttttatctacttttttattgcttgtgtttttggtatccaatccaagaaatcattgtcaaatccaatgttgtgaagattttatttcctgacgttttcttctaagagttttatagtttttagctcttatgtttaggcatttgatccactttgggttaatttttgtatttaatgtaaggtaagagtccaatttcattctctttcctgtggatggccagttttcccagcacaaatgctgttctttcctcattgaatgcttttggcaccttgttggaaatcaactgcccacataggtttatttctggcctctctattgtattccattggcctatatggctatccttatgcctgtaccacactgtttagattactgtcattttgtagtatgatttgaaatcaggaagtgtgaatcgttcaacttcattctttttcaaaattgttttggctgtgcagactcccatgaaattccatatgaactttaggatggggtttttcatttctgcaaaaaaaaaaaaatcattgggattttgatagggattgcatgaatctatagattatattggataatattgacatcttaacaatatcaagtcttccatttcatgaacacagggtatcttttcatttatttaggtctttttctttcagcaaccatttgtagttttcagtggacaagtcttttgtctacgtagttaaatttattcctaagtattttgttctttttgattctattgcaaatggaattttcttaattttattttcagattgttcattacaagtgtatcaaaattcaactgatttttgtgttttgattttgtgtcctgcaacttagttaaatttgttagtgctacagtttgtgtgtgtggtgtgtatgtgtgtgtgtgtggcgtgtgtatgtatgtgtgtgtggtgtgtgtgtgtggtgtgtatgtgtctattgtgtatgtgtatgtggtatttgtgtgtggtgtgtgtgtgtgtgtgtgtgtgtgtaagctttaggacttcctacatttaaaatcaggccatctgtgtacagagataatttcacttcttcctttttaatttggatgcttttatttatttttttctttcctacatgctcttattagaacttccagtactaagttgaagagaagtgatgaaagcaaataaaagcaccaatcagaacacacagtcctgacatttggagggctaaatccttgttgcccggcctggcctcacctagctgcactgggcgtgtgggctgcttcccccttcacagctgcctgacacagccataaccacagggagaagctgaaattcgctgaaatgtaccagcctctttatcaagctctcccttggatgctccaagtttctgactagactagttcccaaatacagatggtccttgacttaggattgttagacataatgatttacccactttatgatgatgtgaaatagaaatggtgcattcagtagaaaatgtatttcgaatacccatacacccattctgcttctcacttttagtaccatatccaataaattacgagatactcaacactgtattataaaataggttttgttagatgattttgaaatagaagagttcccttatgaccctcgcagggggtgcgacaggaatgaggcttgctcctttggtgccctgctgctcaaacccctagggggagcatgcagcatgcagatgggcaggtgcagaggctgtggggagtgcttttgggctccaccccacggcagcatctaggactcctgaagcccaagtgggcgtgtgttacagtgtgctctttcagctataccatctgcagacagcttgtgttagtcagctcaatagaccctctgccttatcacagggacagggaggcagtgtgacagcctgagttcttgcccagtgtactggaagaatcagatcacatgtgggctggagggttgagtgcaaggttttattgagtggtgtaggtggctctcagcgagatggatggggaactggaagtggggagtggagtgggaaggtggtcttcccctggagccaggctgcctaaccccccagactattctccaaccactgctggccaaactccccttggtgtccagatgtccttcttctctctttctctgctgcgccaccccactgctctccactgctctattccttcactcttctcaatgtttagcgcttgtgtctatgcccattaaggtctcaggtttttatgggcacaggatgcggggtgtggtgaatcatagtggtcttggaaatgtaacatttgcgcatgaaaacaggagtgcctgttcccacttaggtcggtgggcacaggtccgagggtggagccctcgccagggatcctgcccttctctacctagcacttctctgcctcctgtccctatcaattttgcccagttggaagctaatgtaagtgttctcaacacgtttaaggtaggctacgctgagccgtgatgtttggtaggtcaggtgtattaagtgcatttttgacttagcatatttcaactcacattgggtttaacagggcctaatttgatcatgagtagaggagcacctgcagttacttcagtcagttcctgtccatttgatggctgcttagatggagggatgaattcctggagtttcccacacgaccatcttctgtgacatcccttccccaagatttggatttattttttgccccagtggcctcttgtagcctgataaatctttgtttcaacgaggtcaaggtcatggggtaaattctttgtggggtggttggctgcattttgtttaaacttcacagattttagtactgatcctaatttttaattttactaatgtgatatacacacttatgtaattaaaaaacaaaccctgggccaggtatggtggcacacgtctgtaatcccagcactttcagaggccaaggcgggcggatcacttgaggtcaggggtttgagaccagcctggccaacatggtgaaaccccgtctatactaaaaatgcaaaaaatagctgggcatcatggcacgcgcctgtaatcccagccacttgggaggctgaggtaggagaatcgcttgaacccgggaggtggaggttgcagtgagcccagattgcaccactgcactccagcctgggcgacagagcaagactctgtctcaaagaaacaaaccaaccctgaatgtgattatatacataattcaattaaatgtatttgcttctgaaatatatataaatgtaaattaggcagtcacttttgtatatgatttatttatatttgaaagccacaaatgacccatttaaactatttttttcataagccagtgaaacaatgtctgagaaacatttttgttttgtctgttctgttctataaccatcattttttttttcagtcatgtacagccttagtgacaaagaaactttggtcctctgtcctacattttcactatctttttccctccggtcaggataatctcaaatttacatgttaaaaacaatcagtaagagaactacatcacatttctaataggatggaaacttttcaactttatcacaaagacaacgaatgtggaggctttccgtttgaagataaaactattcatttaaaaaattttaaaaattacaatgtttccagtagcttctttttgaattactaacatattccacactctagtaacggtttggccagctaatcgttagtttctgctttaaaatgttctaaattcctgttctacttttgaaaaatgacaacataaatgtttggagggttattttctgcttaatgaaagatctagaaacatattttattctaagaaagaattccacttgcctttaaataaagatataccttttgaccaaacaatcagattttctttttcttttttttcttttcttttttttttttgagatggagtttcgcgtctgtcgcccaggctggagtgtagtggtgcgatcctgactcactgtaacttccacttcccaggttcaaacgattctgttgcctcagcctcctgagtagctgggcttacaggtgtgcatgatcacacccggctaacttttgtatttttagtagagacgggtttttgccatgttgaccaggctggtttcaaactcctgacctcgggtgatctgcctgcctcggcctcccaaactgctgggattgcaggcgtgagccattgtgcctggccagattttctttttctagcaaggggacccacttaaacttgaagaggaccgggatggttgaggctgggcagcaaggctttactgcaaatcctttaccactgttttttctggctttctagagaacgttctagcaaaaggtttctagaactttctccttcctggcctgactgacattccctcttaggtgtagcctccttttcacttttcttctgcctggaggaaatgaagctccacggaactttctgttgaaactttccaagaaaaaaaagaaaggctctaagcactgaatgtggaaactgaaggggatgagcttcaactctgaagtgtttccagcgtaaaactgtcctttccagggcccgtgtggctgtcacttcagagtggaggttgtctgctgagggacccctgactcagctgcttcccaggggaagctccgtcttccggcacaggtaatggcctgcagcttgatctccacccagccccatctgagcaggccgggagctcccaggctgtttcacttctctccttcctgactcctcaccatcaccatcgccctctctcctccccaccccgccactcctctcccacacgtgtccctttctccccttcctctgcgtctgctcttctcagaagttagcttacgaagcaaagttgttactttgaattcctgtttttccagccaccctcatgtgacaggatgtctcctcagtagaggctttccctaaattcaggagccctttaaaagggagggcttcctctgtagttcttttcagctgggcagctctgggaacttggattaggtggagaggcagttggggggcctcgttgttttgcgtcttagttccgccctcctgtccatcaggagaaggaaaggataaaccctgggccatgaggctacccctgctcctggtttttgcctctgtcattccgggtgctgttctcctactgggtaagtctgctctgaggcaggggatctctgacctggggggccggaaccacaccttcctcttctgggttactgtgaatgggttcctttcaacatctttgtgaggaggaaacggggttcccctgcaccacgcagtccacggctaagcctgctgccttcacctggcggccaggcatgggaggcctggagttggaggagggaggaggatgcgtctcaggtctcggttgctgccctgccgggaaccctacagaccttcagtgtcctcctgacttctctcatcgctcgttgttccttccctgttttcttcgtgcagaaatttcctgctctgtggtttactctttctggttttcaattcacactatttctgtctcaccgccaacaaacaccttctgagtgtctctggctggaaggagggcagccctgatgtctccccgcgtcttaggtccaagggtatcatcgcagatcatccccccaaaagagattctaagcaatttccatactcatttttttttctgccagaatcattcagacacttgattgttagaaagttcatccttatctgtattctagactattcaaactgccgcataagcagatcgattcctgtttttcttctttttcaggagattagagattactcattaggaacagctccagagttgttcaaattctcaaataccttttccagtctgtcttttctatttctctatactcagttgcttaaacttcaggatgggagtgcctcgggggattttcattcctggttctatttggagatgatttagaagagatttcaaatttgattttttgatttctgatccccctttaattctatgaaatcaacaaacacttg

SEQ ID NO: 4879 - DNA, 6000 bp, Homo sapiens; identical to SEQ ID NO: 3203

SEQ ID NO: 4880 - DNA, 6000 bp, Homo sapiens
aagagcaggaaaaggctcagctgaagaaaacagaaaatttcttccttgtatcagtggttaatttttagctctaagtcttgtgagggggagtctgtgagtgtggctggggtgggatggcactgacctggttcaccctacagtacctgtgccagtgggaaactagattgacaggaaagtagtataatctattttgggggtagatttgcatatgcagatgagatgcaactgtaggcatgattaaactgttgtgttggtgcagctgctaaatatttgctttctgtctacagtcctggaaaagtcatttacatcttgataacaatgaaaacatatatttctcaaatcagatacatgattccttaaacacacacacacacacacacacacacacacacacaccccccaaaacaaaacagttactatcatttcctagccctccagaaagtgaactctatttccctgggagcccttttcccaccagccctggagcacccatcatcgagaaaaagtcactccaagcctcctgcatctttgctggtacatcattcttggcaggtaataaaaaagaaaagccagtgattgggtatgcattattggtggggcaccgttctctaggctttaggcattttcccatgtattccttgccatcattctagggggtagggaaccgtggttctacagtgaagacactgagttaagtgactcccccacaatcacacagtcaagaagctggagttttaatctaggaggtcacactgcagagcctctgtccttaaccttgatatcaagctgcctctcataataattctcacagagaccatctctttttcaacattcctttttagatgcagaacgctttatccaaggggagtcttggccaaagcataaaagacaacacagacagtagtggaggtgttctaagtgaagcaggagtaagagggtggggtctggagcctggatcctcctccaatttttgtgactctgagtccctggggttcccagggacccgtttctcttctgaattggcccttcctgggactcagctgctcttctcgctagttgatccttctattaggtgcagtcggtcctcatattcacagatttcttatttgcaagttcatctacttgctaaaatttattcataatccccaaaccaatactcataagactttctccgccattcatggacacatgcagagtggtgggaaatgtgcgtcgcctgacacatgtgctctcagctggggtggaagcaggggctgccctgcctttttgtttctgctctcacaatgtcaatgggtactttctcccaaggtctggttagtgccatgtcttttgcatttttgtgcatttggttggtgattttgccatttaaagtggcccccaatgggtttagtggcaaacacctgtggtctcagcactttgggaggctgaggcaggaggattgcctgaggccaggagttcgagaccagactgggcaatgtagcaacacccccatctttacaaaaaactaaaaaattagccaggcttggtgatgcaaccctgcagtcccagctactcaggaggctgaggctggaggatggcttgagcccagaagttccaggctgcagtgagctaagctatgatcatgtcactgcactccagcttgggtgacagagcgagcccctgtctctaaaaaaaaattttttttaataataaaataaaatggtcccaagcacagcgctgcacgagtgctggctggttcttctgagtgcaggagggctgtgccagggcttgcagagaaagtacattcagaatgtgttagatgggtttcattcagatgtgagtgatagtgctgtgggccatgatttaatgtgaatgggttaatatatgtttaatatatattaaataagatttatttgaacagacacacacataaaataaggcaatgtgttaattgattggtgaaagtgttgtcacctaactgtgtatttccccaaggagcccctagtattcactattgcagtgctggtggtaactttataaaacatagctactatgaataatgagaattgactgaactcatcatattttgagagcttcttaccgggcagataatgtgctagaaccttatttaaatgaacactaattctcaaccctgtacgtttagtatcattaccccagtttatagatggtaaaactgaggcctagataatttgccaaagtcactacactagagagaggtgaggccaaggctgagtgccatgtagtgctattgttctctttcctttttgctaacactttcttcttttttctagatacagggtcttgctttgaggcccaaggtagagtgcagtggcatgatcatggctcactgcagccttgacctcctgggctcaagtgatcctcccacctcagcctcctgagtagctgggatcacaagcatgccaacacttggttaatttaaaaacatttttgtagagatgaggctctctatgttgcccagggtgatcacttgaacttccggcctcaagtgatcctccatcctcggcctctcaaagtgctgggattacagatgtgagccacagggcccatgctgaccacttgcgtttagtgaactatcccagtttggcatcttgtacacttcagcccgactcccagctggtttctttggccatgggttgaacacagcactccccacatcttctctctaatccacagacacatacagaaaccttcccatcggtgctgggatgctcttacagagagtcgggagttgatgcccagatgcctccaccttctctgcttcccttacctccagctagcttcaggtagccactggagttaggatttcttttcttttttgagatgtagtctcgctctgtcacccaggctagagtacagtggtgtgtgatctgggctcactgcaacctccgcctcctgagttcaagtgattctcctgactcagcctcccaagtagctgggactacaggtgcccaccaccatgcccggctaattattgtatttttagtagagatggggtttcgccatgttggccaggctagtcttgaactcctgacctcaggtgatccacccacctcagcctcccaaagtgctgggatttacaggcgtgagccaccgcgcctgaccagagttagatttccaagtaaagcaaaatgtcacctagcaggagagaggaaaaaaagagaaagagaaaaaagacaaggaatggggatggggtagacttcaaggaggaagagcaaaggtgaccaggatgagaagggagatgggtgggcatgggctgctcagaagatgccctgaagggtgggaccagaggagccaaccctgagaagcgcctgtcactgacactgggtcattctttacatttcaaaatcattttcacatctctggtcacatttgcatatcacagtcactgtgagtgggtgaagaacacattctttttttctgcttcactgatgagaaaaccgaagcatgaaaagctgcagtgatttgctcatggtcgcgcagggctaatttattccacatttgggatgggctatttctatcacacagcaagagtcagtaattgctttcctgatatttcattttttttttaaagccaataccatgagcagtctattaggagacaaattctcctttattttatacttacaccctgtgactatttcaatatttttacttaactacaatttctcaaatttccttgctcatgtcgaagcatttgactaaaatatagcaaaaccactgttcctttcaagggggtcaaaacgttttccgtggatgggagcatgtcatgtgagcaaagatgaaagtagctttgttgcactcttctgggaatctttctagggatattactaaagtcaagaatagatcagaaatgaagaaaagatggggatataaagaatagctttcatggaaaattgaaatcattccttttaaagtttacaatttccaccctgatcatagatccccaaccctgcaggatgggttcttcccagatatgaaggtggctgcagcgataggattttgacgcaactgtgattgatgtcagcaggtccagaccgtgatatttcatgacagatttaacagacatttattaagtagattcaatgggaacagctccaggctagatggggctgggagatacaaagggaagatgtaatctgtgaaggtcgtagaggccaattagggattgaaatcccacggatatgggttgtcgtacacccacttcacaccagttgctcttattctacaccatcatttcacataagcctcccacaaatggcaagtggaatggcatgattctccttattgcaagatgaggctatctggaaggatccaatgacttccccagtgagtagggggctgccccgggctttgcacccaggcttttgtctccaagcgaagagttgtcactcactgcacaggaagcagcaggagaataaccaagtcacggtctaaagttgggacacccaactgagtttcagatttctgcctgcaccaatgacacaggaattcagaataagggcgagatccttgtgggttcgtgtgatggtggcatggcgattcatgcttgattgagaagacaaaacgtgaacactttaagggcttcttgcacaagtgaagtggttgtggaaatgttttcaaggaggaaatgcctttttaatagagaaatttacttggctagttagcagaagttttctttcttgggttaaaagtagttgctgctattatatcctgaagcatctggctgtcctggtggggacatatgagcgctgccacaggccgggaatatcccaggcgagtaagaatagcccacaataagagatgactgctgcttgctctgctggtcactgcagttgtcaggaatgtttcgcctcagaggcaaacggcttagggccgtctcaacttggagacagaaaaacccacctcctactcctggctcagacctttgctttcttatctccagctcacacctttaagtcttatgtagttaaaggacatttatccgcctccttggagaacacagccctccagtgtctcctgcagcctggagcctgggacattctggaagcatggaaggcgtggacttgctagggtttctcatcatcacattaaactgcaacgtgaccatggtgggtgagtattgggaccatctccaaactcctgcgctgtttttatttccactgccatggtggaattgagtccttaaagggtccaggtatttactcattttcagtgtgcaagcaccaagctgaaagtccacccactcccaaaagaaagggctgtgcctttctggagggaagagagctgaggcttctagtttctttgaatggttccgcggttcctccgtcatgtaagggagtcttgcgtttgacattgttctctcacagatcatcctgtgctgacactggggtgctgactccaaagaccaaagcaggtggaggggtgtttgtgtgcaaccctggtgtggctacgttaccaggaaaaggaacagaacaacaaatgttaatcagaaggtgatacctttaggttttattctggaagcttggttttttttttttgtttttggagacagagtctcactctgttgcccaggctggagtgcagtgatgcaatctcagctcactgcaacctctgcctcccgggttcaagtgattctcctgcctcagcctcccgagtagctgggactacaggcgcctgccaccacgcccagctaattttctgtgtttttagtagagacggggtttcaccgtgttagccaggatggtctcgatctcctgacctcgtgagccacccgccttggcttcccaaagtgctgggattacaggcgtgagttaccacgcctggcctggaagcttaatttttaaggagtagccatttctcttgtgcactttaaaccaaatcccaagtttagttattttttttaacaaagaaaataatagatttttgtttaatgcagacgactcacattttcagagaggtatgggggtcagaaaaggatga

SEQ ID NO: 4881 - DNA, 6000 bp, Homo sapiens; identical to SEQ ID NO: 3205

SEQ ID NO: 4882 - DNA, 6000 bp, Homo sapiens
gcctcttatgtgattggtttgggggacacaggtggctttctctgtttagttcagtgggcaaaaaatagggaagcttgcagttcctgaccaagtcctaaccattctgggataattgttacagaggctgtggtttggcttcctggctagttctgcagagaatctgattcaaatcctctggccgtatgtggtctggccattgtctgtttgcatgttcagtctcttagtcccccttgtcggtcattttcttgtttgtaaaaggttggccaactcaaggaagtctagagatccagctcttcactgctcagagattattcagttgtctctctggtcaaccgtattgtgagatcttgatccttctgttgttatagcatcacagtgctcatttgacaagaatgggatgcagtggaacaacatcaggaccactatgacagaaacaagagcaactgtccctgtgagacgctttgaacgcaaacctcagctgaccaatgcaggccaagagcaaatcccatataggccatgaggatcaaccttagaaagccaaatagcttttgcctcaaggtgatgtgtgacctgttctaccttctcttgtttcactgatccagatgcagtattagcagtggcagaggccatcaccaaccaacaagaaatctacagcaatgagactgtccatcactactcatgccaatgagttgagactgataggtgccccatctagggaagaaggggcattgctaatgacttctgccagggttaatgataagtttatgacaacaggattcccacagatgagaacattgctctgattgtttgcataaacaatgagtcagtaactccccagttagagtgctgaataaccaagggtgatgttacggtttttgcagttttacaccaaccggtttgtggtaaatcgttacagcaaccctaggaaaaccaacgcaccatttctatgtatggttaatgcatggcaggtgtttaaaggtattgcaggatattggtgcttttcctttccccagtgcacctcattgatctcaagtgagggatttttctttttgtcttgatttttgttttctaagttgaacaatctttttttctcagtgtcctttctgtatacagtatctataagtgcccttgtcagtagctgactggttggggaggggctacccagctgtttgatcagcagggccacaagttaattttaggtcctgtcttatttttgttctaaagcacttttaaaatgtctgccaggtgttgtagttcaggttaaggggctatttcccattctcatttctgtttttgattaggtctccgatttcagatttagctccttgacaacaagcaatgaaagggccactttctagactcccaaatgatacaatgtattttctagcctatcccaaaaaaaactcctgcaggtccttttgtttgtttgtttgtttttgcatgacaagggattatggtctaatctttttggtggggggaatgtttgagatatggcttttagaagactttgccctatgttttgagcctctttgttaactcttcagttttattgtggacagtgggatcctaggatcccttttgggggagtctagtcaacttttgccattcaggatttagcatgcaaggttctggtcaatgtgtacaagttgatatgggttaggtaacactgggtcacatgcttccccccgccgctttgcgatagggtcttgctctgccaccaaggctagagtgcccgtggtgcaatcatggctcactgcagcctcaacctcctgggcgcaagtgatcctcccatctagcctcttgagtagctaggactacaggcacacaccaccatgcctgggtttttttttccatagagatggagatctcactatgttgctcatgctggtctaacttgtaggctcaggcagtcctcactgattcaccttccaaaatgatgggattacaggtgtgagccatagtgcctgaccaaagtattcttaattattttatgcatagttgctgatcttgcctgggtttggggaaatccttaattatggttattaatttagcttgggtctaaggtttaaattccacagttgtctgtatatggggctcatggaggaataggccttcagagaggcagctggcatcctggggtcataggagggttgttgtgaaagggcagggatctggacaagaggaagagaagtgtggacagatgtgtggaagggaagagatcagaaggataagggggagaagagggagagctgtattagggaagcaaatggatgataagcagaaggatttactaggaaaatgagtctaggttgttgctgcttaagtttgccaaatcgctcatcagctttagccagagtctttcagggaagcactttttgaatcagaatatcatttggagacctctgactaccaatcaaaaaaggctgctcattgggcctaagaaatcttattctctttcgtttctaaggcatctctcaaatgagcaattttgttcaagttagatgttctccaaataagatcttcaccaaatcaaccttggtgaagttaatgcttttcagagatgggcgtaaggattagaattgttagagagtatatgtaagaagcaggagttttttctggaggaggagatttaaacttagacaacaccatgaatgctggctggtgaggctggcgagaaatggaatgtttgtgtctctcaggacatgaaagcgagacggaaggagaacctcattcagttttactggaaacccacagcaaagtttctccaagtagaggccggtgtgatgagaactgctaaatcatgagctgcgaggctggctcaaacaagaggcttatgagccccatgcctgtgtcctttcctacggttttccttcttatgacaagcagcactttttgacagcacaacactaaacactaacacaaaatacagtgaaaagggataaaaagaatggcctgattccactagagatgccagacaaatgagaatcaataacaaaaccagagtaccaaactgagaataaatagccagagacctccacgcagagtgaggtgagccctagtgctgaccacatcggcgcacctgataggccgagaacatggaggcatgaggggcctctgggtggcacaatgggtggaagcctggggacctcagggacaagcagtacagacttaccatgggatcaccaggaaaactgtggaaaccagcaaaggctatttattcacaacttgctatagcaggggaatcagccagcatcacttacttttggtagaaatttaaaaggcccgaaagagatgggaaacttttattgttttgttttgtttaagtatcagattggaaattattggcaggaaatgtttttaattacatttttctgatattaaacccaacacagttgtactttaatattttccctaggagaactacttattttacaactatatcccagtgtatcacccatgatcagccacataatttgaatcatgcattatcttctctccacattcaaattacatacatttagtatttggctacttaaaaaaaaatcattaaaaagtaacaatttaaatccattgatgggagaacctcagttagtttcaaaacaacaattcttgccaggcggggtgactcacgcctgtaatgccagcactttgggaggccgaagctggaagatcgcttgagcccaggagttcaaggccagcctaggcaacagagggaggccccatctctaccaaaaaaaatattaacaattagccgggcatggtggcatgcacctgtggtcccagctactcgggaggctgaggcgagaggatcgctggagtcggaggtggggaggctgcagtgaaccgtgatcgctccactgcactccagcctgggcgacagagcgggaccctgtctcaaaaaatagatgaataaataaataaaaacaattataatggaagtttggataggaatttaaaacatgtggcaactaaccctgaccctgcggcttcagtctccccgccgctagctgagggccgtggccgctgcacagaggcttgtgaggattcgggggttcaggcagcgcccgccgcgcatctgccagacgtgcggccacagggtaggagcagtaagaaggatccagggaaaaaagtccacgaatgagaaaggaaacccagcgtttgtagggctaggagaacaaagaaagaaaatgctggcggcggagggcgaggctctgcggtgcgtggcagatgggaatttgctcggtggcggctcctctttctggagagcttcccagcgtcccctcccccgccagcccgcggtgacgcgcccggcacccaccacagccggctctcggcgccgtcgcgccttcgctcgcccgcttaggccgtgctcgcggtggcgtgggagacagagagcccagggaggaccctggaacatgcagtggtatggaagacgcctaagaaagggcttctctttccactcacgaaaatcagtgtgtgagctcgaagccatttcccagcgtgtccgcctcaactccctcattcaacagatgaggaattcctccagggaaatgcagtgatgcgctcacggctgccggcggcccagcgccaaggggcgctccacagccccgcggcccgaagccctcgactcggctgccacgcaggccccgcggccccgctcggactcccaggatcggcttccgagcgggacagcgctgcagtccacgagtccgggcaggggcgcctccaggccggagcggtttcctgcctcgggcactctgctgtctccacaaacggtttttggaggcacacacacggatactttaaacacgtcggtgatgaatcggtacccagctgccagtggcggagcttcctgggcggggccgcgggcgcgcggcggcttcatttcctcgcgcgcgccggaagtggcctctcaggcgcggcggcgcgcccgggggtgggtggctgaggcggcggcgggcccaaggcgtgaggcgccgcccgggtgtccccgcggcgcaggaggcggtggagcgcagagcgggcgagcgcggtgagtacctggcccggcctcgcccgccggtccgcgactcccgccggctccggcccgggcggtgcgggcgccggggctgcgggctcctgtgtggtcgggtggggtcgcctagcggaccggtcctgcggggggccctgtctctcagggatgagcctgccggagtcggcaccggttttagggaaagcgcggccagagacgattggttcgcttgtcagtgttgggttttgttttgtttcgttttgtttttacctattcatcaccatctctgctcctctcagtggataaactttttaatcagtggtgacctcgtcatcgcgttaaaatagttctgccctcagcccctctttatctgtagatggcagagcgagcgccggtaaagatgctctgtcgtggagggctcagtggggcggaggagatggggagcctctggcgttgtcggagaatgcaccttaaaaatgactctacccttgagcaacgcaggaagcacgacagtgatacttctgtttgtgatgatggtattggcggtatgatagtttgattatacatctgaagcttctcttcctgagtccttggcttgttaaacttggaggtattttctagcgtgcttttgagatagatatgggatgtcgtgacgtttcaccgtcattcaaggctcgcgggagcagggccttcatgtctggtaattaatgttgttttttgaatgttgtattaaaatagtagcttcgatcttggaagtaagaagccaagtattttaggactgagtgttagcgttcattttgtattattgttcttgtaccatttgtttaaagttgtcatgtaactaaaagaatgaaaaaagatggatttccagtatttgtggctcagaggattttggcctaaataaacacagttccaaccagtttagaagctgcatttttctctttgtttttgtcgaggcataaaatacatatgaaatcaataagagcacg

SEQ ID NO: 4883 - DNA, 6000 bp, Homo sapiens
agaaaagaagcttggcatccctgcaggggtggattgtcagggtctggaggcaagggacaagtgaagggattaactgtcccactgtgggggaagatgtaggatctgggctgggggcaggcagggagtggtctcaatggaggagggaaatgaatctgagacattaattggattgagacggaaagaaagtggagagaacagaaaccaaagggatttggaggccatgcttccaacgaatgattcatagttagtgtcagggagccagaaaaaaagcaagtgagcaaggtcctgtccctgggagctgtagagaggagccctggggcccacccacaaagcagcacctgcagtctctttccctctcgaagcccagctatgttgtgcacaaagcaagtctgggcaccgaggacaggctggccaagggcaggcaggcaggcacgtagtcctctggcttccagccaccacactcacaggtttctgggaaaggctgactggggccactttgttcctttgaatctgagaatatatgactggggaagcctaaattaattaaatgatgctgaggcccgcctgagccggtgcacaggggatgggttatggagccctgagcaaactgcacccctagcccccagtgctggaatccagagaggctcatgagctcgattggaacgaagcctgtgcttaagtgcttccagagagacaaagaaataataaatcaggagcaggtgccccacccacacactgccatcaccaacaccagcctgcttctccacagaaatacagtggtttcacctctctggaaccagatgtttcagggaagcaacaaatggcaaagccctggaaatgacatggccccacaaccttctcagaaatgaggccaggctgggctggcacctccatccacagcagcaccccaccaccacaacccacccaagacctccaaacaccccctagacctcacccaggcactggtgcagcatggctatccttccacccctcccaaactcccacacaccaggactcccccatccccagcaagcccccctcccctgacagggcactgatccagcaaggaagaaattttagtccatcagactgtggacacagttgtatcttgtggataaaatgagaagaagtgttgtcagctagaaatcaccaatttgtctctatccatataaaataataacaattaaactcctactaggtatcaagcattgggctagacatgttcaagtgagctatctcgcagtctttagccatcctgcagcagggccacatggtggctgggagcaggaagctggaactaaatcacctgcatgggaatcccatctttaccacttgtgagctctctgactgaatacattactttacctaagtgtctttgcctataagaaagtaatatgaaggttggtgagagaattcaatgagttagtgcttatcaaatgcttagaacggtgcctgatgccttataagctctactatgtgtctagtaaatacgttccttccttcctctactcattcaactttaattgagtaccagatatgaacgctgccctaacagctgctatttctggttgagaaaggagagaaaaatgcttccgttttctcctacaggattggacaggaagttctctgttgcctgcaagttatgctcagatagaggagtccggaaaggaatttaccaagcgttcaagtgaagaggaagccagaggggcggggcctccgtgggaggcttcttggttgcggtggggccggggccagcaccctggacagctcccggcggctggcggggagaagaggctttgccaggtcccatctcggctcagaccctcccgtagccttttgctgcaggggcctgacgcctccttgcaaccccggcactcccgtatttggagccacgatggattgggggggcgttgccctctgatctgaaagttagagaatgagggagtttagtgtctttggagcctccttagggagccagcccaggaccttcctcctcccatgggtcttgatctgctcctcacccctacactgccagcgtgcggccaccttggagatggagcagcaggagcacgacgccgtgccgggaatagggaagcagtgtgaggaccacaagacaggtcccccagcctgggtttaattccaggatctgctgctgggagcttgggcaagcacccagcatctccacgcccagcttcctcacctgataagaccaggggaatagcacctacactgcaccaggattgcaggagaatggagtaaaacagcacacacaatactcctggcacaaagcaagtaataaatgagtgtgcctcctgccatacaggaaccgaggactggagagctagtcatgagcccagagatacctggcttcatgctcaggaacagccatgtgggccagagggctggagatgtggtctgcaccttgaaggccctgggaaagttcctgtcctctatgattcctctgttcttcagccactagacataaaaaaaaattgtccttcaagtcctccttcctcctttctttaatcagacaggggaaatagcatgtgcataaataataattgttttgtaggctgggagactgcccctttaagagcctcataatgggagagtcagaagagcccagaggtctcaaacggaaatgactggagaaccagcaagtggcataagtgtgtgaagtcagctggggcgagattgggatgtgctggagagtgtgcatgtactgacgaaaggccatcaaatacaatttaaaataattagcccactccaaagagtcttctgcagcacgcacttctgctaagggctgcagtgagtgggctctcacctcaacctgaaccagacggaggctgaggctgggccccactgaggggctgtgacttgcccaaggtcatccagggccaggcctgtgcccacattgggactcttttcctccctcagacagagggcacttcagtcactgcagagcaggtggcagcagcccttcagtggatgagtttctcctttcccagggtgactgggtgggtgaaggaattgagcaacaggtggccaggctgccgcctctcaccctgacacattggtccccatcccctcatcctacagccatctcagggacagatggagacattccaatgccctccgggtcctccaccaacccagacagagcctggagtcacaatgcccacctagccagagggatcagccagctagccaagtgccccctgtgtctttcatctgttcttcacaagacccacaagtgaaaaatgaggataaaccgcacattctacacacgataacaacatagcaagtccttatactgctcttactgtgtgcccggcccccttagcagtaggtactattattattcaattttacaaagaaactaactgagggacagagaggcaaagtaattccctgcaggtactctaatgagtacgtggcagagctgggagccatcctggttgtctgcctcgaaagaccacactctttgcactgcatcgcggcacttcctgcggggtggggggcacaatgggagaagcatctgcgtctaatgctgctttacttttgaggccagaaaaatgggaaggctcccctctgactctggaagagagacgcaaaccgtaatctcaacaacacaatccccacctccaacctcagccgccctggagcctctctcccgccagtccgcccactggaacacgggttccatgtgccatccagggtcaacgccgctctggggacgcgtcaggcccagcgcacagcctgggcagctcagcctgtcagctgagcacgggcgcctcaaggggtgcggccctctcagaaggaaggtgagtctccctggagcccctgacgacagcgaagcggctgggcgctctccggggagtgggcgcggcacccaagaagggtttcttacagttccaagagaggaccccagccacagtcactccagagcccacccggggcttggaggaggctctggaaaatgagggatgggggagtgtgcagaacagggggcggaggctggcaggagccgagggagggcttggtcgggtgcgaagagtgcctgggaggagttagagtggggagggggtgcggcggcggggagagaagaggcggagctgggggaccagaccgctaaaggagaaagggggattccaggcaaggggaatgtggccaggcagtgcgggagggcggcagcggccaggctaatattcgcgaccccgactggggcgcggcaacttctgccctcagtccccacaagctcccggccgcgattcgcggccgagaaattctgcggaggggccggtgggtcagagccaggccaggcagttgctgagccttcccctcccctcctggcgggagtgtgtgtgcaaggggccagggggcggagtcggagaaagggttgggggtgtccgtgtccagcgctcctccggacgcggctccacaatccagctgcgagaacagatggacgcagcggcggctcacctcgggggcttcctgctcgctgtgcgccgaggtccaggctgaagcggagatcgcaagcctctggctcccgcctctcccaaggggcctcgaggaaccggctgccgcgcccccttccccaagaggagaagagcgggcgctgaccccgcgagtcctagaaccgcgggcggggggcaggcagggggcggggggcagagggccagctaccggcgcggaacgcccatcccaggggctggttcaagacttccacaccgagagcccttcctgggcctccagccctggagcatctggagagcggacccctgcccggccacgccccgcccccggcccccgccccgccgacgtcgcattagcatgagcgacgtaagtggcccgggcaccactcgggggctgggactcgccgcgtcacagccccgagtggaagggaaaaaaaaagaggaggcggcggaggaggcaagagccgacgcgaggggaggggagcgcagcggcggggctaacgggcgggcaagcgggcgggcggcaacagcatgtccctcggccagcgcgggcggcctcttagcgcggcgggggctgctctgggcgcgccccgggcgaagtgcgcccagtctccggccccggcccctcggcgcgcccgacttcccggccgcccctgagcccagcagccgcgggtcccgggatcggctaagagtagctgcaacgcctcgccggacggagtcctttcctttcccgggacgctgggccatgagctccgcggccacctgaggcacaggggagtctgctcggccaggacagcctccccgaagtcccgtgccctcgcctctgcactgcgggacgccagcgctcggccctggcggaggcgtcctcggaagagcatcggggtgggggcatggaatccgcggaacctgcgggccaggcccgggcggcggccaccaagctgtcggaggctgtgggcgcggcgctgcaggagccccggcggcagaggcgcctggtgcttgttatcgtgtgcgtggcgctgttactggacaacatgctgtacatggtcatcgtgcccatagtgcccgactacatcgcccacatgcgcgggggcggcgagggccccacccggactcccgaggtgtgggagcccaccctgccgctgcccactccggccaatgccagcgcctacacggccaacacctcggcgtccccgacagctgcgtggccagcgggctcagcccttcggccccgctaccctacggagagcgaagacgtgaagatcggggtgctgtttgcttccaaggctatcctgcagctgctagtgaaccccttgagcgggcccttcatcgaccgcatgagctacgacgtgccgctgctgatcggcctgggcgtcatgttcgcctctacagtcctgttcgccttcgccgaggactacgccacgctgttcgcggcgcgcagcctgcagggcctgggctcagccttcgccgacacgtctggcatagccatgatcgccgataagtacccggaggagccggagcgcagtcg

SEQ ID NO: 4884 - DNA, 6000 bp, Homo sapiens
acctgaaatcataagtctatcttgagcttaaaaccctgatttaatctattctattttaaataaatagtaaaagtacctcaattatcttaaactagatgtttctctgccacttaacatggtcaaacacaaaaccatattttaccatgaaggaaaaacaaaagcttctgtctaaatccttaattgttatagttaaggctactactggaaatgtgtaagaatctcagataatgtcaatttcttactgtgtgtgcttcccagatccagccatcacagatgtattttactttttgtgttgtcagctagtcaccatctttttctaccaatacctatagtgaatacttaatcagaacctaatctttttattctattgctatctgatcattgtattttcagtatcatttcattatcattcaatctctgaagccaaactgaacctctgttgtaaccataattccataagcgactgcctgagagaaaagaggtatccatctagcagcagacagaaaaagaacagctttcttctgttatgtcagtcttcttaagatcctctctctccccctattttctaaacaactatgaaagacagactcatttagtaattttagcctttctccaaataaatatattttttagccactgaaaatgctctcttaatagaaatgcgaaggtgacctagtattcagtctcattagcattctcattaataattacagcgatcagacattatctttgtaccctctaattctgctctcactacctgctctcctaggtactttcttagtctctgttgctctgctaataaatgaactcttttaacatgcagaagatgcacattccacatatctcctaggaaaactaatatttaaaagagaaaccaatgcttttaacagtctaattacccttagattttaaagcctcttatttttgatcttcataacagtatcatccccatattcaacaggaaacatacagtgtgatttaccaaacatcctattaccggtagtagaactaggtctcctgtgagaatgtcctttgccctaaatacattgccttcctcagagaagaaaagtgtctttgcagaacacaatgaaggatgcgctttatatagcacaatgtatgaatattagtgatatatgtataaaatcaaaattaagttcagtacttaaagaaatcatatcttctatataagaaatgatttcaagcactccaagagaccacactataaaagcttctaggcagaaggtactatatttccttttctcccagtgcccctagcaccttatcttatacagtgaagtacttatctaatggccacttttttttttttttttttttttttgagacagagtctcactctgtcacccaagctggagtgcagtggtgcaatctcagctcagtgcaacctccgcctcccaggttcaggtgattctcctgcctcagcctgccaagtagctgggattacaggtgtgcaccatcatgcccagctaatttttgtatttttagtagagatgaggtcttgccacattggccaggatggcctcgaactcttggcctcaagtgatctgcccttgtcggcctcccaaagtgctgggattacaggcatgagccaccgcacccagcataatggccacttatttcttagcaaatctcaactatctgctaataaatttggcagatttctgtgtatctgagacacagtccaatacacagaaattataaacaccctccactaaaatctgggcacttttcatgagagactcttctcagatgaagttactcttactttagatcaacagttctcaaccacatcagattcaatgtgccccttgcataaaatattttccaacttctgctttaccaccctgaaacaaaataacaatattcctacaatttcaaacaaatccatataccctaaataagagtggaaaagagacatgaaaatgatttataataacatatatttcgacgtggggcaaaactacactagaagacttaaagaagtaactagtagctgaatatatctatgaatgcagagctgtttgtgatacaattttccaaaactgtaaacaattcttggtcaagttgtgaacaaaacaatcttccttcaattcacataaccgttgcatgtggaaacagactcagttaaaattcagtctcagttaaaatcatgatgcaagatggaggttccaggctttgataattacaaatactacatgaaagtcaggcagatattcttaaatcatgcaagacatggggacactttgttcaggactgtcccacacctctctagccttcactcaacaaatgcaagttgttagctccaatcattacaacaatctaaaaaatgccttccagtttccccttggagggcaacaccaagctggacccaccgccttaaacacagttccgctatctatcccagtataatgtaaacaagcttgggaagcatgaattagatctccagttctgttaccaatgacctatgtgatcacccgccagttgagttaacttctctaaacctcactttccatggtaccaaaagggaataaacgctatatggctttttaagttgtcagaatgactcaatgacacgtgtatagcacatagtaggtggtttccaacccatggcctattgagatgtgaaaaaaggcactgttccaggtaaatagaaagaaagcagcaaaaagtaatctaaatgtggaagaggcagaagatataataagcatacaaaatgaaacttaacgcacagcagtctagggacatttcagagagcagccagccatcctacctaggttgccttcagcaacccctgaaggcattaatgtactaggattagctgaaataattaatattcacaatgatgacctccaaagtaaaaaggcaagaaagacatttttaagagacttccaatgtacgtggctgaaattttttaaatctgatgcctaaagagtgactgtatttcacaaacattattcaaatttttattggacgtttaccctatctgaggctagatagttggaaaacacaaagaaatctaatacaccatgtctgttctcaaacattttaccattcagtacattagacatggtagaggcagaatgacacagataagaaatagaaattcaagtaataaattatgagagcacagacaaaattaggaataattgtccctgaggaaaaccaaggatgtcttcatggcacaggccactgaaaaatgagagttctgataggtacagaatggggagcaaagtgttaagggaaaaacgaaatctgggcaaaagcactgagcatgaaaatacaggttggctgaaagaagagaggtagggaacgggtacattaggagttgggggtgaaagtagtaaaagtaaaggctgtaaagctatttcaggacctttcatgaagggatctgaatgatattcaaattcatttgagttttattgaacaagagagttcgccaaaaaactggtgcttatgcagcacacctgatcctcaaataatgctgaataatggccaaaaataaaagattcagagttaaatgcaaattattactcaaattcctgaaataaaaagtcttgacatgaattaataagcgaaaagaacctaacccaagagtagaaagtagcttctgagcttgtttcttaaataatgaaatattacccaatttattgactgagaactgaaaataatttaggataatctgttgtgtcctttgattgtcttccatgcaagtcagagtatttcctaaacatattatttagcagtgcctcatatcacccttgaaaggcaagagacagactacagtattattaccccctttttatcacagggaaactgaggaacaagaagacaaaattacagtatggtcacaaaagccatcatattttctaggactttaattaaaggctccaagcctacatttcatcttttattcttcgcaccatctgaatactagaattatcttttactatcgtcttaactggaaaaaataaaaatatctaaactttaacatcattttctcaatttggtactgtcacaaaaaaaaaaaaaaaacagttttaaaagtctgcccttgaaatgatatttgcaagaacagcaaggtgtaagcagtaacccaacctccaaaaaatacagttgtaaatcttacagctgtaatatagttgtaaatcttaagacaggtcaggaatcctagacccagcctttactttgaacatctggcaggcctcagggaaataatggagattcgtgtctgtaaacagtctttgcagatgctctgatgaaaaggtgccctaagaggcccagaacagtggtatcactgcacccactactgcaaacatgaaatcctcctctgtccctccctgcattgcaccacgagactcgtggcacacacggaggcctgtgcaagaacctctcgacgattcctttaaaatgtggtaatataaggacgcctttggtgctgggcctccgtaaacactgaggataccggatgtggccaggcacacctcaaagtcttggctctccaaaaccagggcctggtcgagagttttattggacaccgagttcctgcgaatatctcacttttcacacaggcactgccaatccctaccctccagtacccttcctcagcctcctgccccactctcgccgcgagtgtgggcgtcccaaagagctaaggagggtaaggttggttagagcgcaggggccaaggccgcggcagcgaggccgtccagcgcgggctaggatcccgccagcccagccctggagcccggccgcctggccccagccctggcccgggccaacgcgccgccgccaccgcctatcagcggagcgcaggggcggggtgctgtccggactaggctgccgggccggcgggcgggggcgggcggggacgggcgggggaccgacctctgcgcagcccaggccgccgcgcgcacacaccgggcccggctcctgagggcgccagcgcggccccggggagcgcgaggagccggcgaagcgcgcggcctgccgttggcggcctggtccgcagcgccctgcgcccacccgccccggacgtggggcccaagcccccgtgaagatggtgtcctggatgatctccagagccgtggtgtaagtgcctctcactgcgccctgcagccggcgcgaggcccaggggagctgtgggaaggggaaggagccgagaggaaagggaaggcctgggcctgggcggggacggggtagcccggcctcgggcctgccgagggtctgggggagccctcggcttcctcaccttggtccacgtcgctgcggagctccctgcgacggccgagggcctagctgcggcgactgcggctgcgacggcggcggcggctgtggcgctgctcggctgcgtgcggtgcggcgcggcgcccctgctccggcggcgctgggtgggcaggcgctcagggcaggcggcgcgcgctccccgctcctgctccccgcgcagcgcggcaccgccctgcgggcccgggagcggcgcgcctcgcagctgctccctgcgcaggctccgcagacgccgagcgcgggaggctccgcgatcctcccgaggatgcgacggcagtgccgagcctttgtatcccgcggctgatgcgttgcggtgtctctcttggcggctgattgccattcggtcacgtgtggtaggaggagagatttgtctaaaaaccggagaccgctcccagcccaggatccctgggaagggtcctagttttcccaagatttgcagcttaccgagaaaggtgacaccggctgctcgcccagatccccgaattcggccctgtctcggcggaaatatttgctaagtgattgaaaggctgcaggtgcctgttgcctttgttcaaattatgggttcatttcattgttctcctaccaacaagtgctacaggtctgtaagaaaaagaaattccttgagttggtggtgttaatcgtgtaaatgtatttgaatacagtttaaactgattttctctcatctccattttacccctctcc

SEQ ID NO: 4885 - DNA, 6000 bp, Homo sapiens
tgtcaaagacagcctgatttctggcttcttaatagctgccttctcttgtagcagagagagagaagaagcaagctctctcatttctgtctctttttatccttataatcccactgatctgtcatgagggctccaataccatgacctaattacctcacaaatgctctatctccaaataccatcacattgggaattggggtttcaatatatggcttttggggacggtaaatgagaacatccgatccacagcagtgatccttttaataggttatttgatcacatactaactctgcacaaaaatctccagttagctccccgttttctccataataaagccagtattcttagaatgtcatccaaagccctccatgacctccatctccaattattctatcacttggtctctccattctagactcattggcctccttgttgttcatggaacacatgatctgcttccacattaggcctttgcactggccactccccatatatacatttaagtctcacaagctcatatccttcaaggtttgctcaggccagtttcttaatggccctaaccatcctatttaaaactcagcccacctcataccttgcactcccaatcttccttatatttttcttttttttcatagtacatatgacctactaatatactgtatatgtttatttttaattgtctgtcttatccctttagaatgtaatcttcacaagggtacaggcctttattttgcacacagatgtattcccagtgtctggaacagtgtttagcacacaatggttattcaaattaaatatttgtaaaataaataaaatatctgaagtcaacaactgttaagatatcagtccattctctttcagttatgaatttctaagtttatatctggcaactcagtttcatattggactaaaatttggcagtattgccaaactgagatttgatttatttacccaatttaaacaaaatatgtttagctatttgaagtcctataagcacaataaaataaaaagtctttagatacatgacactatttttataattgtataaatcattaaggccctggatgcattggggatatttaactcgtcaggtagtttacggtttgttctgtatgcgatattaagtgcaaaagaagttgctagtttctaaatacataatgcaatataattttgcttctgctgaaaggcaaatcagaaataatcagctcgctatagtcgacaagtaaaaggagaaaaaacttttaaaaagtatacaggcaaattactaaaatcttttagaacacagtcttttctttttctcttgagggactactctatgtctttgcagtaacttctgcagcctcaagtattcagtgtggcttagaatcacattattttgttttggatttctcaactagcctcatggataatcttccctcttcaaacaatttattatcctgaaccagatcagacctggttgtgatgccgacttaaggggtcgtgccaaagtaggggccatacacagttcctggaggctgactcagtccaagagtggctactgattactgttgagaaagagattgatggtcagtatttttttccttaatattatttcattatgaacatttttccttgtcaatcaatacattgctaccaaagcaatttttgttgtagcacatcattcctgtcatatagttttgttttatttttattttattttttatttttgtgggtacatagtaagtgtgcatgtttatggggtacatgagatgttttgatataggcatgcaatgtgtaataatcacataagggtaagtgtggtatccatgcccttaagcatttacgctttgtataaaaaacaatccaattatacttttagttatttttaaatgcacaattaattcattattgactatagtcaccccattgtgctagccaatactaggtcttatttactcactctaatattttataccctcagttgttagtattaagactaaataaatattaatcataagatccaaagggtaggtgtaaagtcagaactatgcagtaagataagatcaggaaccaagataaaagaaaaatgtctgaaaactaagagcaatgtgtgtaacacagcagagaataatattcaccgtaaataattcaagaagatttatcccaggaaaagcaaagtgagagcccacattctcagtgggttcctctgttcttctgtcaatgggaagtaaagtatgatgagcaagaagcacaaagttaatgggtcctccagcctcctggagtggctctctgcagctcttgggcaaaacagatgtctcaatgactacgtgggagagtgaggggaaaactcagagcctttcaagcaacagaggtgtgagagagaagttatcaatataattctcattagtctgtttttgagagatacaagttgtcaagcccatttgggatattaaatgataagggttcagtattacccttctgtgctgtgcaaaggagaatagtcaaaagcatatttactgttctcatgaaatttgtagtttaactatgaagacaagatatctgtgaaaagtaaagatcactttctgatcaactaagttttctcactttctagtttttgtctttgtatatacctcctttaagaatactttctccaaaattgtttccagtctcactgactgaggaaattttcaggactcaatcccatgtacaaatgttgaacattacataatcagttatactatatccattgtacttgtgactgatataaaaacatatttttttcaatagctatttattgcatgtctgcaatgtgccaagtgctgttgtagatattaggaaaaatgaagtagacaaaacattgtctttgtccttgtggaacttacatctcagtattataagtgtgcaaaccctctcttcctactaggagaaaatattatttttaatcattccttcacagtgagtttcttaaacttatttcatcagagactattgaaaagcacacactcttccatccccctagaatgagaatcctgggggagggattgggcagtctatctttttaagaaactcactggatgtttcatgtgcattcacagcttaggtaactctgggggaaagcactgccctattaagaacatactgcccaaggaattggtaatatccattgtactatatctgtaggaccccttttgattgtcattactagcctttatcaaacatctcatccttggagaatgtgaaagctctccacggttttccacagacagttcacctaacaaaaaacaacaaggcaaactttttcaagaataccattatttttaaataaaatgcctctacatggcagatgttattatgttctactttggagatgaaaagaatcgaacattattagtcatgatccacagaaccagaagatttattttaaagataaagttcagatgatgaacataaaggaagttatctcatcaaagaaggcaagactgagtaaatctcagaaatccaccatgtacaatatttaaaaatgctcactaaagttgttctttgtgagttaatgaaggtcagtatagtcaatattcagtacgtaatcctagcaagtacaaataaagttaatattattcaaatatcttacacaggcttattgcatgcaacacactgttctaagtaacatacagatattaaaatgacttaattctcaaaacatgaagtgagtttttgtttttatgcccgttttgcagatgagaaaactgaggcatagggaaggtaagtaacgcgcttaaggttacatagctggtaaattgtagccaggagttggaatctaggtgccaaaatctatgctgttaatcactaaactacgctgccttagtttttatacttctttaggaacctcagaccaaaagaaatttaggcaattctaatagaacaagcaagaatttgctaatcacagcttccttgccccaatcctttaatcggcttcattttcactgacttcttttttaaatgaagataacaatgttgttgaacaggatcatctagtggttagtggttcggcataagaatgactcgcttctgaagctcagctctagcactcgcttgctgtatgaccttgagaaagttacctccccaagtctgtttcctcatctttaaaagagaggttataataggacccacatcatactattgtttaaagagaaaacaacgtagcccatttaaagcacttagaaagtgctccataaatattattagtgtaataaatagcagcaacatcaataaagtatgaaccaaatgatctcttgattcgtatcctaacactaaaaatggtttatttcccttctaattaaaagagaattacaacaaccaaaacaacaaacgaaactatagccataaaatcaattatatcgtctgtgagaaaaccggaaaggctattggacacattaattcacttgtcatcagtcatcccctctattccaaaatgtttgtgttctaacatcctgagacaccttgcataatataatcactgtgactccaagaggtcaaatgggcaggcagttaatgcttctctgtgaaaagctcaataattcattttataaatttcagtttaaagcctgcgttgaggttaagaaaaattgacgttcggtctgtgaacttaatgtcaagctccagaaaaactctgggcagcacatgtttagcaattaagtggacacagacaataaagacgttgccaaattgtaaaacaagacttggaaatcacagaaaatgttgctagttattgatcacggtgaccattcagttcctactgagccacccaaaagaatcattcattttccagcagagagcctgctcatttgcaagataaaagagagacatttctgcacatgcccataatgttcttcaccactgggggcagctttacataagactgcattcactgaaaccaaagcaacagtccgagcagctttcagaatgacagtctgcagaagtgagctgagcgtgtgcgcggtacggggctctcctgccttctgggctccaacgcagctctgtggctgaactgggtgctcatcacgggaactgctggggtatggaatacagatgtggcagctcaggtagccccaaattgcctggaagaatacatcatgtttttcgataagaagaaattgtaggatccagttttttttttaaccgccccctccccaccccccaaaaaactgtaaagatgcaaaaacgtaatatccatgaagatcctattacctaggaagattttgatgttttgctgcgaatgcggtgttgggatttatttgttcttggagtgttctgcgtggctggcaaagaataatgttccaaaatcggtccatctcccaaggggtccaatttttcttcctgggtgtcagcgagccctgactcactacagtgcagctgacaggggctgtcatgcaactggcccctaagccaaagcaaaagacctaaggacgacctttgaacaatacaaaggatgggtatgttttgtcatttttcttctttccttcttaaaaacaaaaaacaaaaaacctctagtgtgtgtaataattctgccttaattattttagagattaccttgctctgctctaagactatgaatttatttgcttagtggcatgtttccttgtttaactatttaaaaaaacaaaacactaaagacaattctctttaattacaaagagataatatgtgatgttaagtgttatttagatttaaatttttaaaaatgaaaaatatatgcctatttttgcttgattaaggattaattcttttttggggggataacttttctaagttgtttttatttccaggtttcaatgtaattaggctactgagcggatcagctgtagcactggttatagcccccactgtcttactgacaatgctttcttctgccgaacgaggatgccctaagggctgtaggtgtgaaggcaaaatggtatattgtgaatctcagaaattacaggagataccctcaagtatatctgctggttgcttaggtttgtcccttcg

SEQ ID NO: 4886 - DNA, 6000 bp, Homo sapiens
gttgctgatttactgaccctgttataatattggaggtcaggactttgggcaaatgaaagagaaaaggaggcagactgagaatgtgattttacaactccagcctctccaggggctgggtggccagtgtctcctcagcagccttctcccgcaggaagcagaactgtctgcaacgctgatggagtcacagtaaccttcaccccactgagctcaggatctgcagagccactaagaccctggagcaactgccttcagcatccaacagaagctgctaaaaggattatgggtcaattcattttagacatttcttccagatgttcccatggaaagctagggtctaaatcagtggtcctcattcctggcagcacctgagtttcacctggggaactgttagaaagtgaaacttggacggcattcacattagtccagtctctgggtggggcttggacatcagcatttgtagaagctccctaggtggctttggtgcagccaggttggaaaccactgatccaactaatagaaatgctaggttgggatctcttccgaggcatctctttaggacaggctgtgcatgacagtcccatagtgtcagggttctaagatgctccaatggtttaggcactggtcttaattttcgttttttcgctctctttgagaccttaacaaactctatagggctgggcacaatggctcacgtctataatcccagcatttttttctttttttctttttcttctttccttttcttttctcttctcttctctcttttcttttctttctttttttctgagactgtctcactctgtcgcccaggctggagtgcagtggcacaatcttggctcaccacaacctccacctcccaggttcaagcgattctcttgcctaagcctcccaagtagctgggactacaggctcttgccactatgcccagctaatttttgtatttttagtagagacagggtttcactatgttggccaggctggtctcgaactcctgaccacgtgatcctcccacctcagcctcccaaagtgctgggattacaggcgtgagccactgcgcctggccaattccagcagttttagaggtcaaggcaagaggatcccttgagtccaggagttcgagaccagcctgggcaacatggcaagacctcatttcaatttaagaaaaaaaccaaaacacccaagctctataaccttcacatcctcattgactgattaagtgcagataatgatatttgcccttctaacctcaccaggctgttatcaggagaaatgaagcaataaatgagaaattgctctgcaaactgtcaacgttatgtaaacattgctattcagagtgtgctcccaggtgcgggaggtacagctgttatctgttggagatcactcctgaagtaacattcctagtgccatgggtcagatgggaattggtacagacattccaacttagaaggcagcctttattgtcttataagcaggtgcgtttcctggggtggcagcctggcactggtcactccaaccccaacttgtgtaggaggtaccacagtaaatgagtagagagagttcaggggacttgaagggaagtggagggccatctggagagggagggaactaaggactccctgtgggttggggtcttcctgaggatccagggagtaactgtcaaggagccttagcagggatctaagagctatgcaagagcaaaaagaggcaaattattaaggaaattagtgaagtcagcactggaacaacagagaggggacacagcagtgcagcatgggccctggcctcaggaagctgtctgattggggcagataggaccagccccctagaagacagtcacccatatcagttaggcagtcatgactcagtgttacttatctgaggcccaggttgcatgaggggttgggggtgggatggacagagcactggctgggcatcaggactaggctggagtcctggctcaaaactctaccacaacctgacactgggcaagatggcccacctgtggcatcccaggttcctgccctgtaaagaggagtctgggtgtatatccagatggactgtgagcacagcctgagtttgccctgtcgaggtgctgaggcctgggagattggggtgagtagctgtggtccagggaaggttggcaagctgggccttagatgagaggggatgcttggtcaggcagaggtgagtggagaaggcagggcaaggaagggaatatgagcggcgaacaaatggagtggacatggtgggggcagaggatggtgggaagtggccttgttgcggccagagtggaggaagagataagtgggaaagagtggagtcgattacagaaggcctcggaaaccaggcagagatgtttaaattggctctctcaggaaggagagggccatgaagggatttagggaagggtcatgacatgattatgctgcattttagcaggattaatgtgacctggtgctcagaatgacttggatggcatgaggccaggagccgaggaggacagttagaagactcttgtaatatttctggcacagggagatggactgggagttgggaggtggcaataggtcaggcctagagacatttctcaggaaatattgacaggccttggggcctggttgcattcatggagtggggaggaatgagtcaccttgagaagcagtttccctctcaaaggccagggaagacaaagcagaggcagctttcctgcctgcaaacaggacatttcagggtaacctggctcttccaagcgtcagcttctccctggctccagctcagataggagttgtaacaacgggttgggcatgggtgatggcaccggctggtggctgggttaagggccatgtttttgattatgcattaggcttattcagcctgccaagtgccaggccctgcgcttgtgtaggagacagagcaattagcaaaacatagtcctccatcctcaaggagtttccagccctgtgagcttggcagatctgcagaactcaaatgaaatggcagttgagaacaaccatcttgttctcattcactccattttgcttaacggccatgtaggtagttccaaatgtttgatgtgtaccagaaaatctctctcttcctggtttataattatgatccagggcaaatccaggttttgttgggcttgaaaattaaataaattggcactctctatggaaaataattcaaatataaatatacaaatatcacactgctaggccctcccagggcctagaagggtaggaatgaaagtgagagtccctgaagctttaaccgcattaacttttcagtcagttctatgatacctgccattccttaagtgtgtattatgtgcacgtattttgcgtacagtattacacaacaatcaaggggaggtgaggtgggcattagtgtcttcatcttatggatgaagacacagtctcagaggtgattcaagatgcccctctgcataggccctaaggcagggggtggggactgtgacctggacaggaagctggggcctcaggactgcatctaagctcctccttttctgtgggtgatggtggctgtcaggcccctgaacctacgtcatccctccctctgatttgactgtacctttgctaggcctggtcaagggctagggactcctaaagtcaagagctagggtagaggttgggggttggatctcagggcaccatatggtgcagacttggttgcaggaaagtgacctatttaggcagaggggctctatacaactgggaccacagcaaaccctagaggtgagcacctgcttcaaagactcacagatccaagctgtgatcctagatctacaacttcctggctgtataaagtccagcaagactgaggcctcactgagcttcaatttccttacctgtctaaccagaatagcaacaacttgtttgtatatttgagctcattacatgtcattttgtaaggcactaaagctcctggaggcttccggaacacagaaataattaatctaagaatcctaaagtggctgtcctggtagcacctctagggagtcctcccatcctacgtaacttcctctgggaaagtagaaaacacggcacctgggaaggggcgctgaaccgtgccccaagtcccagtgggcctggatgcccaagagcaagaggaggcccagaggatggggacaggccacgacctgtggcccaagtcccgcccagagggagtgcgccctgagggagagccaccggagctggtgactcgggggcgggtgctctggggtgtcgctttgggttcagcaatacaaatctgccagctggagattaggcggggcacgccggggagaggtgatgcactgccgctgaagacccaggtaggccggtgcgttcggcctgggtgaggaaggcgcgggacccgggtgcgaggactgcgtagcgtccccggctcccgcttccgcccgctttccacgcccacttctgcaagtcccctccggcacctcggcgtccaccggactcctaggggcgagccctcatttccgaggaatgggaccgccttcgtgcccccggggctgccagtccctagactagccctaggggcttctcgtcccggcggagccgggcggtgcctcctgcctgcgcctcgcacctccccgcctggcacggcccacccgggcacggcgccgccacgcgtgaaggcccgcatcggctccctacgtgggggacgtgcaggatgatgcggggtcgggggggatttcgctgcgtcgcccgccccctttccggcgcaggagggagcggccgccgcgtccccgctccccggccgggacgccaccgccgggcgttgcagaggcgcgccgcaaccaatgggcgtggaggaggtgggtcggctggcggctgtcaccctccaggggacgggagcgcggagaccgggagcgcgcgagctgtcgccgcgccccgggccgagggggaggagccgggggaggaggaggaggaggagccgccgagcagccgccggaggaccacggctcgccagggctgcggaggaccgaccgtccccacgcctgccgccccgcgaccccgaccgccagcatgatcgccgcgcagctcctggcctattacttcacggagctgaaggatgaccaggtcaaaaaggtgagcccccgcccgcgccgccgctggtcctggccgcagccttgcgttccggcatccgctcgccgcctccgctgcctccatcctccggcgcccggccttctccgggccagcatcgagttggactgcagggcgcaaggaaagccttcgccttcgattctaccggcattgtcagtgtctctgtgtgtgtgcgtttttgggaggggggcaatcgggcggaagacccccgagaccgggctgcctgctgcagtgtccttgaaacgggccctggatgtcagataggcccccgggctgtgcggggaggtggccggtgggcccttccgcagggcctgttcgggagggtccgagcgccgtgggaggaggtgtgatcatggagatgctggggaggtgatcgagcagcaggcgggggtgctggctggaggccaggcctcccatatttggggttcctggcggagggtgtcgggtgccccggagaagctgtcgccgggctctcccagttgtttgagctgctcgttaatctgaggacgaggtgacccgcccggcttcccggaacggggaggggcggcgaggccaccggaaactttgctcataggcctcgtgtctggagcggcacgtctgaatggaattttttattcctcttaagctgtaatttctagccagcacaggagctcaaataagcgactggtcatttgagttgggtggacgcctgtggcatgcttgttctagcacttggacgcatgcatcctcctgtcctgaggtgttgttgcctttgacatcttagtgtaaaatactgtccgctggcaggtcttaaaggtgtatttgtctcttctgccagctgtgctaccatattttaaagaaacagcctaagctgtagggaaagacgcccgttttatca

SEQ ID NO: 4887 - DNA, 6000 bp, Homo sapiens
tgcccaggctggtctccaactccttgccttaagccatcctcccacctcagcctcccaaagtgctgggattaccagcgagccactttgcgggctgaaatgatacttttcatgtgtctgttttcatgtgttgcatgttcctacaacccctcactctccaacagaatagaacagaagctcttgtttaccttgtgtatcttgtttgcagttgtatcctcagagcctgggcaggacttgactcacaggagaagctcgttgtgcatttgctgactcatctattgactgtgagaattatagctaagattgttagagctggaagagaaacaggccaacctcattgtttcacaggtggggaaacagaggcacagacagagacctttgcccagtggcatgaatacagacatacccaagtcaaattggtcatgcataattgttagcttctttttcacaaactgtaatagccattaaaggcaagggttagtcatttccccctaaatctcactgtcaagttatcaagaaaacagatctcaggacggattctgctgcccatacgaatgtctataaaacaaacatttattagctagtagccacaaaattggttcatacaacctttctgtgaaactcaaaaaggcccagctttctgtccttttaggagctcttccaccttgcaagaagggtctgctggaggaaaatacaatattctaaaggcaggactcagtttgactgatggctgcattggaatactttgagacagaagcactctcaagcctttagctcagtgtattatccataagtgagaattagcagcttcccaagattctttgacactgtttgaacaaggaatgggtggtgccaaaactattttagccaatctaaatatctttaatactgttaatttctccaaaggagactcatttctaatacctgttatgctaattaataagcccagaattttaccaatccattcattatgctaattagaaaagccttgggggtggattgagatatggatatttgcatgggatactgagtgattgttccagactctgcatgcctctgaactcccaagttcattgaagtgaagttggtaacttaaaatcagacatggtggaagtatttactttatggaaattggaatcccccacaccagctagtttttaaatatttaccagtatatcagtggatagctgagtaagtgacttctggaatgtggctttctggtaagatgttggctgacaaccttaccctcatgactacctctgtaccagtgatgcttaattctggttgcactttagaaattacctgggggagtccagacacaatggctcatgtctgtaatcctagcacttagggaggcggaggtgggctgatgatttgaggtcaggagttcaagaccagcctgaccaacatggtgaaacttgtctctactaaaatacaaaaattagctgggtgtggtggcgggggcctgtaatgtcagctacttggtaggctgaggcaggagaatcacttgaacctgtatagcggaggttgcagtgagtcaagatcacgccactgcactccagcctgggtgacagagcaagactgcctctcaaaaaaataaaaataaacataaaaatgagaaattacctggggagtttaaaaataatactgattaccacgttcctgttggtggggattttgacttgactgcagtggggcttgaatatcaggatacatttaaagcttaccaggtgcttttagtctgcagctagggttgcattcacacctgtgtgtcacactatgccacacattctaacagtcctacaaaaaagtaatggcaaaaccaggatttgcaccaggcctgctggcccctaggccagagttcctggctaaaggaggaaaagtgggaaacagatggccatttcttctgaggtctcagtgtttgcaaatgtggttcaggaggagccctagtgcttggggtcagggtcaggattgcaggtggggaggcacagtgaagaagcccagcagccagggaaaggctgtgccagccccaaagagctccaaggctctttgtagggatggctcacctcgagggcttagggagagctgagagggcttgctaagaagcttgtgtgtcaccagggaatatttgaaagatgagagaaaatgcagctggctggagaggccagaagggaagaatagaagtccaggggcaactgggaaggaaacctgatggaggtgtgtggcagtttcgactgtagtttaaatatggagaatgaaagggaactaggaggctaaactagccttccagggtatgaagagggttccaagcttctatgggtggggaagagactagcacctcaaataatgggtgtggacttagctctgcagggctgggtggaggctctagccctcaaagaggaataaaaagttagtcttcctcctcaaaggacagaaaggacaactttttttttttttggggaccgagtctcgctctgtcatccaggctggagtgcagtggcacgatcttgactcattgcaacctctgctatccaggttcaagtgattctcctgcctcagcctcccgagtagctgggattacaggcacccatcaccatgcccggctaatttttgtatttttagtagagccagggtttcaccatgttggccaggctgatcttgagctcctgacctcgagtgatccccctgccttggcctcccaaagtgttgggattacaggtgtgagccaccgcgcccggccagaatggacaacttttaacactatggtaagatgccttcttggccctcagataatcatttgagggcagcttgcattactctctggttctctttccaccttttcttttccctgttgttttttttttgagacagggtcttgctttgttgtccaggctggagtgccgtagcacaatcatagctcactgcagccttgatcttttgggctcgagaagtgatacccccacctcaccctcccaagtagctgggactacaggcacgagacaccatgcttggctaatttttttgattttcagtggagatgaggtcttgctacgttgcccagactggtctgaaactcctggactcaagcaaacctctcaccttggcctcccaaagtgcagggattacaggcatgagccactgtgcctggctctggttctatttctctaccccacacaaacatcctcccaaggtttgtttgttttgtaccaggaaattggtttccttttacccttccaggcatggcactgcctccctccccaccccccaatcttgctttcttcctcctagggcagagctctgggggctaaagccagcctggactaagtctctgagtctgtccttctctgttgagtttgtgtatgcaggagccctgggaacccaggactggggacttgtataagagtgtcgttcctgaaatcaccaccagggaccccacccagcactgctagagcttatgacctctgccatggatttaattactgaaggccacagcagggattgtctggctcccaagtcccaggctgagctaggcttgggagacaggaaacaacagtgagtaaagctgggaccatctagcatgagagacaggctcacagccacctctggtcccaggctgagaaaaggccaggtgggaggaggctgggttagtggctggctatgtgcaagagagggagctgcctccctcacctatagtttctgtttgtttgttttttgtttttttgagatggagtctccctttgtcacccaggctggagtgcagtggcgggatctcggttcactgtaacttccgcctcccgggttcaagcgattctcctgcttcagcctccccagtagctgggactacaggcatgcaccaccctgcccggctaattttttttgtatttcttagtagagacagggtttcaccacgttgtccaggctagtctcgaactcctgacctcaagtgatccgcacgccttggcctcccaaagtgttggtattacaggcgtgagccaccgtgcccggccttgtttttgtttttgttttggagagagggtctcactctgtctcccaggctggagtgcactggcacaatcacggctcactgcagccttgacttccctgactcaagcgattctcccgcctgtctcccaagtagctgggacaacaggcgcgccaccgtgcctggctttttattttttttaattatagagtcggcgttttgccatgttgcccaggctggtcttgaactcctggggctcaagccattcgccctcctcagcctcccaaagtgctgggattacaggcgtgagtcaccgcgccaggccttcaacctagtttgaagatggggtttcccgggaggaacccttcccaaggctgggttatcacctggcaaaagaaggggacttccgaggtcgtttggtgaaggccttcagcagatctgtttcacgagcaaacttcagactccagctccatgggggcctattagccccaccctggtctgcctccctgagccttcctgagccgagcaactccacttccttattccattcacgtttagcacactcatttgcactttcaacacctgggcgattaattcttgcccttttcccaaagttttccctcttgacaagaggaaagcttgcatttctatgtaccccgattaggcacgctcgctctctccttagagcacctctggttcacctctcccacgccccctgcattagcacaggcgtttccagagttgcacgcgagctcatttgcaagaccgtctccccctcccatcccttcttggtcccctctagggcccagggcagcagccccgcccctggcccgccccctcccagacgctaggcagccgcggcctcccattggccgccagggctggcaggcttcccggctggggctgtgattgccgcgctccagtgtcagtcccggagagaacgccggtggcggggctggtagcccggcagccgcaggtggggccacgagcgctggctgagggaccgagccggagagccccggagcccccgtaacccgcgcggggagcgcccaggatgccgcgcggggactcggagcaggtgcgctactgcgcgcgcttctcctacctctggctcaagttttcacttatcatctattccaccgtgttctgggtgagtgaccccagtagggcccggggatgggggtggggacccacaatccggccgccccctcactggcccggggttgggtccacacttagccgctccagggagtgcgcgggtgagcgcgcgcggactccttgtctttctacctcacattcgggcggccagagctcagcctgaattttcagccgccctttcgggagtgtgagagccggttgtcgaccgaccgagtgccacctggctcacctgtgtgcaccggctgggcggtttgcccgctgtgcgtccgctggccggctggctaggctgaggtgaacgcgctggccgcgcccaccacgcctacccggtaggactgactgcctctgcatcggcctgtggagcttaagtagttaggatttgcagtcggggttgggagacctggattccgggtctggtccctgctagttacttgctgatgcccctgagcgagacgcttccccgctccgtcttggtttcctctttggtggatgcacgtgcctcctgcgtggcgaggagaagtccaccagacgacgtctcctgcacacctaggtgctcagtttccgctgtcgctgggctttacctcctcctctgccttgttagggggcaggatggtagtgtttagacatgaaccaagctttgaattccgtcgctccgagtggtcttttattttatattttattttttatttaaaacattgctaatctctgtatcgttccaatttcagtttgtgcgtttctgaaatgagcacttgctgagtgatcttggggaagttacttcattcctctcggccatggtttcctcatctgtaaatggacacagtaattatattcaacttgtaggatgctcgcggagattacgtgaaata

SEQ ID NO: 4888 - DNA, 6000 bp, Homo sapiens
atataacaatttaggcaagttgaaagtaaaatgatggaaaaaggtatattatgcaaacatgaattaaagaaaagcaggacttcagagcaagaaaaattaccagagatggaaagagacattatgtatgatgaaacaatcaatccaccaagaagacatatcaaaactaaatgtgtacgtaccaaacaacagagctgcaaaacatgtgacgcaaaaactggcaggagaaatagacaaatgtataattattgttagagatatcaatatgtctctttcaacagttgatagaacaattagtcagaaaatcataaaaaatatacaacaccatcaaacaacagcatgtaaacaacattcataggctgggcatggcaactcacacttgtgatcccagcactttgggaggctgaggcaagaggattgcttgagcccaggagttcaagaccagcctgtgcaacatagcaagaacccatctatataaaaaattttaaaaattagctgggcacatacctgtagtcccagctacttgggaagctaaggcaggaggtcaaggctgcagagagctgtgattacgccactgcactccagccttgatgacagagccagaacctgtcacaaaaaaaaaaaaaagaaaagaaaagtaaagaaaaagaaagatttatggaacattccatccaaaaccagcagaatggatattcttttcaaccttctatgaaacattcatcaagatagaccatatcctgggccctagaacaaacctcaacaaacttaaaagaattgaactcatacagagtgtgttctctgaccacaatgtaattactagaaccaataatggaaagataacaggaaatctccaacacttgtagactaaatgatcctttaacataatccatggaccaaaggggaagtagcaaaagaaatttaaaaatacatataactaaatgaaaatgaaaatacacgtcaaaatgtgtggggcacagctaaaagtgctaacagggaaatttatagcactaaatgtttacattgaaacatctcaaatcaataatctaaactcccgactcaagaacttagaaacagaagaacaaaataaacccaaagcaaacagaaggaaggaaataataaagataagagcagaaatcaatgaaattgaaaacagaaaaatagaaacagaagactcagtgaagcagcgctggttctttgaaaagatcagtcaataagattgataaacctctagcaaaagtgaaagacacaagatagaagacacaagtaccaatatccggaatgacacagggatatcagtgcctgccctgtagccatgtgactcgttcttcacaatggaatgtgagggaagtaatatgtgctacacctacaatacttttctttaaaagaaatcactagccctcatttcttctgtctcacctttccatgagctgcatatggcgaagaagttggtgaggcagttttgacgacgcaaataagggtggcatcctagggtgtaggggagcaataagctaggaagagtggatgtccttggctggccttgtgaagcagagctgcccatctacttgattgagtcactgtatattttttttgttccagcagcatagcctgtactcaagctaatatattacacctaggtgggtttatgtcttaggggacttacatacttacatataaccaagatattgtggggccactccagtcttctgactatgtaaggtgttttctgaggcctccatcaatcctctggtcccccatcatctgtccatggatgagggccatcactgaaccacccttcatacctgtctacctgaccctttcaagtccagcaattttcccactactactactactactactactactactactactactactacttactactcccttgtcattgctggagcacaagaatccttccaccacacctcagacacaatggacccaaggatttccacaaggccatataaggccctacctgtcatactcactatctggccattccctttcccaagcctcatgcccacctttgagatccagcacacaacacctatgctcccatcatttcctcctttcccagtgttttctctgaagaggcccctgtcatactgtcttccatggccacaggcctaaggaggcaccaacagtgggcactggcaagctagtgctgcctttctcccacaccattctctgagtaataaacacaggcatagtgtctgccagagtaggggaaagagacagggggaaatagcaggagaaagagatagatagattaatatatttaaaatgacatcaccattatcatcatgccattctcttttgaggcagaaacagttgttcccacctgcagagtcagagaacaggccaggacacctgacttaaaaattatgacctctgctatgaacagaaaaccaaaagcacatttttattgaccacatgttggggttaaggcatgacccaatgcccaatcttgtgctgatggcactggggaaggtgggggcacaattgtaaagaggctgcagagctgagatgaactcaggggagtctgtttggtggatgcaaaagcctggaatgcagagcccggggacctgccttcatttgaacgctggctctgtcactgaccttgggctcatcatctaccttgtctctgagcctcaatttcaccttggtaaaagaggaataataacacctactctttctatttcataatccaaaaaagaatgaagtggtctctgggaaaacactttggaagtaaggactctgcacatataggggttattattattattacatgaaacaatcacgtttgtggatgaagggatttagattgggtggagctggccttccagcagatattcaggcccaagcaaagcaggcctttgggtgatctacttcagggaaagcaaagaggccaggtgggcagagctgagggaaggagttgctgacagtgtgctggggctagagttggagggttgtcaaagccttgccaatgagttggggcttgttggagcagacagtagggaccattgcaggttcttgagcaggagagacacctgaagaaggtggagagatagcaaaagtggtatgttgcctccttaggctattttagttggtaataataggctatttctaagtccagtcaagcactatcacttcccaccccaaagctgttcttgacttttctgtagggacttgcttcttcctctcgactcttacggttctctccagctggagtgtatctctctggcagcagttataccagctcaaatcttcctgaaaacatccatgattttctgcctgtatcccctggtttcccagcccacagaggttacctccctcttggggctcctgagttccgtgacctacttatggggttctgttcatggaaggcagtgtttctcggccctagctgctcattagaagactggtttttaaaatgtctccatgcacagattgtaacccagatcaacgacattgtgatctctggggtggaacctaggtattgggatggtttctaaacattccaggtaattccaatgtgcacattgcgatttgggatcacaggccacctctgacaatcgggcatcctgccttgtgattactgctttcatgcgtgcacttggcatacctggaacacactggggtgtggggagaaagcactaggattttggtttatatttactttacatcctatgcttttaaaatgtgcatgctttacaatcgacttgatagtagaagaggtaatgatcataacagtcagcagccgttgagcatgtactgcagccaggctctcatccaagcacttgacacgaaagtgccagaaagcagtcacaccaacattcaaacacaggatggctccagcagccaccttttatccatcatgccaatctgttctcacagtacacatgtgtaatttagaaacaaacaaaaatagtaacatataaataagatacagataccagagcgacccgtgaaacattttttgctgataaggtttcatgatcaaataatcagactatggtggccgactatgagtcctccaggccaggtctaaatctctctcttagttttgttccttctgcccagcagctagcagaatctgggttctaataaatgctcaacaaatatctgccactcccacaaacatttattaaatgataatcatagctaacgtttatcaacattgccaatgtgccagagacatcatacttaatcttcacagaagtcctgtaaggctatgattacacctgctttgtgacactgagcagctaagtaacttgctagagtccagaacctgaacccagactgtgggactgcacagctcattctcccccactggtgagcaggtccacagggagcagcttatgaaggtggtgggggagaagtggattttaaaacatcaggaaggaggcagaggtggatcattcactccctgcaggtggttccttctgccaagagtgaccttctctatccttacctaccctcctgccccagctcaaacgcatcttctcctggaagcctacagagggttctgccccgttcctgcctcatcttccccactgaacttggaactcctagagggcagggttgggtcctactcaaggggcatccacggagctgggtcagcaaacataacactggtcatctgagcctgcgcccgcccttcctcccaggccagggcgcccccaccccctgggtttttcctccgtggacgccgcttccttttccttcttttctccctcctccttcttctccttcttttccacgtgtcttctcctcccatcctcttttctctccatccccacctcccactccttcccacgccccatctccccgacccccagcaccccgcgccgcccccaaccctgggccgggcaggtgcaattcctcaggcggcctacagagggcgatgtgcgccgccactgggccgcgcccctccggcgcgcgcttcctgtgaggtcaggtgggaggaaaccgcctggagccgccgggagtggacgccgccgaggcccggagtcgcgcctgcaggtgagtcgccgcgccggggagggagcgcatccctcgctgcagcccgggccgggacttggagccggtgtcgggctccagaggctggggctggcggccggggcagcgtccctcccgcccccggcccggaatgtcaggtgcgccgcgggccgggcgcgcgggtggcccaccgggcgggggcgcgatgacaaagcacaaagggactgcgcgcgaccaccatccgctcggcctgcgccagggccagcgggcttcaggagggggacgcgcctgtcccgggctccaggctacgggcaagaccacagggctcctgacctttttcggcatacatgtcaccagtgctatctggaatgtaggtggacactgaggctcatctcctgagaatgaatggcctttacccagactcaaggggaggcgtggaggggccccgcagtccaggggtccgcggagtggagcctttcgagggccaccgcagcaaccccctcccatattttgggaaggctgggccctgcgcccgttagccaaggttggactggtgttccctgcgaagtgagggacaggtgaggggcgtgccctctgcagcaaaggtgtgctcttccgaggcgcatgatggctaggatggtctgccgctaccaggcagtggttgtaaagtaaccccgaagtgaccctcatctccctgggtgttcctggggaaggcccaggtggtgacattgactccctgggggagcaacacactcgacccattttttagtggaagggaattggaaccccactggggatgctggtgccctggactcccagtttagtacccagggagggccctagaaccagagcttctggcctcgtgttccttctctgctgtccgtaggtgtgatcccgggcaggccacttaagtctccctgtgcctccgcctgtgcaatggccgcgctagtaccctcctcgggggagtgttgtgaggcttgagtgaggtgagccttgcag

SEQ ID NO: 4889 - DNA, 6000 bp, Homo sapiens; identical to SEQ ID NO: 529

SEQ ID NO: 4890 - DNA, 6000 bp, Homo sapiens; identical to SEQ ID NO: 3510

SEQ ID NO: 4891 - DNA, 6000 bp, Homo sapiens
ttagtgatgtggaagcagagaagttatgagtccgtagttatggctttatcaccataactactaaccctatctctcagaatcctcgtgcctcgcacgggtatccagtaaccctggaaagaaagaccgtagtgagtgagtgaccccaatctgtgagcattgcactgatagagaagttccacgagatggcagcatcggcccatgagccttatgcctggcgctctccgctccgcccgtcgcaccgcccccccgccccaacgccccgcaccctcccccaaaaggagcctgtgaaaaatattctgactcttcctgattgttatgtcgcctgcaggtcaacagaccctggggaagagaagaagaggagagcctgtagggctccagtcttaaagatgagggcttgtgtgacccccactcccaaccacttttcatggagtctcctgggtgggttctggaggcagaaaggcaaccatgtgaattttggctctgccgctgactagctgtgtgactctgaatgaggtactaacctctttgtgccccagtttccgcataagctaaacggggctgacaattgcaccgacctcatggtgtgtggtggattctacgggatgggggcggccgtcagggggctggaggcagagcgggagctgtgtcctctggctcaccgtctttaacagcaatccatacacctactctgtgcctcctagaaggctgttaggttgttattctcaccccctttacagatgagaaaactgaggcttgacttcgtagggccacataaaaagcatcctagcccaggtctgtctggctccagggcccagttctgaccaccaagccaagaggcttccctatcggccaccctggccagccttggcatctcatcctccagttccctgggcctggagctggtcctcttgtgatactgggatggcttctgccagcactcagaacctttcagggcatttccaaaccaaggagaaacaaggtgctttttcttttctttttctttttctttctatcttttttttttttttttttgagacagagtctcgctcttgttgcccaggctggagtgcagtagcgcaatctcggctcactgcaccctccgccttcctgggttcaagcaattctcctgcatcagcaccccgagtagctgggattacaggtgcccaccaccatgctcagctattttttttttttttgtagttttagtagagatggggtttcaccatgttggccatactgatctcaaactcctgacctcgtgatctgcccgccttggcctcccaaaataatcgcgcttgggattacaggcgcaagccactgcgcccggccagggtgctttttcaaaggattaaggattgtaaaatgtcgatccagtggaaagtgctttggccatttggagttttccttccttctcttctccttcttatcctcctcctctttttctcctcatgtataagaataaagatgcctaatggatgtagtactttaccatttacaaatattttccctgaccttctccaacaatacttgagcacagatggttgttgtcattgaatccactcggttgcaatgcctcatatgccccagccagatacagagttgggagctatcaaggcagaaaagcatggccactgcattcctagacacagatggggttcaggacacactaccgcaaacttatgactgtaggagaccagaccagaataggccacccaaaatatggctccttggcataagaataattctgagctggttattttgagaaactgcagacacaggagaagctctaagaacaaaaggaaaacttaccctttgaaagagaaacttacatctttaaaagaaatcatacatcagggtgtctccctgtctgcaccaggaagagaaagatgtctctaatcactagaaacaccaatggagaaggcatggacttcagtctgcaagaccaaccttccccttgttgactaagcttttcctgcccacatccccacagctgggccttctttctttgtttcagttgaagatggcatttaagcctgaactcaaagccgtggtttttggagatttacttatttctctgagtatttcccaagtgcacatgacatatacacattactaaacttctgtttgtttttctcttctcaatctcaagattgtttcaggtgtctaccctacctcatgaaggctagaaaaaattacctttccgctcctatagcacttatcaaaagcaatgttcaggataacttcaggcaagggacaggaacccagccaatttctgaggcctgcccaccccagcctccccatccctcccctccctggagtccgctgctatgaagtaggtattgtgaaaacacttttattctgtttcctctctacttccctttcttgacccaatctccctcttttctgatcatctgtcagggtaaatgtttttattacctggtcactgaagggcctgctggtcaggggccagggcagactcagagctcagggctctggacccccattctcctgttccttccctgatcccccaaagcctcaaacattccctgggaagctgtgtgcccaacagtacctgactcatcttgtccccaagctagacattaccaccgccatccgcctagatcctggaggagaagacaagcccacattgtccgggaagcagccccacggatgcattagcaacctgtttcctcccacggctttctgctttcatgatggaggccatccccagagccccttcctgaactcagccctagcaaccagcaaatccccaagtggctggcgcctcctccatttggagaaagacctcagcctcagagctctggaagagggctcctggcacctctgattctctaagcaggtgtcctgaaactgtctcactcactcacatacatgcacattctccaaagataaagataacaatgactacaaacaactcaggactctgcatgaagtaaaagcaatcaagtgacaaagcaccggagcttcacagacatgggtcatggtcttggggctggaccagaaatagccctgatctgctgccctcactgaatcctacggctttgtccctcgtgctgtcccagctcccctcagcctcacctgcctgcctgtaaccgggcatgacaaaaagagccttggctctgggttctgccactccatcactgccagctgtgtgccctgggaagccacttgacctctttgagcctggctttcctcatctgtaaaatggggacaacagtcccatttcactgggtactggggtgggggggtggaatcaaatgggagactgttcatgaaaatgctctgtatattagaggatttttttccaacgtaaagaggctaaaaataaggcctgatgactaaactaacatatacactatcacattttgggggtggggagtgtcttccttggaagtgatggaaatttgcattgagtgcctggcatggatcacctgacttaattctcccgacagtcctaagccgaccctgggtttcagagaggtttagtaattttaccattatccctcagcttgtaagcctggagctaagccccttcctctcctgggccggggggctttctgacaatttagggtgctagtctccaaactcgcctgctggtggagcttgttaaatagatccattctggatccccattctgcaccccctgagtgatgggttgtattaatccaggtatttattgaacacaaattatgtgcccacgatgagggaagagcaaacaaagcagatacagcaccaccctcagggattggggagtggcagcaaccctcctggggagaggtccccagaatctggatgtgtactcgagacttttatgatcaggccagtgtttggggaatggtggttataaaatgagaggctggggcagggagtggggatgttctgagaacctgtccacacactgacagcctcaatgggttctgtggcacccctgagccctgggatggcaactgcaagaatttactatccatggtcacagatcttcaggccctgtgaagcatccagatccccgctctgaataggccaactgggccaggaccgggagtcaggaaggtttccgcctttttttttttttttttttttttgagatggagtcttgctctgtcgcccaggctccaggctggagtgcagtggcaccatctcggttcactgaaatctccgcctcccgggttcaagcgattctcctgcctcagcctcccacatagctgggatcactggcacgcaccaccatgcccggctacttttgtattttcagtagagacgaggtttcgccatgttggccaggctggtctcaaactcccgacctcaggtgatccgcctgcttcggcctcccaaagtgctgggattacaggcgtgagccaccgcgcccggcccctgctttcttaaagaacacgcggcagctgtgtgttacacgctatggctgaggtcaagtgtgagggctggaattgctgactgccatgttctgggtctactgaaaatagctgcctggcctgggaggcccagttcagtccgggtgtgggtcccgcttcacctccagagcagcggcagccggtaagggtagaagcggcctttggagaggggtctctgcagcggcctggggacaagatgagggctcctttgagtcctggggtgcaggttatagtagctaaaggggaggtctgagacagtggggtctggctccaaggtaaagaaggagcagcaaccaaaaggcctgatgcgcagcgcacccatcgcaagcatgggcagtgcgtttaagactgggtgactcactttttctcctataaaatgggcgcacgcaggccccagctcagcgccagaagggggagccccggcgcgccggcagaagacaaaggaaaaaagcgtgtttgcaaacggggaagcggcggcgtgctgccgcgaggggcggggcggggccgggggaggagcccgcctgccgcctgccaagcccagtggtcctggccgtgcgccggaggcagcggcggcgtggcgcagcggcgacagtaagtgcgggccggctcgggctcttccggctacggtcccggccgcccccagactcgcgctcagcgacctccctcccgggccctgggggcggctgcgggctgccaggggagccgcaggaccctaccccatccgtggtcccttccccaccgtccctcctctctctccttgctctctgccacccctctttctgggtctctatcttctcttccccaaatcctctcccctcctcctccctgagactggacctcaccgcctgtatggtgggggcctggtatggacccgtcggcccgaagtatccagacggtggctgattctctcggtcccagctgcggggcctgaggctggggctgtttacaccgcaaagccggttctgccgcggccagtaggcggtgccctgcgcttcccagtgccttcccacaggttagccctaccagctccccaccccggttcacagcccaggagatcgaggcacagaggggcgagccacctagccagagtcaggaacctccttggaaccagcacccaggcttcccagcccagatgaggttttgccgcggccccagcagtgcctgcctccttgtgtggggctgtctgtctgtgcatggccgggctcccgcaggtgacccaggagcacgttccaggccacagccagcttgttttggggaaggttgggcacttccttgcctgcctttctctttattttttaatccagaagccagcagctagcttttataaagactaataagactttgctcactccagtgccctggcctgtgaccctggttagagaaaattcctggctccttcttcagaagctcagtcaagccttgacaaatagacgctaggaactgagaagggggccctagccaggtgtggtcctgagtgacagggctggtggaccttctagccgcccccacaggtagctggagcctctggaaagaaccacttgccggttctctcttgttctatgtgggtgggtca

SEQ ID NO: 4892 - DNA, 6000 bp, Homo sapiens
agtccctgccttcgagaatcttaaaatcaagtgtgctgtggactaaacatgatcttgaagccgctgtacagatgtggccgcttctggagatccctgggcaagatgccctggatatggaaggaactgtatatcactttttttctttctttctcttttctttttaattttgggaaaggggaggtagcatttctctaacaatgctgactctacgctgctctacactccctactacaatcaccagaggaatcatcagatggtctgtaccaggcagggttctcatggtcgctagcaacagaaatgaactctggctacctgatgcaaaaattgaactcactagttagttaacaggggcagattcaaccagaagactggaggacaggcccagacaacaaataggaacaaaaggaggctggtggctaaggatgcagctgaaaatacaacccaggtcaggcttcagaagtcctggagtcagggctaggtgctttgcatagcttcaaaatgattcttgactgtttacaaacgttatggtccttctcaaggttcaaagttgagagtggagcttctgactggcttgcctagtcatgcactgtgccctgcaggcagaaggcaggacaaatgaggacctccctttttagcttttgcaattaaagcagggcctggtcttaccccttacttcatacagtgggggtcccccagtaggagtggggtttggatgatgctgggtcctgggaagttggcatctctgtggctcttcgtggctgtccaagcgctttcatatccaccccaggagggaggctgggcaggcaccattctctcattttcagaaatggaaacaaggcacagagtggttcagcgacttgtccaggaccacataaggtggcaaggggtgcttctttatcacactggtgtactttccttgatgccccaggggcttggagaggaggcaaatgtttcctgagggaagggctctagggagaacttcgagagctgttgttgaaacagccctgatacggtttcaggaatggaaatcccagaaagacagaaaggtgaaaacttaggtgattcatctcctggaatgaagagattagaatttctgagatgctggttcagagaatagaggctgggttcttccccccagctctgagcctcctgcaaacgccatctcctgcctttggctggttcatgtgcagaagagcaagactgctgttcacctccgggatccagtagctcccatggctgcctggggagagtccctgtgcatgcctccaggcttccgcacatgctgctcctccacctggagcgcccttctgcttctgctgcctgtgacctcctggtcaatctcggctcactgcagccagctctgatgtccccttgtccaggcagcctttctggactcaagatttcatgacaatgaatcaccccactctcctttgggccatttgtccactttgccacacttacctttctaggttgtaactgattcatctgcccctctctcccactgggagtgccttgaagacaggatggatgtcactcacatctgtgtccccggtgtgcggtgctggcctgttcccctcagggccattctctcctcccctctgtggtgctgctctgcatcacagcaggctgaccccgcaaactcccaggtccactgtcttcaggtgggagacgagagggctggggaaagaagccgggatgtgtcttcacactccaccgtctctggcagtagctgtgtttctgtgactcgagcccacaccacacaggcccactgtggtctcaccttccaccgtgtgccctgatcctggtcactctgcttcctcccttatccctccagtctaggggtggcacactttctgctgttgctgcactctgggtcgcctcgccatccagttagaattctcagcccttccattccctgtctgttacacactcacggtggttctgtgggctggctgcatcccaactgacaccccagttcccagcacggtgcttggcacagtgtgtaacagaaggtttgaggggtggagaaccttgaagaacacctcttctcatgctttcattttacgaatggggaacacaaggccaagagaggtccagtgtccagcccgctaccatccagctagagggtgacctagaactcagatcccgctctccggactcctggctccatcacactgtgtaaaagcatgaccacctaagacatgtaggaccacgactccagttcatttgtccaagagcctacttggcatctctgttctgtgactgcacaggcctctcacacaacatgtcccaagggagctcttgctcaggtctccatagtggcctcctcagagggccccatcacaggaaacagcacactgtccatctaccaccacaagccagaaacccagaagtctccttgaccctttgctctatctcacgtataaccactccctgtcctcctggccctgtagatttttacctcctgaaagtcacttctctccacttctacccaccccctcattccaggcctctgtcaccaatcacctagacactgcagcagcctgaggacatgtaagcttcaccagggcaaggatttgtttggcgcaagcatgcgtgtctgtgtgcatgtgtgtgtgcctgtgtgtgtgtgcttgtgtgtgttgttcattgacatatccaaagtgtctaaattcacaggggttaactaacgttttctgtaaagggccaggctgtaaatatttcttgtttttgcaggccatgcggtccctcttgaaattccttatgtctgtagttgtagtgtgaaaggagacacaaccaaacaggccatgtctgtgtgccactaaaactttctttacaaaaacatgtgatgaggcagatttgacctctgggtagcggtgtgctcacccctggtctagaaaatttcttggcacatagtatttgacaaataaatacttttaattgaagcagtctcttctcatcaactgttgcctcccaatcaattctctctctctcttatttttttttagatagagtcttagtgatcctactgcctcagcctcccaaaatgctgccattataggtgtcagccaccaagcccggcctctgaagctttcagtcttaggataaagatcaactcctgattaaggccaacacacctgcacagtctggcccccactccattgtggctttacagtcactgccaaggactagagggaccactcagtgactcggatcagagagggggtgcttaaagccaacagatggtgcaggctcactcaccctcccaagcttcccaggagcgtttcctcgtacgctggaggcacggagctctccccaccctttctggacttcctgacatatgccagctccttcccacctttgcacaagttgattgcgactgcggtcaccaaaccattgttcctggcccagccgttgcctgcagtgggcacctggggcctttgcacatgctgtttctcctgcctaaaactccactctctctcccttgctcatccttcagctcagtcacctcctctaggaggtcttccctgatcccctcggccaggcgccattaaagcactcttcttcctagcactgattctggctgtaattttacctgcttatgtgtttcattgatgaatgtctggttcccctactagagaagcttcatggggcacaaagaccaagcctgttttgttctccatcctattcctagaaactatttcagttagctagcacatagcagtgactgtgaatgaatgaatgaataatgaatgagcgaatggtaaggaactggagctttggaaccagatagattctgggttcaatacccgactccaccacaggggcaagtccccaacctcctaaagcctgtttctcactgtaaaactgggataatggcagggcccaccagaaagactttattgaagatagaatgagttgaggcccagaaagtctcagcccagagcctggctccaggcaggtactgtcaatgtactgactggaacagtgacagctcggaaatcctgtcatgtgagaaatagttttaaaaaatcagaatgcttagccccggggaagtaaagatcaaaggtaggggataaacctcttccattacctgcatatggaccctttcttgatccagctgtctcagaaagccataaagtctctgtccctataggtgtgcaaaaaggagccgggagaccatgactcgggcactgcagacggagctcccgcaggggtgagggcgcctaagtgacctcacgggtctcctccaacccggggtcctccatttctaagcacttggaggcctcttgagctctagtgagggaggaggcgcagatgggagcgcacgagtcgggtgggcaaaggcagctggttggagagaagcgtaggccaagaggccccaaggactagagggactgctcagcgactctgggagcagagagggggcgcttaaagccaacagatggcgcgggctcacctaggccgagcgcccgctcgcccgcccgggcttcccgggagcgttacctcgctctgcctgaggcgcggggcggacgagacgctgggggccccatccccctgcgcgcccctctgcgggacggctggcggcctggcggggcactgctctgtctcgcacctggggcctcttccgcgggcttcctccctgcccctttgggggattcgtagagttgccacagcagccggtgccatgacatcggcagagggcagcttcgccagcactgaaatattcatgccctgagcgcccggcggggctcggcgccgctcccgggggtccgggcggggccgggcgggagctcgggggtcctggcggcctgaggggtgggggagcgccgagcgcgggcgggcgggcgggggccgggcgaggcgggaggtgagggagggagctgcgggaggcggggtctggacggcgggggccgagcggggcgggggccgagcggggcgggggaagcaagggaaagttgatcgcggacttgagcggcggcggcggctcgggagagagggacgcgggctgcaggcgcgatgcttggctagaggacgcgtccgacggcggccggacgctgaggtggtcggggctagtcagcccggcctgggcatggagcgcggggtggcagagcctctggacgtttggggcgcgcccagtccgagcccccggcgcgcctgaagttgcgagcggcgagcggcgagcggcgagcggcccgcggagacccaggagctgccggcacgccgcggatgagccttcgcgccggcgggaagacgcggcggtggccagggccagagcaggcggcccgcgggggccgatccggcggagagcagagcccgaggcgaggcgaggcgcggcgccgctgcacacacgcacacggtacccggagccacgcaccgcctcttccctcctcgcttccctctccttcccctcgccgttcgcccgccgcgcggcggggaagttggtggtgaccgcggctgccgaaccacttgttcccagcgcggccatcgcccgtggcgggcgctcgcggcatccttcggtcccaggcccctggccctagcctcgcgccccgctccgagctccccgacgcgcggcaactttgattcctgggaactcgaattccattcgcgttggccttgggaggacaggcatcccatcccccatccccggtcctgggaccgcgaacatttgggggctttgctctcggcgctacggagagggtccaggtctggggtggagagattttcgagagtggagcgcgttgggatccaatcccctccccttctgagccctgggtccccatttggacagtggggatggggtggggcgcacccctactgcgggctgggcagaggcgctgaggggaactaaaggcacgtagttctcccctcccctcatcaagtccctgtgcccgcgggagaccccaggggacttacacatcctcccaaattcggtccagctatgggaagacgcgcccctcgaggagccgggagccttttgcggctctcgcttcgccttcc

SEQ ID NO: 4893 - DNA, 6000 bp, Homo sapiens
aactaaaaggacaaacagatcaaactggattagggtatcatttttaggaacggccattgctgagcctccggctcccattcctcttgtttggttaactgctaaaccagtttgggtggagcaatggccactgaaacaggaaaaactggaggctttaaaataattggtacagaaacaattacaaaagggacacacagagcctactctctctccttggaattctcctgtgtttgttattaagaaaaaatcccagaaatggagaatgttaacagatttgagggccgttaatgctgtcattctacccatgggtgcactgcaaccagagctgccctccccaactatgattcctaaatcctggcctctaatagtgataaatttaaaagattgcttctttaccattcctttagctacccaagattaggaaaaatttgcttttactgttcccgctataaataacaaagaaccagcagacaaataccattggaaagtattactatttgtcaaacttatgtcagaaaaggtattaagccagctagagaacaattcaataaatgttatattatccattacatggatgatattttatgtgcagctgaaactagggaggaaaaggctgtaacagcagcaaggttaatcatagcccctgataaaatccaaacttctactccctttcagtatttaggaatgaaagtagaacaaagtactattaagcctcaaaacattcaaattagaagagataatttaaaacctctaatgattttcaaaaattattaggagacattaattggattcatcccactttaggcagtcctacttatgttatgtctcacctcttttctaccttacgaggtgattctaacttaaacagtaaacactccctgtccaaggaggcattagagaaacttcaattaattgaagaaaaatttccacaggcacaagtgactcgagttgacccattgcagtcattacagtttttagtttttcctactaaacattcacgtacaggaattattgttcaacagaatgatctggttgagcggctttttgtacctcacaatacaaccaaaacgcttactctgtacttagatcaagttgctgtattaatgtagtgtgcaaggctgtgcacaacaaagttaatgggatatgatccaaatcaaattatacttccattaaacaaacaacaaattcagcaagcttatattaattcccaggaatggcaaattaatttggcaggttttattggcattcttggtaatcattatcctaaatccaaaatattccaatttcttaaattaatatcatggatattgccttccattactcaaaaagcccctattgaaggggccattactgtttttactgatggatctagtaatggaaaggcctcatttgtgggacctcaacaacaagtttttcaaactgactttgcttctgctcaaaatgctgaacttatggctgtgataacagtgttaaaaacttttaaacagccaataaacactgtttctgattcagcctatgtagtgcaagccacacaaaatattgaatgtgccttaattcaaaatgtgactaatgaccaacttaatcttttatttcattctttacagcaagcagtacaacaaaggcattcccctttctatgtcactcatatgagagtgacatagccctttaaatttaatcaaagggtggataattatatggggaataggatttgcttgtgtctctcaggtaacaatcaggtgcctgtatgagtgcccaccaaacatctgaaaatctatcatgagctacagcaggaagagaggactctgggaagagtcctctgaagagtccagagacgtggtttcacggtgttagccaggatggtctcgatttcctgacctcgtgatccgcccacctcgacctcccaaagttttgggattacaggtgtgagccatagcgcctggccattacccggcagctttgttaaggcctgcaatgaggcaagtaatcatatagttacagacgcccagctggggtctgtgggttggtactcccaggaaggctcttcctggggaacagcagtggctcctatgggcttagcaggatcttgcccatgaagatcgtcagtgtgtgcctgtgctacaagccacactctttccttctcttctggaaggagagtatagaagagaggataatgtagagatcatgccaagtgagttcataagattgggtaagatatttaaattctttgatataagtatcaggatcggaggagaaggacctgagacgtttttcaatctgtgagagattggagagggagaaagggaaatggacacggatgatccccttgctcctgctacttcccagagaggaagcaagggaactggttgctgagtatgttgggcccaagagcgggtgaggggtggagatggagaggactcagagtcagaagcggggtggttggagagagggggacagatgggtagagccagagcagggacataccgtgaagaatcatgatgctctggtggaggatcaagatgctgtcagggaggggcaaaattggcggggtcaaagaaagaggagttgtcggctggggctgttgcgggggtggtgggagacgggggtggtgggagacaagtctggtgagtaggatttggaaagtggagcagtactggcagagggaagggcggttacggagagtgaagaaagcctgaacataaggaatctcagaccatttcccactgcgatggcaaaagtcgtctaagtctctaagtatattgaaatcaaaagtgccattttcaggccattgggagccattgtccaattggtattgaggccaagtggtattgcagtaaaagataagtctcttagaacggacctctgaatggaggctgagagccttgagattgcagaggagacagccaaggcgggtggtcttgggatgggtagactgagaggctcccatagtgaatggagggtggggggtagaggaagaagagactgcagatgacaaggatggcgagagagggtgtcccctgtcctgcaggccttgtctggaatagaggcagccaccgagtcaggtgtccttcaggtctcctctattctggacaaggcccttgggtgaggggtgataggagagagagaggggaggggggagagggagagagagagagacacctctaaggacacgcagccagagcctgtccccttcctgggtttcggcaccaaaatgtaacgttagctgagagaaaggacaagagagagacccaaagttaggcgagtaagtttatcctgccgggctgctccaccacagtcagaggaggcagccctggagcttataaaatgaggggttcatatgggggagagagaccctggggttgtcggttaactttaccacatatcatctcgtgaccgcttacaatataggaatttagaagagggtgtaacttaagtttatccacatttctcgtgaccttccccatgctgcctgttgggctgtaagcaagtctggtgaccttgctgtagcacctagataagggtccaggaatgcagcttcggagtattcagggtaagggtcagctgcattgtgtgtggggcggggggttcctggggcaacttgtccctaacagggtcaggattagttctatctggttctctatttgctgtccatctgtaaatgctgagaatggcagagggaggccaagtgtagataatcaggttttagcttttttggattttcctacttctcctgtacaggaaataacttattgtctaaaccccatactatcccattaaatgtcaggagtgctgtcttaggcctgaattagctcatgacgttacgtactggaagtcccaggaggaatgcccagcaagtggaatccaagacgttctcgccttctcggggacagggccatcaccaggattcggaaaggaacagggaggttcggtttgtgttccagttctgagccctttacctcatccctcgagaagctggcctttgcaccccgcagccggtgctgcccagccgaccacgccatgcacgggaggcgactgggaccccacttgcctggcagcccggccggagacccagctgcctgggagggtccgaagataatgccaggcagccctggcgggccgggaagaccctctgtccctcccgtttcccagttcttgaattaggggagccttggactggctggcggcgcaggaaagtgcaggagggcggatgtgggacctgctgccgcccagggagacggtgctctgttctttggaaccagggaaaccgtcctccagcccacttgccccaggggggagcaggaagatcctctccgggcagagatgatggggaacccgtgcagccagagggtctccctggcaaaggtcgggggagggggcggccgtaacggccccgggcgctccggcacggagaagccaagggggttctccaagcagcctccacccaccagcctcgccaggagagcgtggatacccgagcggccccaagcgagtccccggggactggagggccgaggggcagcgcccggaacaaaggcccgcagaggggtcctggagacagcggctccccgggggcggctcccctctctcccctctctcccctcctctcctctcccgccagctcctccttctcctccccttcctcccccagaggcccggccggctcgcggcccgagcagcgccaacttcgccaacggttcccaagttgccgggcgcgcaggggtgggagctgggtggggtgaggaagaggaggaggaggaggagaagggctcccggacgccttggacgcggttcaggaatccgccgccgctagccggctcgggcctgagcggggagggcgccaggcaggacctctcgcaggctcgctgcgcaggacggcgcccgcctggcgccgcttcccttccagcgtgccgaccggccccgcagcgcctccatccctccggcccgccccggagaagacgcacagctcgggccgcgcgggcgccggggccgcggaaccgcttctgccgggatcttccaggaggaaagcgaagttgcgagcggatgctgcccgcgccggaccccagccgcggagggtcggggccgccggtggagtctcggcggccggggtaagtggggcgccggcgtcctggaaccgccgcccagcccgggggaggccgcccagccgggagcccccgccttccgcgtccaggcgcgcgcgccagactttggagggagaagggggcgaagcggacggtgggaggtggagttcccagctcggggaaaagcccaggcaggcacccacaacccgctgcaaccggatcacacctgccaggtacacacagctcatcgccactcataccccgcacacggcgcaggctgatctgcgcacacccacaccggccaggcacatgccacacaccgaaatgcacattcctgggagcgcgggggatttggcctctacagcaggcacgtcctcacacccctccgtcacatccacggcctttgtctgctgcccccgcagcccccaaggagagggagcccccaaagcgcagcgggcaggagagaggctgcctgggttttgaaaacttgtggccagaaccccgagaccaaggggagcagatgttgcagtcggttctcggagttctgcaggagcgaatttggtgtggaaactcggtgtctgggtgatgtgtgagtgtgcgaagcccttccggaggcgaggcccggagagaggagggagtgattcataaactcagagccggcgtgccagggtctgtgagcagcgtggaagaggctggcaggccgttgctgcgctagacagaagggtagtggccgtgacagtcttccagggaagcagggacccttccccccagcggatgtgcttcctccagggacttccaagggaaccgggtgagcagattccagtcctgggtgtggacggggtaaggggaggtggggggatttaagcctaaaaggttagggagaaaccaaggcaggcctgacgccttcattattttccttgcacctgaa

SEQ ID NO: 4894 - DNA, 6000 bp, Homo sapiens
cagggatcctgcttcttaaagtctggattcccagtatttagctcagtgccaggcacgtagtggatactcagtaaatagctggtgaatgaatggataaatagcaaaagaatgtcaaagtgtgttggatactaaaaagtcatgtgagctgtaatcttgtcattcctgtcacatagatgaggaaactgaagtccagaaagggacactggcttgcccagggtcacacagtgagggacacagctgtcttctaggatggacacaaagccaggacaccagcctccctgggctcctatgctgtatcctgagtatttgaagatatatttcttttctagttaaaagtactttgggggccgggtgcggtggctcatgcctataatcccagcactttgggaggccgaggcagacagatcacttgaggttaggagttcgagaccagcctcgccaacatggtgaaaccctgtctctgctaaaatacaaaaattagccgggtatggtggcggatgcctgtagtcccagctacttgggaggctgagacacgaaaattgcttgaagcccagaggcagaggttgaacccaggaggcggaggagcagagatcgcgccactgcactccagcttgggtagcactgagactctgtctcagaaaaaaaaaaaaaaggagaaaaaaagtactttggggcagacatctaggtaccaaatggtgctttcccaaagttgagtgttgcagagaaagagctgttctgctgtttgggagaaatggctttcagcctcagggttgctcctaactcatggcatgaccttgtattccaggcctcagtttccccatctgggaaggaatcgggttcgacaaaatgctggagcactaagcagaggacttttttttggcggggggggatggagtttcgcccttttgcccaggctagagtgaagtggcatgatctcggctcactgcaacctccgccccccatgttcaagcaattctcctgcctcagcctccagagtagctgagattataggtgggtgccaccatgcccggctaatatttgtatttttagtagagacgaggtttcaccgtgttggccaggctggtcttgaactcctgacctcaggcgatccacccacctcggcctcccaaagtgctaggattacaagcatgagccaccacacacggcctaagcagaggatttttaaaaagcagggatgggagggcactgatgactgagaggaaatgaggcatcctccccatgaatgagcaagatgggatatgggcttggaccccaagtcctacccccaggcgtgttgagggcacggtggatgaagtcagccgcagaggagaagtaggcactgatgtcaaaatcagggaggtcgtgggctggcacccccaggtagctcacactgctgccgtagaagtcagggccgccctgacagtagaggcccttgtgggcggcgttcagcacgtgggtgatgcccagcttccacagctcaaagcggttgtttgccgtggccctggggagggcaggaagggcacttgatgccggccaagccatgggaccaggagggaggctgtgcctggccccctgctgcagagggaccgagccattagggtccaaagagagtccaaccccagcaagctccaagtggggtctgactccacagccctatacccagagccccgcactttctggtggctgagccggcggtgtgtgtgtcgggggatctttagaccctctttgcttcctcaatgcatctgtccctgccttggccaggacaggaaggaagggattgcttcagccctggaacctggctgcccctcccttcttgccccatgtcctcccacgcatatccgtcctctactggctaccacctcatacctgcttctaacctacaaatgtttagaggcaacaccttctctgattcaccttcagtcaggcttctccaccgtctgtatccagaggagggaggctgggcccagaaacagggggctctctgtctaccttatctcatgccccaaatactatttcctgggcctctgcctctacacttgacagttgtcctggaaatgtttcctggaactcctgggagactccctgctttcaggcaggcgaagtccctgctctccctggtggccatacctggtcactgcactgacctcagcacccccgggggtcctggagaaggtccctggcctgggatggtcagagcagagctatttctccttgtttccaccctcctgtgtctggtaaagcgaccaagaactgcctctccacgtccccacccccatgccccttggccagctaccactcacgcatctcctatgaaaaggttgggccaaacttcgtccacacggctgcaagaagacttccctgcccgcaggagctcctccagctccaggatgctggggcaaggcgtggctttgtcctctccccccagctctgggagagaggtctcagccatgggccagcccgcccacccctctgcctctgtggtcactcctctctgcctctccagtgtcatttctccttcccagagattgacagggacaggtgacagaagcaagtgactcagcaagtcacaggggcctctggagtggacaagaccttttcctccccaagcctccccccacccccaaactccatgagaacacagaatcagagagacctctgcaagtcagctaccaccctgaacctcagtttcttcatctgtaaagtaaggataatcacacctacctcagagaatttgaggattagatgaaacaaaggacatgctgggtctgacacatagtaggtgcttagaaacatctgtggaattagtagatgtagagccctgcctaaggctattaggttctgaggactgagttaaagtagagatccagggtgcagaggaggtggctggttccaaggatgaatgatagaaagaactgaaagaagtgtacagtctaggtgggccacaaattgggcaggagctggattggatgtctgttggatgagtctctgaattacggaggtcagggacagttttctgagttgtagagtcagagaaatatgggtaagagacatggagagcttcctttaaagggtgcccacaagattcatggggggagggggaaggtgtttttttttgttttgttttgtttagacagggtctcactctgtcacccaggctggagtgcagtggcatcatcttggctcactgccactaccacctcccaggttcaagtgattctcctgctttagcttcctgagtagctaggattacaggcatgtgccaccatgccacactaatttttgtgtttttagtagagatggggttttgccatgttggtctgactggtcttgaactcctacctcaagtgatcagcctgcctcggcctcccaaagtactgggattacaggtgtgagccgccgtgccgggccaatggggcaaggtttgaacaatggtcctgtagtgaagatggctaacttctcagaagagaaggctgaagagggccttgtatgtcaaatggggagacgggaggtgagtgttgccctagactttgagagccaaaggggctaactgtcatcagaaacagtgggagggagattcctctgcctataagggctttgggtcccaaaatagaaactgagaaaggtcaacctgtccttctgccagagctggttatcagcaagagagatgagatgtctcaccctctctcatgtgacttctcagtggccctaatggagctgggaagggtatgagctgcagtggggaggttcccagctgcccttggccttaagaccagtttgaagggaaaggccacaccagggcatcccatggaagcagtctacactcatgtctatcccattcagaaccattgaagtcggcccggcactgtgtggggaggcaagaccaaggaggggctcgtgtccaggttacagctgggtttggacttggtttatgccaatgctagacctggcttgggaggagaccttccctcagggtggtgcagcatggtggagtgaggaaaatacaggatctgatgttagagagatttgggttggaatatcagtttgcaatatgtcaggcagtatgtttctttacttttctgtgctataggatcccccttgcagaattagcactaggattttttttttgagatggagtttgctcttgtcgcccaggctggagtgccatggcgtgatctcggctcattgcaacctccatttcccgggttcaagcgattctcctgcctcagcctcccgagtagctgggattacaggtatgcaccaccacgcccggctaatttttgtatttttagtacagacgaggtttccccatgctggccaggctggtctcgaactcctgacctcaggtgatcccgcctcagcctcccaaagtgctgggattacagacgtgagcctccgctcccggccttagcacaaggattaaatgagatgtttatatggcgtttggcatagacactgtcaaagagtaaatgggcaataaattataacaatgatcattgggggctggctattggagaagagctggctctctccagaggaattcggattacctccttctaggccctaaccccatttactgatcccacaggccccgccccggctccgctagccccgcttcctcctgtcgctttggcctccggcatgacgcatgcgccctcgggctcctccgcggcagcatctcggttctcctctcgggcccatctggagcctcgcgtcttttccagtgtgggccccgccccctgccggtagaaccccgtccccggccggtagggccccgcctcccgaagcagttccggttcggctccgagcagctgccggcgcggcggtgacggcggccgggacgatgcctgcgcgcagtcgccaccgcccccgcctccactccggctccccgccccgggctccgcccccgccgcttgaggcgcttcactccggcgaggcggggagggccccggactccgacggcggctcggacgccgactcggaggtgggtccggggagcccgactcggaccgcggaggtgagcgggagctgaggctgaggagaggggagcttggggggcgcctgctgccaagggtgagtggggagtctgggatggagccgggggctgccgagggaccgcgacctggaggggccccggggagacggttgagggaaccgggatagtcagctctggaatggaatctgaagcaaatggaggttgtcgaactgagggcctgaaggctgagggataagtggaggccgaggaacgagagggagagagcgagagggggaggcttgaagagcccagagcttgggggcttttgaaagctgcgcagtgggggaaaaagatcgaaggtcctgcgggaatgtggacccggaagaagagatgctctgggtttggcagcggggatgaggagtcagaggagcaagacctgggccggtgttcccttcccagggcgagggagggcgatcggggctgggactggagccctctcatggggttctcctcttacggagccctcttatccgcctcccaccccgggtggggctggtggtgatggagggcaggatttaggtttgactagaaggaggagggctgttggatgggaaatcgtctggcctcaaggggtgagggaggcactgaaaaagagaagtgtggtcaagaaagaaaaggagcccttggggatctaattttgggctttggcatttttacaggtgccttttaaaacatcaaagatcactagggcaatgtacttggatcgtggggctttctcgttcgtgcacagtggatcattttaagaatcttgggtggaaggggcggtgtgaatcactgatttgcctaaaggactgggggaagtagtggagaggaagtgatgtttgaagaaggtagtggaagacgtgattctgaaaatgaagatatcatttggatttattgacagtaatggtgtcctttttttcattgtaattttttcgtagctaagtttaaataccagacatgttaagatcctaaaaatttactatatt

SEQ ID NO: 4895 - DNA, 6000 bp, Homo sapiens
aaccagcctgggctacatagcgagaccctatctctattaaaaataataataataataataataataataataataataataattagctcagcatggtggcccaagcctgacctgtagtcccagcagtttgggaggctgaggcaggaggatcacttgagcccaggagttcaagaccagctgggcaacatagggagactcgtctctacaaataataaatacattaattaaataaaacaaacagaatttcactgactcaccttggctaagggatcaaatcaaaacccctcggtttgataccaaatgccattcatgatcaggactccacctgtctttgcagcctcaacttccttcactcaatttcttcacattgtttttttctagcaacaaaaaatttctcctaattccctggacacacaatattctattcaaatttctgtaaatttgtttaggtcgcccttcccccatcctataatcctgggaaggtgtgggagttttttgctgtatctcagcacttgtccatcctatagccacctcatcataactccccaaggaggactacttattaatacctctgtatctcttgatactgcatcatttgtgtatttgtgtttgggagtggacagtattatttaaaatattttttctggaatagataactaattgccccaaaataatttactgaataatccattattccttccttaatttgaaatgttacctttattataaaataaacgcttggatatgtatataccagatccatgtctggagtctgcattattttttcattgatccatttgttgatttctgcatgtcaagtgccaaatgttttacattattatagctctttacagtgtgtcttgatatctagtaggccaatcttatgaggaaaaacaatgttatttttgctttattttgcgtatcccatagggccattaagattgaaccatcctttcattttgcttggtctcaagttttctcttttgaggatgcccaattcatatcctttaatcatttgtcaattacatatattggagaattccttcttccaggtatttcaactttatttacagtgtcattcatatgaatgaagcttttcatctggatgcagttaaattttcaatctttccttctatggcttttaattttaataacttgctaaaaggtttccttcccctccctcaaaagttgtaaaactattctcccagactttcttcattatttttcatatttaggtcactaatccatctagacagggggataaaaatgtccagggatgagatatttctctgccaattcagatgggacagcagtgtagggtgcctggaccttagagaattcagtcacccctgccgtgtgtgaagggtgactgtaatgaagaaaggaatgccttctgaacatccagttgactgtaagttcttcatgaatttacataaactactcacatctgaacaaagatcttctggtactgtcttctggattccttatctgtgcgtgaggggctaacagtaagatgtttagtgttgagctgttggtggccaggtacagcctctaactataatcccagcactttgggaggctgaggtggaaggattacttaaggctgggagtttgagatctgcctgggcaacatagtgaagcaccgtctctattaaaaaaaaaaaaaatagtgtggagttggaagacataggacactaagtaacaggctgggctccaagcagggttgtagaagacatgaaactaaaacctagctccctgtagtctgttgactgaagccattttgcctctccaacatttcttgtagcatgaataatttctccaatatctccctcgttgcagatttaatacctaaatagaaatactgaaaaacggcagcctaaaattggggaagttcttgaaacttttggtaaggtaggctgggtatggtggctcacacctgtaatctcagcacttggggaagccaaggcaggtggatcacctgaggtcaggagtttgagaccagcctggtcaacatggcgaaaccccatctctactaaaaatacaaaaaattagctgggtgtggtggcatgtgactgtagtcccagctactagagagagtgtggcaggagaatcacttgaacccagaaggccaaggttgcagtgagctgagattgcgccattgcactacaatctgagcaatagagtgagactctgtctcaaaaaaaaaaaaaagttttggtatggtaaaggcttgatcagaactgtacttgaaaaagatgatcctgttatttgtcagacagattcaataaagggactgcatgtgggctgaagtggcaggaagtaggaaggagtgactgactcatgagacagtggagatgaagccatgatttaatctagaaggattagatattgtattacccaatcagtagaactcttgacagctgattagtctgcaatctttatatgatatgggggaagtcaaagcaaggaatctgggtacaaggtagaaagaaagtgctgttcacatagagtaggccgggcgaggtggctcatacttgtaatcccaacactttgggaggccgaggcaggcagatcacctgaggtcaggagttcgagaccagcctggccaacatggtgaaaccccgtctccacaattagccaagcgtggtggtgcacacctgtaatccaagctactcaggaggctgagacaggggaatcacttgaagtggggaggcagaggttgcagtgagccgagatcgcaacactgcactccagcctgggcaacaagagcaaaactccatctcaaaaaaaaaaaaaaaaaaaaaaaaaaccacagacagggtagccttggtgaggatggactctgtggataatgataatggacttcttgtctttgaggtgtgagtaatctttggtaaaggtgaccaactgggaagaggtgagggctgaagagattattttagtcagctgaaggtgaaaattgaatctgataggtactgaaaacacaaagaagataataagcaaaacttattctaggagagaagaaagaaaaggaaagctgagaaaacaaggagttattcagaaggaggagaagaataaagagggtggtgtgatcaaggatgataaggactaagaaaacaccaattgttacaattgttactgttaatcttgatattcaagagcactgtggtctacctgggaaatggatttcctcacatattctgaaattcattctttaagactttatatcccaagatactcacgtaaaaaatgaggaaagagaaccttggttggttccagagtgccctctctggaactggaacactcagctgccaattgttttccagtattcctcacccacttgggcatgacaggaccctgtgctgtttcttcttctttgaaataaggacaatagtttactgcctaggattgttttaagaattaaattagttaattattgtatagtacttagaacaatgccttgaacatagtaggtgttcaataaataccagctacagtatagtaactttttttttttttttttgacggagtctcactctatagcccaagctgaagtgcagtgattggatctcggctcactgcaacctccgcctccggtgctcaagcaattctcgtgcctcagcctcccaagtagttgggactatagacacgcgccaccacccccagctaattttttgtattttagtagagacagggtttcaccatgttctccagggtggtctcgaactcctgagcgatccacccacctcggcctccaaaagtgccaggattataggcttgagccactgcgcttggccagtaacccatttttaaggcccaggtgaaatagtttttctatttctatgattttctatttctatgattaaatagtgtttaatcagacacttcagctgcatatacctcccacagctcattgatgatacaacagttcgcacagggcctggcacacatgctaaaggctcagcagtattgataatcacccacacttacaaagcactatgggccagacactgctgtgctttctttacagatatcaactcatttaacccaccctaaaaaccctgaggttcccaaaactggcatatcctcatgttacagatacagaaactaagacacagccgggctaagtaattaatctaagcttacacaaatagccgagacagagccaggacttaaatccaggcagcctgtttcacagtccctgctcataaccatggtgctgtatagttccaaacatcttaactaatgaggacagcattatttctcaaggtgcacagcacagagaacttcaaaaattagactcttagtaaaacaccatcttttttttttttttttgagacagggtcttgctgtgttgcccaggctggagtgcagtggcgtgatctgggcccactgcaacctgcacctctcaggttcaagagagtcttgtctcagcctctggagttgctgggactacaggcaggcaccaccgcgcccagcaaattttttgtatttttagtacagacggggtttcaccatgttgaccacgctggtctcaaactcctgacctcaagtgatctgcccgactcggcctcccaaattgctggaatttattccaacacctcattcattcattcattcattcgagacagagtctagctatgttacccgggctggtctcaaactcctgggctcaagggatctttctacctcagcctcccaacgtgctgagattacagggacacgccaccgcgccagcccgaacatctttatcttaaacccagaaaagtgacaggagtgtctcccctacaagatgatgaccagccctccagacctgagcccaggtgtgattccaaggcccctgtactggggccagacagggagactcgctctcagggacttcccaaccagcaccatcttctccctgcggggatggcgagggagcgcgggccggccccggccctgcctccgcgctcgcgctcgacggtgtcctgaagcgcgctcccggggaggtgttgcagccatggctacggcagccggcgcgacctactttcagcgaggcagtctgttctggttcacagtcatcaccctcagctttggctactacacagtaaggacagccgctggagcgctacggtctgacgaacgagcgagcgctcggttcaccccaggacctgggctcacaggccgcgggccgggggaagtcgtgcaagcacaatcccgactcccgcgcgctaggagcggaggggaggggaccagactccgcaatgagagcaagcatactggtccgccagggtcttgggcgggcgcccagggccctgagaaaccggctagccaggcttttcttatatgggggcggggacggctggggagctcccagccaactctgtgtctgggtttttcaagaggatggtgaagtcggaggccagcaatgcggctaccgcctatttccgtccagcaagacccttgccctctctggtcacagtcctggggctgggctacttcgcggtgaggcgtggggtggggcggggcgggcctctgttttggcccgccgggccctcgtagggcgaggggagctctgggaacggggcctgtgcgcacgcgcatctgacggttgtctcggttactcatgtaagcggaaattcggtgggctcttaggatagtttctgctttctagtgttcctgtctttgggtcctcacctctgcatggttactaacgggttatccgagcctaagcctctcacgaagcggaaagtcaagttaacagactgccataggcctgccaagtcagaatagggcttccgaagcagaatgtttgagccaataggaattgtttggaaaacggggataaatctaaaggatgggtaggatttaagtggtaagggaggataaagaggctataactgttctgacataggtgtggaagcaagaagaaagctgtacctagaaaaagagcgacgtttgtttggctgagaaataatctgtttaaaggataacgagaaagatgcgtggaaaagtagg

SEQ ID NO: 4896 - DNA, 6000 bp, Homo sapiens
gacgttgtcaggatcagccccgttttgtgtcactctggtttcaagttcttctttcaattctgtgagcaatctgaggctccttccagtatctcccctttgatgacctaagctagtctgagtggggttctcatttccagccaaaatgtcccgactaatccttggtagtctggtcctaataagacatctttcctgggtaacagagttctttacagcttacccagtatttttcgaagttttacaaactttatctctttggatttttattacaagcttgtgaggtgggttttagtattaccttgactttacagataagaacagcagggctcaggaatgtaaagtggtttgctcaagatcatgttgagaactaggagagcttggacaccaactccctcttctgttcaatctcaccctgacctgcccattgccctgtaaacacacacagaggctgcagagtggagcccagggtgggagtgcagcactggggaccgacacagagggctatagaagtcaggggaagacaaagggcaagctcttccacttacaattttatctgtggcagcttcaggtccaggaaaaagataagaaactctcagcttttttcttttcctccttcctatactgttttttgttcccacagtccatacattaggcttgcagtctgcactacaattcagttatatgcttggcaattatggttctaggtgctagccaggaaggtaaaccactggttacaatacaacccttttatgagttggggctgtctatattgaattttttattttttaataaaggagaataaaatagacctgttttgcatttcgtgtctctgaggctctctcaagccactccatgttgctgtaagaatggatcagataggccaggcacagtggctcacgcctgtaatcccagcactttgggaagccaaggtgggcaggtcatgaggtcaggagttcaagaccagcctggccaacatagcgaaaccccacctctaataaaaatacaaaaaattagctgggtgtggtggcacgtgcctatagtcccatgaatccaggaggcagaggttgcagtgagcccacgccattgtactccagcctgggtgacacagtgagactccgtctcaaaggaaaaaaaaaagaatgggtcagataaagctctgtgggtctctgctacagctgggaatggcaggtgagtgtcagatgtgactgtctggggcatggcagggaaggccatgctggctttgtgggtattcccaccacacttttcatagcagcagtgtggccaactattccagaaaggacacatctcccagacgctgctcaggccagcaagatctccaaaaccgctcagtccatggtttgcaaaactggcttccccatctccttcctccttgttctagctcatgacctcctgcacatgcaggattgagcagaaatcaccaggtgtgagtaatcatcttcccaatcccagcctttaccggaaacctctcctcggcctccacactcctctccttaatgatggtggaggcgtccctttgtaggaggtgaccctcgttagtgcctataccctatctcctttcacctgctcttcctatcatggcccctgccttcttcttagatcattcctatcagtgtgcaagcctgcttcagtgactcccatattttaacaaacccctctttattccaacaaatgttagaattagatgtggctacatgtgccataaaacagaggattaaacaagacagaaatgtccttctcccataaagaaagtcaagaggtagtagtccaaatgtgtggtggctccctacacattagcatccacatttattctcacttccactaacatcctcaacactttggcttccacttaagatccaatatggatgcttgagctccagctatctattaatatatcctagtgggcaggaaagagtaaagcacatgacttccctttaaagccagttttgaatttgcacatggactcctacacttacttcctattgggaggaatgaagtgtagctgcaagagaggctgagaaacttgcctttattctgggaagccatgtggccagacagaattagaaattctatgaagggaagagagaattactactaggggcatctagcaatctctaccaaagcatcctatgcttccgtatcctttctagatccctcccagttctccattccctgttagacaagttgtgcaaatatggtagctctaccacagcatggcttccaccactactccaggaacactgccctcatcatgttcaccaattgccttcatgttgccagagccaacaggtcccagtcctcatcttacctgatctctaagcagtgtctaacacagctgacaactgctttctggaaacattttctcagtctctgggatactcctgattctccttctgcctccccagtctctttttcagtcttcttgcctgctttggttcccctgggtccctcctgaactctctcctcttctgcatctactccctcaccctgtgtgtccttctcagatcccgtggccttgagcatctttatgctgatgtatcccaaagcccctctcccgccctggcctctcttctgagttcctagtgatgagataaccccgctggttctctaacaggcatctgaagctccatgtggcttgaacagaattcctgatgtaactccctgagatgtggttcatgctttttgatccaataaatgaagcactatccacccacttaccccagccagaaacttgagttatctttggtttctccatttcctgcccccatgtccttcctatcaatgtgtcctcttaagtccaaaatagcatctctcaactactcatcttagcatgaccaccactttggttcaaaccaccatcatctttggcctggattgtggcaagcctaattggctccctgcttttatttttgcctgacacccacacacagccttaaatcagaacatgttagtcttctgcataaaacccttccaaggctcaacaaagtctccattctttgacacagcccacaggccctgcatgctttggcccccacccaccttctcactccatcctgggcctcttcccctaggcttaaaacttcagccacactgattttctttcagttccctgacccatccagaacttaccctgaaaaggcacctactgctctcagcgaggaatgtctctgcccaacttttcccaaggctaactccttactcttttgacttcaatttcagcatcgcctcctcactttccctgactgcttcatctaaggtagcttttattctctattctagccccttgtttttgtcccagcctttacttcaacttgtgattatgtatttgtcttctccactaaaaattaactttattgggcaaaaggcctcagctgtcttgttcactgaagtatcccaccatgcacacagggcctggcatattatcaggcactcagacaaacactcactatctgctgaatgaatggacaggttcccagggagtttccagagctgcctgggctgtcacagacaggttgcatccctcttaattaaacaaacaaataaaattagccaggcaccgtggctcatgcgtgtaattccagcactctgggaggcagaggcggaaggattgcttaagcccaggaatttaagaccatcactggcaacacagcaagatctcgtctctacaaaaaaaaaaaaaaaaaaattagctaggtgtggtggcctgcacctgtggtcccagctacttggggaagctgaggcgggaggtcgaggctgcagtgagccatggtcatgccactgcactccagcctgggtgacaaagcgataccttagctcaaaaaacaacccaaacaaacctgggaatggactgaacagtctccatttcaagatttcctccttccattggaattaacctgttggttgcttgtactggcatgtggcaaccagtcttagcccagttttaatagatccctgtttggtgttactcaacagagaagaccactcggccctcagccaccgaataagtttaagaaacagaggtgtggcatgcttcattctacaggtagggaggctgaggctggggagccgcccctggctatccctggaaacccctctaccccacaggaatcgtcccagccatctctttagcgtaaaggtgaggaacaaatctcagccacgatccaaagaggggcgccacccctggctgtccctggaaacccccctacaccacaagaatcgtcccagccacctctttagcgtaaaggttaggaagaaatctcagccacgatccaaagaaagcttggtatttttagcaccaaggccagaaggagcgtgtccttactccttggtttacaaagaaataaaaaccttttccccatccttcttttgattgaagactacccccgcccccaggctccaaagccgggcaggaacgcctcttatctccaccacagccattttcctaatccttcgcccgctctccacggtcatcccgtgtatccctcgagacgccgcctcccacagctcgtgcttctcccaggttcggctccgacaaggccagagcggcgtctgcgcagcgcaacggctcagagcgctcccggcggctacaagtgcccggccccgggccaggcccggcctgcgccgcgcacccactgggagggcgcggaccggggccgccccaagcctccggcaccgcccagagcgggacaaaggggcgggccggcgacccggcctcgcggtccccggtgccgcgcgggccgggaggcggggtgcggtgggggaggggcgaggcggctgggggaggggcggggccagggcgggcccaggcgcccggggccgcaccgggcggcgcagggaagcggcgccccttcctcggcagacggcaggcgccgcgcctccggccccgcccctccgcgcccctccgcgccccgcccccgccgctcggacggcccgagtcgcgccctcccgccccgcgccgcggaacttgctctaacttcctcggccgagccgggccgcgccgccgctgccgccgccgcgcgcgggtgagtagagcgcggagacctggctggggcgtcgggccctgcccctttctttgtctgaggccgacttccccgagcgttctccgggggcgagggctgctccttaggtccctgtttggcccctcagcctccctccccgcctgcccaggagcggccccgcgggcggcgctggctttgtctgccaggattgctcgctagaggttggaggcctccgccgggaccccgctgagccgaactccggcgccgcgcggacgagagccgcggcgggcccggggccggcactcctggttcggtagccctcgccccatcagcgcgccccggcgagtgcgcgcccgtgccgggcggggtgagggcgacgggagcctggacggccgctgctgctcggggctctgcttctcgtccccagcagcgagctcggggatgggccaccctttcggctcagtcacccaccctcggctcccaggagatcgggtccggggtgggggtgggcgtaggccggggcgggccgccccttcctcctgccccgccgtggttgtgctcagtctcccacgccgccgtgggtcccactctgcccggcttgggtttgggacggccggagtttgagtaggcggtgacccagcttctccgcgttagtcgtgtggggttgtgtttgggagcaaagcctgacccctgacctagccggagttctggtagagtgaggtttgtggctgcggactgtgcttgtcccgggccgctgctgcttctcctccacccccaggggtggggtgcgggtgggtaggaagtgcctgtgtgagggtgtgtggagggactttggccctgggaccgcaggagcacttgtcttggggacttaaagttgatctccggcgagaaacagtccgtgctagggggagtcgggggaagtcgtgggcccgggtactggcctggggctgggcgcagagcggtggtgagtgcggcggtgtcacacact

SEQ ID NO: 4897 - DNA, 6000 bp, Homo sapiens
gacaggttatgggagagagagaagaggagggttggctagcaacagcgatcctgttatgcagatgtaacttcataggtagtagccttcagagagaaagatggtaaatgtttctttcagacctttatggtgccggactctcagtctttcctagatcagacaagagaagaccttcggagaatgcaggactttatcaatgcagactttttctacaaatgctaatctctcccacaaaagacagctttttagctattattttatttccagcctttctgaatagtcatcttgaacaatgtcaagaaaatatatttgggggtgaaatattttcatttccttcaagatcacaaaatcacctcaaataacaactcactgatagagtcatagagggtaacaccaaaaatttttctgatgagcctgatatcagagtgaatcacagaaatcctgtattctaggccagtgctcctcagcctttttttattattgcttccctaggaattcatttcagatgcttttgcctgattccctcccccatgacatcttaatgtcatagctttactagcacatgtgctgtctgcatatccatgcattatatattaaaagagagattttttttaatccctcaagcaccagcttttgcctccatcgcatgttctagacccagatctaccatttaccttgctatgtttttgatatagtttgtatatttgtccccacccaaatctcatgttgaactataattcccgttattggaggaggggcctggacagaagtgactggatcatgggagtggatttctcttgaatggattagcactatccccttggtgctgtccttgagatagtgagttctcaggagatctggtcatttaaaagtgtttggcccttccccgccaactctctctctcttgctcttccttttgccatgtgatgtacctgcccctctttgccttctgccatgattggaagcttcctgaagcctccccagaatcagatgccactatgcttcctgtatagcctgcagaatcatgggccaattaaacctcttttcttataaaatacccagcctcgggtatttctttatagcagtgcaagaacaacctaatacctttttcttaagaaaagctactacaatttctgagtgttggtttcctcttggaagactgaccagaaagcatgacactagtctcaattttctgccaatatctgtccctccacagatactaccccactaatgaccttgtcctttggcccacttacagcatttagttgcacatatgtgaggggtatatattgtcagttaggtgaatgcaaaattgagctacatttttctttaaactgccatcgatgtcattttcaaggccccagtcagtttagagcagacagcctatttattccattttgcaagctcagaacagtctgacaatttgtctgtcagtttcaggatttattaccatcagtcacattggagttcaaagtcctttctcctctcctgggccacaactggattagaaacatttacattaaacaggaggggaaaaagtgtagcttctctgtccttccactctacctcttagtcattgcattgtcatgcagctgccgttcagcaaaatctaaagggagtagtccccatggcttcattgtctttctgtggctggcaggatataacttttgaagttggcacagtttgatctctcacccaagcagagtcaaatggctctgccttgtcatacactaaatggtctgttggtgcccatctgggcatctcacccacacatacttctagtgtcgcctcactactgagcagcatctcgaagggtgcaaacaagcaggtgcgtgctcacaatcacattcttgtgtttatctagaccttagggattccaagggaaaacaaggccaagatggggaagatcttgtaactttcctacctgctctgttgtctgccacttagcaaccacatgagaagcaggtgccaattggtccctacattcagaaacatctgcaacctttcaggaagaagcaccttccctttgttgggagactccatcagggagggcagaggttaaagccccagcaaactccctttccaactctgtttcattcataccacatcttctgatgggaaagcatagtagggcaaggtgagagcatttattttaactgaaagtaaataaaatattttatcttttgtcctggctctgagttttctccactataatgcagcatatctcacttagccagcaagtggagaataaggaattcatcagcagactgtaataaaaaccgtgacatatatatagtattggaatttacgaatcatgtcttttcctttttatttacttatttattcttttattttttattttttatttttttgaagtggagtctcgctctgttgcccaggctggaatgcagtggcacgatctcggctcactgcaagctccacctcctgggttcatgccattctcctgcctcagcctcccgagcagctgggactacaggtgcccaccgccatgctctgctaattttttttttttttttttttttttttggtatttttagtagagacggggtttcaccatgttagccaggatggtctcaatctcctgaccttgtgatctacccgcctcggcctcccaaagtgctgggattacaggcgtgagccaccacacacagcctacttatttatttttaaagacagcatcaccctatgttgcccaggccggccttaagctcctgggctacctccccagtaactgggactacatgcatgtgccaccattcccggcttgtccttttctctatcctacactctaagaacttagaagcagagaacttaacaattaaacacttcaaactaagttttatgtatctacttcccctcacttgtatctctccctgtatcctattgctaaattaatgataaaattatccacccagttcagaaggattactcagggagccttcctcattcttatcagctatatttgaccgaccattcaatcctgcaaactccacttcagcaatatatctctgtcataaacccctctgtgtctttctactggcttaattccagcctttattgccttttggttgaacaactacaataaattcctaattggtctcctggtccatggaacctctcccttcctacactgccacaagagcatatatttcccaatgatatgaccagattcctcccctgcttcaaaatatttgacccctgtggaaacaacaatacaagccctttacttgagaaaggaaaatatgaaatcagacatttttcttccaatatggagagaataagctttaataggaatcttgaagaaagcttgagtcattgacttcaagatctttattctggtactgtgttgtaaatcctttctctttgctgataacagaagctctagaaaaaaagactatcactgaaggagccaaacagaaaacctatttgctagctaataaaattgggcatagatcaaaataaaaattaaactgatcatgcttgatctgttcagtttcgtgagatttctctagtgttttcctgccattttcagcgtaaagagataagaattgtgttgctgccagactcttttattatccacatagaaggcaagtctttatatttgtcaaggtttacatgattaggaatcataaatcacaattaactactgcttaggagataaaggttcatgaattttgcatgttgttaatcaccttatcaccctttcagggttttaatctgctctttcttcatggtattaagttatcacattatattttttctatgttctgtctctaccagaaagtaaagccacagagcaaggactttattttgttaaaatagtggtagcacacacgggtttaattcatttgctgtttttttgtttttgtttttttggtttcttttttttttgagactgagtctccctctatcgcccaggctggagtgcagttgcgggatctgggctcactggaacctccgcctcctgggttcaagtgattctcctgccttagcttcccaagtagcttagattacaggcaccaatcacgcctggcaaatttttgtatttttagtagagacagggtttccccacgttggccaggctggtctcgaactcctaacctcaagtgatccacccgccgcggcctcccaaagtactgggattacaggcttgagccaccacgcccggctgattcatttgtatatatttctagaacagagcttggtacgaagttgagcattcagtaaatatctgttgaaatagagggagagtgaaaaagaaagtaactctctcgcgtattccacaactagctcttcacctatcaaattacgcgcaatggaaacatcttagtcctcagagcaatcctgggtgcaaggcagaggcggctgttatcaggcctattacacaggtttagggtgaaacttgaaaatgtgggcgggaaagtcacaaagcaatgaaaaaaccatctagaaaaaatcttttctggatgtcaccatctaacatttggcatgagaccccagaaaccggatgactcggctcagaagcagacacatttgaaaagatatttatctcacgataaattaagggacaaaaaggccttcaaaaaggaacggaataaacggaataatttttaactctaacattactttctttcaatttttacataattcttatagctgcggcgagtgaaacgactaaaacaaaagcaaaacagagctccactgcccaaaacaaagatggccgagacgactcccatgcccacacgcaaaatggacgctgactatgacgttccctgcaacaatcctcaactggccccgccccaccaatttggaaccccgcctcctcaacccggaaccccgcctcccccagtgtggccgcttttccgacagaggcctgcccgtgattggctgctcgtactatttacgtcctttcgatgttgcgtcatgcagtgcgccggaggaactgtgctctttgaggccgacgctaggggcccggaagggaaactgcgaggcgaaggtgaccggggaccgaggtactgctccggctggccggcgggcgcccgggatccccggtggtcctgacagccgccctcacgggaccgctgggtgcggggggaagggctggaagcagcggtgctgctggctgcgtcagggccggcctgcgcgttggggtcgcagtcctgtgggtgacctggtggagagggcggcggcacaaggccctggtcaggcgggcaagggctcagtgtagctgtgcttctgtcctcgggcaacaaggtgctgagtcatccttgcggcgaggccgtacagccgctgcgctggtagcggcacctggggcaggggcagaggtgttgtgggttgacagggaagtttgctgccgggttctcatctgaatctagcgggctgggtgaactttctcggggaccaggcacccaaactcatcaatgctcacggaggcataagcccttggattagggtcggtagtattttccccattttatagcaacgacatctgagtcttagagatccacactcctcacaaggtcacttctaacctgtcagaagcgggattcccactctgggctgttacgccacatggaggtcactctgagctggacctcttcggccccaaccagtggactgagtactgaggaagatacaggacagccataggttgagatgatgtaatggcacgaaagttccaaaagcgctgggtgttttcccaaaggccgggtgccgaattttaagacccttaatagttcagttgcagagctcggaggacgctcgggtatcttaaagcaatagttcttagcttttggagtgttcgttaaaacacacgttcttggtcttattcctaggggtagaatcattaggagcaaagaaagacccaggagcctacattttaagatgcatccggggcactttcaagcaggtagtctaagggtcaacgctgtagtctgaacacggaatccttatgttacagatggggaaatgggcccagaagta

SEQ ID NO: 4898 - DNA, 6000 bp, Homo sapiens
tgtgcacacatacgcatatgcgcacatatgtgtgcacacatatgcatatttgtgtgtacatatatacatatatgcatatacttacatatgtacacaaacacctacacacacacacaaagttcagactagaaatctatttgaattatattcaatagattatatacacacacacccctattacacttggattaatttttagccagaaaaaaatatatatatagcttttttttttttgaaacagagtgtcgctctgttgcccgggctggagtgcaatggcgagatctgggctcactgcgacaagcgattctcctgcctcagcctcccaagtagctgggactacaggtgcctgctgccacatccagctaatttttgtatttttagtagacacagggtttcaccatgttggccaggctggtcttgaactcctgacctcaaatgatccacccaccttggcctcccaaagtgcttgggattactagcataagccaccacgcccagccaaaattacatataatacacctttaatatgtacttagtgtatgtccagagcatatatattatatatagttttcatctggttaaaaaataatccaagtgcaataaaccaggtgctgtgaggatagggaaaagcagggcagtgagctgcagcaggacagggaaggccaagatctactgtgggctgcgtgggagttggggtagggaggccccagctcccggtgctcggtgggaggaaccatagtcctctaggcagtgcctgatagccagagagtagtgagcaaacaacaggtggtagtccaggagcgcagtggggatggggacatccagcctgaggtaatgggggaagggaggcccaacagatagatagaatacagatacagggagcctagaaacaaagagctggaggcaattaagtgatgccaccaacaatacctacaactgcccagcagtctgggtgcagggatgcagctaagtccaaacaacaagcagagaaattccaggtcctggcaagctaacaggtcagggtttcagacacaagagaagggctgtcagttcttagaaaggggcgaggcagtgggaggctgagtcttgagcttgggaccaaagctctgataattcttcctgcctcaaggcctaggaaagatcaggttctatggtaaagggtgtacggatagtagggaaaggaggaatacagaggccacggactaggtaggaccaagtgagagcagcaatatcctccatcatctatctttcaatcatagtagccagtgctttgaggcaaagataaattaaaatggagctaagggagaaggagcaagttgtttagaagtaaacaaaagaagtaaaacactgtaccaccacaatgaaaatgaattcaggtttttaaacttcctctattttgtgcactgaattatatacatccatcttattcttaaccacagtttctgtttcagtttagtccttctaagccatgatggggtactactaaccaaaaaaaaaaaaaaaaaaaaaaaagatgtagtagtgtccatgctgaaaaatgaagctgtttattctccctaacacctacccatttaatattgggtttgaagccaacctaaagggtcaccctaccaatggcattccttcactcgtgcctccttactggcctctaacttatcatcagacccagagacttcgtgctgccttttgccttataagatctttacaacatgaaaatgactttgaatggattagcttggattaatctattcaccttggatccctgaaggcagaagtcccatttcactgaagaggatgtgatccacagctttcccagccaaccttcactctttccaagatagccatgccaccctctaacactaaaagggtcttggtgacaaggtttagaaatgcctagaggatatgtatgcttatttctcttctctcatttaacaaatattcacttgccaggcactaggctctgaggagagagttgagaatagattgacaaagtcaagctggcctgtagtcccagctacttgggcggctgaggggggaggatcacgtgagcccaggagttccaggttacagtgaactatgactatgccgctgcactccagcctgggtgacaaagtgagaacctgtctctaaaaaaagagagactgacaaagtcttttgctcatggagtttatattctagtggagcagaggggctcagaccacaaacaaataactaaatgcacgatgtaattaatgaatgctgctttgggcatgtaacaactacctctcttgtgacctacctggacagaagaaaagaccatttccagcctattctagtaacccacttaaaggaataccaacacattacggaatgttaactgtggatcccgagatgttgcttttgagtttgggggccagaacacacgtgtccagatgtctccctgggcagacagaccggagaaacgggctggcatgcataaacatgccagtagccagggagaacagcatgccccactagctgctggtagccagggcgctgaggattgaagcctgggtactagctgggccttatcaaaggagagcgaaaaattcctgaagatttgaaaaggagagtcttttgcagagaagcaaacatatcacgacttaaaatttgatgcttcaattttgctctcatttctacagtggcagataacacaagccagggaatactcatttgtacatttcagaaacttgatgtactaaggttcccacctgagattgttgtctattttatagaccaattcatatgtctaaaaatccaactagactataaagagcataataacacgcttgccatggttttctctgccgacacattgctcagcatacgtcaatgagagctttgaccaatcaatgtgaatctccttaagcaaaaggcccatcttttcctttagaactaaagctggggctgggcgcagtggctcacgcttgtaatcccagcactttgggaggccgaggcgggaggatcacgaggtcaggagatcgagaacacctattaacacggtgacaccccgtctgtactaaaaatacaaaaagttagccgggcgtggtggcgggcgcctgtagtcccagctgctcaggaggctgaggcaggagaatggcgtgaacccaggaggcggagcttgcagtgagccgagatggcgccactgcacttcagcctgggcgacagagcgagactccgtctcaaaaaaaaaagaacaaaaaaaccccaaaaaacaaaaaaactaaaactgggtattatgaaggaaacttgagaaagaaaagtgaccaattttagttgatgcaagtaatctcacgtatcctcttcttcctgcatagcaagatactacaacccatgactgtcaaacctgagacagctgaagagcccagaaaaaaagattagggaagaaaacagaattgaaaaataattcagaatgacagaggctatctgcagcattaagggcaaaggcgggtaaaagaagaaaagggagacagaataaaagataaaccaaaaaattgaaacaaaatacacgggaattcaaacatttataccagaatataagggaataccctggaatctaaacacctcttcaggcaagaatgtgtgtcaatacaaatgcctggcacattgttttccttccccctttctttttacccagtttacccagttttaaaagtgattttttaaaatgcacctttaaaagaacatcttttgttaagtgacttaaacttgatacatttcttggattactaaggaggttaaagtcacatttggtgaaaaaggggcctatctcctctttcctcacatacgggtcatcgaatacttttaaaagcattttccaccatgaatgaggggaaatggaagaaaagaggtggtgacaattatttgcattttccaaatggacggaatgagcctccggagggtacacgaggtcaccagcgtgagcccgcggtggagctggaggcgtatttatagctggctgacctcagtcctgttgggccctcgccgctccttatcttatgccgctggaattcgcgggctcgcaggtcacaggagcccgggcgcgccgggcctggcgctcccgaatcgatgagggaagccgctctccccggcagatcctcccggccggggagcctccatcaccctgcctgcgcctcggcacgctggcaaggagcccgggaagagacgccgggagcggtgggtgggcgagaaacaaatgcaatgtgacttatatttttctttgtcgcaactaccacgacctggccatcccccaccttggtgacttggtgccttcccagcgaccttatttcacgccagctgactggcgttcaccgcagtgtgagtgtcggccggaggaggggtccacgcgaaagagcccgcgagagtggggatatccggccccgaaggccggagcgggcgtccagggcgccgatggccgcagcgcccggcagccgtgtccacgctcccctccgccgcgttccatcgcgtgctacctacggcgtctgcgggaagctacccgggcggcagctgtggggctggcttgtggggaggggccggcgggcccgcgcggaggagcagccccgactcccgcccgcaccagcagctcggcgcccccttgccggcggctggccctcctccccggcaactgggcgccgggctccgcgaactcttcgggcgcttccgccgtgcgctcggctcttttcgtgtccggggcggggcggggcaggcgcccgtggtcgggtgcgcgcggcgcgggcgggggccttcccagtgcgcgcgcgccgtgcaaggcccgcggacgcccgcccctcccccaggcccccgcacccgcgccgccccctcccctcctggcaagagtcggcggcggtggcggcggccgctgcagagattggaatccgcctgccgggcttggcgaaggagaagggaggaggcaggagcgaggagggaggagggccaagggcgggcaggaaggcttaggctcggcgcgtccgtccgcgcgcggcgaagatcgcacggcccgatcgaggggcgaccgggtcggggccgctgcacgccaagggcgaaggccgattcgggccccacttcgccccggcggctcgccgcgcccacccgctccgcgccgagggctggaggatgcgttccctggggtccgggtgagttgggagtgcgcgtgcggaccggaggggctggccgcagcggggaggccagaggggctcgggcgaggctgcagaggcagctgggcgcgcggtggccggagccaggggctgcccggcccggccccggcagctccgcaggcctcggcgcgcgctgggccgggaccgcccagccagagacccacggcaccccgcgccgcgtcccccgccggcccctcttttgtctcccactcgcgggttgcaggccgagtttggggatgcggagtgggcgaaagtcgctccggggacgcttctggaatccttaaatgggaaaggcgctcacctccccgccccggagcggcgaggctgatatttgtgatttggctccggacgctgtggggaggaacaggggagaacaaaatgagtttcgggcgggggtcgagtgagaggagcagccggcccgcccccgagtccccgcgggaaggggccctggcccccgagctcccggagctgcttcacctgttgtcctgcgcggcctccgctccgtggcctggtgattccgtacttcagttttggaaaactttctgctggattgcctggacccttttttctctttccagactcctagtggaaagatttggcaaggaaaaaaaaatgagcttgcgtcagggaagaaaaataatatgctgtgtgttagggtctggcgtttgagcgtggtactctttcatgctctcagatgttttaatttggtcaaactcctgcaggttttctcttttaagcggttaacaaactgttcagagtacatagtatgaacttggcacctgtgttacgtcatttaatccttacaacgattctggtttattgtattcct

SEQ ID NO: 4899 - DNA, 6000 bp, Homo sapiens
tctattaatacctgtaaattggatggggaaatagtcaagcaagttctttaccttcatcaagaaaagctagtttctggtgacctttctttatgaggttttaatcaccccagagttttatccctctcagagtcagtggtcggctcttgtatcccatgagtaaatgcaaatgtttcctccatttgaaagcaaaaccagtaagaccccttacttataaagtgagttaaaacaaaaagaaagaatataaaaactaaaggaaggtagtaagtaaagcatttagctttctgaaacaattcaaatggggataggaagttggttttaaatggcttaaaggggattagggttttaaagttggataaagagtttggtgcttaggtttaggcatggcattgcttttaaaagattacttccatatttgacaatgattctaactggagattataaagtaaatagtcaattttaagacaccacgggaaacaagagggtttcttttttgttgttgtttgtttatacaaaatggtagcctagagttaacaggctgaatcctgaagccctcatttcataatactacagaggatctatcaccagagagaatctagcagaggttgtttaatgcacttaattgagattatctgagcttttggtttaaattactttggaaaaagtcttaggtgcaaacagcgtccttgaaaggtaaacatacttacctctaagaaaaaaaggttcaatttaagttctttaaaattcttcatacaggttagtagcaccaacctttattaattaaatctgggtactgactaatgcataaagataaaatttctatacatcagtacaagggttaatatatattatattaacattgttttcattattttacaattatttgaaaacatgaagtattttactagaaaacaacccctggcatttttagtaatttcaaagtaaaaagatctattttgattgtaaagtacagttaatgaagttttaaaaatgaatttccgtattctgttccatctaagaagcaagccatattaaaatggaccaaggatagcatataatttaagtattaactgggtaaataatcaaaagttgatttaacatttcccccatctttcgcagctccttgacctgtttatggtttgggattggtctacttacctagctgattatgggcagccagcttctaagtaccttcgggtgaatccaaacacagcccttactcttttggagaagtgagtatattctgaaacttttttgtataacattttagcaccttttgattcagtgataaactgaagaactagagatttctgtcaaaaaagaaaagtctagatggagcttaaaagctcactctagtttaatgaccaaaaaataagcttttctttcttgcccttcagagttggtgtagtttcataagcaactgctgtttatattgatgtgaacaaaacatctttccttttgtatcctgaattgcaagcttaattgaccttagaaatatgtttactggggatgtgacaattggagctttctttaaaaaaaaaagtctataactcaggaaagaaggtattttgtcaaatgtgaccaggaattggaatgtttgccaccagtgttacctaaatcttagcattatggacttggattctttgcaggtagagaaatatgtgatttgaaaaaaaaaatacagtaaaaactgaggtaataggatttactgatgcatcttgtccaactaaacataaatttaggtgttaacttttccctctcattatgtgacagactttttctttactcaatcatatttcatttaaaatgtcactattgggagactctctgaatctgctgtgattctgggggctgctggataagaaaaataaaaaagtatcactattaaaattttcaattttaaattaaaattgttattattttcctatatttcaaaatatttgtggtgtatttgatttgaaaggacaagaggaagtgtttaaaataaatgtaaatttattttacaatgccatgaaatgcaactgaggcaaaaacatcgctattttacattttctaatgttattttcctttcaccttatcttgctatgaatatgattagcagagtctatacagggtatgtattttagcatactttgtggaataatattagaaaatagtatgatagtagtaaacctagcatattttagatgtacatactaatgcaaaaataccacttaacatagaatgtaaaataaagcttctaattttttgcatggttactatatctgtatgtttatttagtatctactttctttgaactatatttttcaagcataggattagtgtgggataattcagagcatgccaagatattttacttgtgacagcttagcttttaattttcttttaccaagcttcttcattcacatatgtttctaggatgaaggatactagcaaaaagaacaatatatttgctcagttcaggaagaatgatcgagacaaacagaagttgatagagacagtcgtgaaacagctgagaagtttggtgaatggtatgtcccagcacatgtagacctcacatggcttgcactcagtgacaccaaatccatgattcaatgttgatcttgagcaagtattggtcatgatacagtaatttgtttacagaatccaaaaatacaatagagaagatacatgagggcttaaacaagaaatagtaataaatatcatttgtatggatttttaaataatcgaatactattttatatatggaaaaaaatgaccattttttcacttttaggggaaaatgcaaaagtgtaatacataaattgtcacaaattatacatgaaattgattacaaatacatttgaaaaacatatgcctctactcataagtatttttttctatttagacttgaatgataatctgttttttgatcagtatatggctttggaattcaatcatgtctgatatggtagtatttcactaccattttctgacttttagcttttattttcacctcaatgtgatttaagcagaccaaaatttctaattctgctaattctgaaggggaaatagacaaatcttaaaagctgcctgaaatcaaacttgatttaactcagtaagaatgtgaattatttgttctacttgggtggtttaatttaatcgttctgaatatgaacaaaaggttttggattttctaaagatgcagtgttgtttctgttcatcagggttaatatttctaactatattgcttgtaggtgaccccattctggatttgtttggtttggtttggttccagttaaaagagaggacaggaactaaatggggctaaccacttcaggtgcagcttgtgcgagggtagatggttcctgcacacagaagttaccacaggggtcaggttactttcttcaaatagcagatttcagtactttatcctcattgtggaaacaagccaaaccaaatgaactctggaaaacctaaaacaaatgtacattttcctttgtgtatgtttccgtggtccaaatggcaatataaatccagtctttattctccctttgttgtatttatgctgaatcttccctttgccttttcaggatttaggcctgtaagaaactatgcctgattctgtaaaataagtgtaaagaattatatgtacatctctggattttgtgatgaaatattaaaaatattgagcaagttgttgaaaatgcattactattttgtctattcagagcttactgatttaaaacaagtgcttcctggagaaaaggcatattatttcctagttactggaatgggagtggcaccaaaacagtatatatacatacacacacacacacacacacatatatatacatatgcgcacttgttctctcgatcatctcttaatccaaagtatttaatgtttttaaaaatattacatgaaaagcatggtagttcttcaggcacggtgaaatctggaggagaggagcggtgaacagctagctctctttgaagactggaatggggctgcccttcgcgccttacccagccttccagcgtacttggggtgtcttccctgctttggctgagacgtcccgggattcagagagatactgcctttgcactgcctggaggagaccactgtgggacctctttactcttaccaataatataaacaccctgcacccctccacacacaccccaggttgcactgtagggacaagaacgagtgagtcctgaggcatttggaacccttgaatgggacgcacaaagcccaaaacgcaacaatgtagattgacaagagtcgtcgggcaaactcgggggagggagggaaggatgtgcagggaaggatgaattcggtccttgagaccggaaaggtgctcgtgggtatccgcttctggaggcttaggacgtctttatgaagcctagggcagtagtggaactgccatctttggaaggatacctgacgtggtagatcagagagccgggagaggtggggagctgtcggagaatctcggctgcgctatccctcctgggcttttgcgatgccaacgcaggcgtcgacgactgcagtttccctgaaatagtcggagcaaaggagagaaaagcccagttctttcaccttggagtggcgagagaaaggcacctagaagctcgagggcggggacggcagagggagccagcggccgggggtgggccaggagcactgcggggcgcaagcccgggtcagttctgcgcgttgggttcgcccactttctgagcgcctgcgaagagcggggaagctctggcgcgaacccgcaggccccgcccgaggacgctcgcggggcgagcccccagcccagctcgagccgccccggcgcctgccactccctactcagagcccctccgtgagcgcgccgctgcccaccgcctccaatcaccactctgcgtggagcgctttaaatatgcaaagacacgtcacgttgtgtgaaccgggatcggtccgtagggggggagccaatatctatataaacgtgtccagcgtgggccaagaagggttaaacgactggaggagggacaggtggggcgggggtctgcagaccaggttggcaacactggtgagttgctcttctttcgccctccttcccttcttctatccaaagggtgctgagcccgggaggaggtgggaggtgccccgcggagccgggagtgagcgttcccgaggcagcaggcaccttcgagagggactggcatttgggcccaggagccaggaaaaagtcctgagcgtgccggcctcgaggaaggcacgttccctaagggcgcacggtcactgcagtctttcaccgtccgtctgtttttagaacagagttctggcctgagcttataaatctcgggctttgcccccaaaccccaggccttttgcggacggaacaggtgagcactgcgcactgctcgcgccccggttcttgcgtcccctgctctccctgcgctctgagcggcctggcccccgcgggctcatcatgttcccttgggggctgagctgcctgtcagtgctgggggcggcgggcactgctctcctgtgcgcgggcctgctgctcagcctggcccagcacctctggaccctccgctggatgctgagccgggaccgggcctccaccctgcctctgcccaagggctccatggggtggcccttcttcggcgaaacgctgcactggttagttcaggtgagcagtccttcgaccccgagcgctaatacggtcccttcttcccccggctcccactggaccctcctcagtctcaatgcccatgggatttgtagccagtccctgcccatcgcccacgaccccgggaagcgcgcacaactctcgcctttacctagatactccgttccctcgaagggacctcaagtcactggaattccccccagagcaactcccagacacaacgcagggggtaaacataaggggttttaggaaggggtctgaggagcacgtcctgcaagggtagaaaaggagcctggagcttggcccagctgtgagcccttgggccctcacttcttcactc

SEQ ID NO: 4900 - DNA, 6000 bp, Homo sapiens
gggaagatgccttctgcgctccgcgcccagaggaaggaaaatgtcgtgggccaagcaggaatggagggaatagatagatccccacgaggtgctgcttggcttccccttcccgagccaatccagggagggtgcatggatgggggaaggcgaggtaggggtggcaggggagtgggaatattgcaactcggggacattgcagagacccgacgcacgcggtgggacctgcaacccttgtaaggaagcgggcacgccgtgggcgcaaccctggcctggctttgggccatagaaaaaacacgcagaggatgcctgacggaaggccctctggcagctggcgtctggcttcgtgcgccttggccactctgccggtctcggcggaaactagcaactgtgggcacttccaggctcgaaagggctcaaggtcaccggattctgctggccacttcttaaaaggaaaaattcctaccttaagaaggcatttactcttgtcatgtatacagaggagaataggcacaccaacacgtctccaacgctggattattttcatgggaggttgagacataattagagaggtttgagatatttgtaccaaaaataggaaggccaagaaataaagtgtcttgggagcggttgagtgaggaggctagggtttatctgggcagctgctccctggggggaaggcactggggtgcagggttggggaggccagggaaggacccaccccacagtacacccagagaggagctgggagctgggcagcctagggcctgggctgcccagacttctctctgagtataaccccagaagctgggctgtgaattgtctccaggtttcagggaccttatttttatttttatttttttgagacagggtcttcctctgtggcccaggctggagtgtagtggcacaaccagctcactgccacctctgcctctcgtgctcaagccatcctcccatctcagcctcccaagtagctgggactacaggcacgtgccacaacgcctagctatttttttttctatttttaatagagacggggggtttcaccatgtcacccaggctggtctcaaactcttgggcttaagcgaaccatctgccttggcttcccaaagtgctggggttagaggtgtgacccaccacaccctggagtcactcctttccagtgactccagtctagtccctgcgccctcacccctccctgccatttcagggccttctggttttacggcttcaccatcctctctatcacagagaagaaattgaggagcaatctaggtgaatgactcacctgagaagcccagcaataggctcctggactccccagccagtgctctcctccacccccatcccttcactcttctgccccaacctctgttcctgtggccatcaggtagggctgaacactttggcctccttttcatgataagccctagctagacttgaggactctctcaaccattccggtacagaggttccaaccagtgtttaaatcaaagccaaaagcctccatgtcatcattcccaacagcccacttcaatctgccacccagcttccaacagaccggggcagctggacataaggggtgagccagggaagtagctgcctaggcctgagctgaccccttagtgaaccagaagaaagccagtgccctcctgacctcatgcttaaggtggatcccagggccagaaggaagggggacacagcaggcacttacagggttggtagctccacagtacagcaagcccttccaacctgggctgacactgccataacccccacacagggcaattcatcacccattgtcagccaagggcctggtgccaggccctgagcttgggagacaccaggggcagcaaaggtggcaggacgtgggcccgccctaagagtgctcttgcaaatgcagaggacagcctggcctgagaagcgtgggtttgggcgaggagaaggatgcaggcttcagggttgattgtgatttagagagaggagagaagaatggggtggggaccctcagaagcaaggctagttgagctggttccaagaagacctggttgacctgcattggggtctggactaactataagcctctgtagggatggctccagttttaattttccatggatacatcatgctcagtaattttgagggatatcttagctcctgttttagtagctgcagattctctggggaaggagcagaggaggttccttccctcctgcacttgatatgctctggagggaggcagacaagaaataaactagcaaacaaaagggtaagaatatgtccagtggtgataatcgccgtcatggaaataaaacaggcctgtgatagtgtctggggctaaattaggctggatgggtggggggaaccttggaggaggtgacatttgactttggaaggaaccagccagcggtggcctgggggaggggtgccacatgcagagggaacagcaggtatagaactgtgagacaggaacgcacgttcagaaatgagaccgggggctgaaaggagaaaagcggaggtggactcctttgctgtgactccagtctagtccctgtaccctcaccccaccccaccagcaaaaaaaacaaaaaaacaaaaaaacaaaaaacccgactccccatccccgcctcttagcaatagggaggctgttttgtaaacatcttggaaacgagttgtttttcagtgaacccacccccctccccgcccaccaccacccacgaaagcttggcgagattcctagatcaaagttcctattggcctggtaatttattgaccccccaccccccgccctgcccccctacaagatgttctttaatgatcgttcactctcacatttaatcctttcctgccggacgcccccgccggcctcgatgtacagatagattaaaacgtttttttccctgcggcaatttccagcgtgcaggccccgctcatcttgtgacccggcttgagctgaacttggcgaggtggccccgcagagttcactcggatgtcacggtccggcctgcaggggtcacaggcgggtcaggcccgaggattgggaatgggccccaggtcacgtccccattcgtcggctttgcacaccggccggaggcgctgtccagaaaggggcggacccgggatttctgagaattacctccagcgcgattggcctggcttcctgcagtggccagaggttggttcgccgtgtttacagccaccaaatcgtttgccggagactgaaaccctgcccagagcctctgaaacactgggcaggttatggggaaacgctgaccccccgaaacactccctgtggcggcgactctggcttggagagtcgctaggattgtgcgggtccctccgacctctgcagatatttcctgatacctccgggtttggggactaccgcgagaagggcaacgcatttaaactctcaggagcagagttttccacctccaagggacgccttccaaggcgtgcggcgtgcttctgccagagacagtgttcagttttaaacaaatgcaggtcattctgtttcattttcggcgccgcaggtgcgttcagcgcccaaacccaggtagcgtgtgaccctgactggtcccgagccgggaagctccggcaggtggagagcagagagagcaggtgcgcgtcccgcagcgtctgagctccgggcattggcagctcagtagcagctgattgtagatgggcaaagtacagaagacttcccagtacggatcccttcacccctcccattaggggtcggtagagccctgagtttagggccgagcaccccctcacctggatgaggacagtggctttactctgggtgggacttgggagagaggaggaggactccagtgcccggtgtaccggacacccaggtaacgcagtctaccgtgcctggagctgggaagagtagttgcaaccggagcccccttttgggaactcactaccctgaggcttagacaggtcgggaatgatcgcctcccggttaaggaggaggaaacaggcacagtgatgtgtggtgacttgcccaaggtcacacgcagtacagatggagccgggcctcggagccaggactcctgggctccccttcctcttataccgtctctttatcctgccagggctaaggacccccttccctgctgtccagctggggcgccaagcagcagggccctccgaataggcgagctgtgcttggatctcagagacgggcaccgactgccgagccccagacgaagtgccccagggtcggggatcaggcttgtgcagggtagcacctggggacctgagggacctggaggccttcttgtatcctgaagtaggaccttctaagacttcatgagtcctggcccccttgcaggggttggggagctggggatcccagatctgcctattgcgcccgatgccccgaggctctctcttggactctggccctgagttcttctgcgcgatccttcggagacgtctggaggcctgctttatgcatctctcttggacctcagtttccccacacgtgggaggaggcagctggacgattcctgaaaggactttcccttgcttcctcatcacgtggaagagagcccacccggcacctggaaatggaaagccagtgaaggctgctttgggccggggcagcgggtgggaccgggcgggagggattccaaagagaccgccgggaaggctagagcttggaattccggctcctcggagtcctggccctcccccaccgccgcctcggagctcagcacaccttggatgggggaggcgggcagctcctagccccgcaccccaggaggcgcgctcggagggaagccgccaccgcgccgcctctgcctcggcgcggaacaaacggttaaagattttgggcagcgcctcgcggggggaggagccaggggcccaatccgcaattaaagatgaactttgggtgaactaattgtctgaccaaggtaacgtgggcagcaacctgggccgcctataaagcggcagcgccgtggggtttgaagcgctggcggcggcggcaggtggcgcgggaggtcgcggcgcgccatggggctcccggcgctgctggccagtgcgctctgcaccttcgtgctgccgctgctgctcttcctggctgcgatcaagctctgggacctgtactgcgtgagcggccgcgaccgcagttgtgccctcccattgccccccgggactatgggcttccccttctttggggaaaccttgcagatggtactgcaggtaagggagggtggggcgggacaggctgcttccccggagcccggcgcggctctgggcttctgctgaagtcggggtaggcgcccccgggaggcatgctattgcggctaggagcagggctggcgggagcgcggcgctccccggcgccccctcatgcccacttctctcctccgccttcctcccacagcggaggaagttcctgcagatgaagcgcaggaaatacggcttcatctacaagacgcatctgttcgggcggcccaccgtacgggtgatgggcgcggacaatgtgcggcgcatcttgctcggagagcaccggctggtgtcggtccactggccagcgtcggtgcgcaccattctgggatctggctgcctctctaacctgcacgactcctcgcacaagcagcgcaagaaggtgggggcaggaggcgacggctggacagggagggggaccccatttatgagcggaattccggctgatggatgctaggcgcgggctagcagcttgaggtgggctaggaccctctgccagctccaggttagctttcccagctcggagagtgccatgtgtctggcaggactgggggtgtctggaaggggacggcggtagacgagaggggcggatggaggcttttaacgctgtcccctcctcgggactcaggtgattatgcgggccttcagccgcgaggcactcgaatgctacgtgccggtgatcaccgaggaagtgggcagcagcctggagcagtggctgagctgcggcgagcgcggcctcctggtctaccccgaggtgaa

SEQ ID NO: 4901 - DNA, 6000 bp, Homo sapiens
tccaaacctatgcttttcaaaagtgacaaggtcaaggaggttgaggaaagactgaggaactgtgtcaggctgtggttgactaaggagacatgacaactagttgcaaaatgtgattcaggattctaaactggattctgaaatgaatacaatgaatatcattgggacttattgaggaaacactaatggaaatgaggattagatggccctaatgcatcaatgttaatttcctgaattttaaagttatattttggttatatagtcaaattgccttgcttataagagctatatactaaaatatttcaggtttagaacttcaggtccaaaattactctcaaatgttcaaaatagagaaaattctctgtttgtacctccaactttttattacatttatagttattaaaattatataaatataaaatacatatgcatttgtgtatatatgtgtatatatagatatgcatatatatagatatgcatatatgtagataagtgatacacataaaaccaataatggactcatatctaatctatgcaagcccttcacaaaagatttgatattgccaaaggacatttgaaaaagcacccggcatcatgaaccttcactgaaatgcaaattaaaactacaataagatattattacacacacatcaaaatggttaaaatgaaaaaagacaatatgctaagggttggcaagaaagagaagcagctggcactctcagtacaattgtaaatttattaaaccatttggataattctttggcagtcattaataaaactgaacacatgcacatgcagcaattatgctcatagttatagcaacagaaatccttatattgggataacaatgtattagagtaataacagcattattcacaatagccacaaactagaatcaactcaaaagtccttaacaatacaatgaaaagataaattttggaattgttataaaataaaacactctaaactaacttacgtactgctatttgtgacaacatgaatgaatctcacaaacacaaaattaagtgaaaatactagatacttaaaaatacataatgtgattccatttatattacatttgtatgcctcacaaacaggcaaaactaacctatggcataatactggagttatctagtcggggaggaaggtaggaggagacataaagggacttctggggtcctggcaaaattatttttcttgacctgtgtgttgattacacagatatgttcaattcatgataattcattgagctatatacatttaggatgtttccaacattctctttgtatactacactccagtgaaaaggtttatttaaaacgaagcagtttgcattcacaatttcacccaagctgaggtttgcattactctctcactgtggagggcttcagccaggtgccctcctgaccatccatttgggcaatgataggaaatctctgcaatgtgagaatcactgaactgggaattaaaacctggattcttaaaaaataaagattatgtactaatgcactagcgaccgttcacctcacttattcaccaattccttatttctaataataaagtagggattaggctggtggatctctgagatctcttgtctctaattatctatgtttctttcattctttgaaaggaccaggcagaagtctcaacagaaaggaggaacagagacccatttttcaagaaataaagtgattgttttaaagaaaggcattgagatcattttatctaaaagaaggtagtgcacttcttttagagttcagagctatgtgagccaagcagtaaaataactatttttctttgtctcagataaattattcaccaaaacctcgactgactcaaattctaaaggttacaaaaccacaccctaattgtaatcaacctatgttgcaactgttgagttggttaatgtgtatttgaaagtcactgattatcctgagtagtgaaatattgcctcatagtacatggtaagtaaatgttggtgactctagttgaactgaatttcttgcttggagggaatgatgtcagagttaggagataggtttccagcctcagccctatcattttcagcctctgtgtccttgaacaaaatactgaatctccaaggcccagcttccttacctctaaagtggaaataattttaccacaggcaagggtaattgagagaatcaaaagagttatgatgggtataaaaattctctgtgaattgtcagaatccctgtaaacatgtttgataaaacattgtccatatgggatttgacaaaacttaatttttccttactgcagttagaaataactgcactaatccagtattatttccaatagccaggatgtagaaacaatctaagtgttcattcacaaataaatggatgaagaaattgtgttttatatttatatacacaatgaaatattttttaaactttaaaaggagatactgccatttgcaatgacatggaatgaacctgaaggatattatgctaagtgatatgagctagatacagaggaaaaaagattgcatgatttcacttatatgaagaatctttaaaaagtcaaatacatagaaacagagagtagaatggtggttaccaaaagtgggagccagaggaaatggaaaaaagtgtgtcaaagagccaaatttgtggttagataggatgaataagtctaaagatctaataaacagcaagaggactatagttaatatactatactgaaaatttgctaaaagagtagattttaggtgcttataccacaaaaaagaagttaattatagaattgattaatatgtaaatttgtttaaccatagtaatgattccactgtttatatgtctaccaatgttgtataccttaaatatatacaatggaaataaacaaataactgtactagtcatttagaataccacaatgacatctttacagaatatgcctttgtacaagcattgccattagtgatctagaaatgtatgtatcattttagtgatatatagagcctcatgagcgctaaatgtcatctccagttcaggtctgcacaactgtgtttgttctgtgccatgggtctgtttaatgatttccctacctcccattcaccactgaagcacatgcctgttgttctgcctataattccccttccttgctgtgcaatatttcattccattatttctgacacagaccaaaaaagcaatagaaacagcagtgtctggaggcaagtgggagctggagaagccatagtttctgagatcttacccacttaattctctgagattggctctttcctcagttatactgagtaggtttcagctcttcagtgacagagaggggagaaaccctagcttttatttcttctcttgagaatgtacaaccctgttattttgtgaacagtgtggtgtagattcagagtgagaaatgtttttaggatttattttattttgctaaaactgttctcaaggcagctctggtgtaagtgagaatataccacagcgggcgtcagaagatctcagttcaaatcccagcctgccatttatgagctgtgggacactggacaggtcatctgttctcctagagtctccctttccccatttggaaaatatgaaataatattctcagccgtccagtgtttttcacggggtttaatggaaaaaggtgtgtatgtttacttagttaattgataaccggtttagccatttaagatgaatgagtttgttagctgctttatgtttaggcagctgtaatgttagtactacattaaaatatttcaaaaggatctcattttcaaggaaaatgatctagtgtttgagaaagcattatagtgttgcagtcttgcagatccttagctcagctaggtccgagttgtcttatgcaggaagaattaggcacacagacactggagagtgagtggagtagaatttattaagtgaaaggaaaactctcagcaaagagagaggccctgaaagcaggttgcagattgccacttcacagttgaataccaggacttttatagaaaagctgatgaggctgggatacttatttgcataaggcgtgaattcctggtgtttccaccccttccttccattgcgcgtgtgggctcttagtctaagccactccatattgatttatttcccttcctgcgcatgtgttaaaggtaggaatttttcactgtgggcatatttaggcaagctccctgtgcaagttcccttatctgcacaaaacatctagtgtaagtacttggggtttttgtggattgggcaatgacctggaagggttggaggttctctggggacccttcccttactgcctgcctaatgcaagctggctaactcctctcaataggataaacattattttatgtacaaggaatataatacacagattgccctcaaagtcatatttccaactgctcatcaatctaaaaatccaaaattttgaataattttttgatgaaataatttatttcattgtttctcaattttggctgcacagtggaaccacctgggctgtttgaaaaaacctaggcctagccaggcacggtggctcatgcctgtaatcccagcacttagggagaccagcctggccaacatggtgaaaccctgtctctgctaaaaatacaaaatcacctgggcgtagttgtgcattcctgtaatcccagccacgccagaagctgaggcagaatcgttcgaatccaggaagtggaggctgcagtgagttgagatcttgccattgcactccagcctgggcaacaagagcgaaactccatctcaaggaaaaacaacaacaacaacaacaaaatcctgggctctgcttcagactagttaaaccagaatctccagggtggggcaccggaaagaacaagaaaaaagaacaccttatttttatcttcttcagtgagccaatgttcattcaaaagagagattaaagtgctttttgctgactagtcacagtcagagtcagaatcacaggtggattagtagggagtgttataaaagccttgaagtgaaagcccgcagttgtcttactaagaagagaagccttcaatggatccagctgtggctctggtgctctgtctctcctgtttgtttctcctttcactctggaggcagagctctggaagagggaggctcccgtctggccccactcctctcccgattattggaaatatcctgcagttagatgttaaggacatgagcaaatccttaaccaatgtaagtatgctttatgttcctccagtaatgtacaaggtgtatttaacctcacaattcttaaagttttatttcattttaaagtgataaatgataattgtatatattaatggggtacaatattacattttgatacatgtatagattgtgaattgatcatatcagggtaattagcatatccatcatctcaaatatttgtcatttctttgtagtgagaacatttaaaatcctcttttttagctgttttgaaatatacagtacattaatattaattatagtcaccttgctgtccaatagaacacccgagcttattcctcctatctaagtgtaactctgtacctgttgaccaacgtatccccttatttggcccatctccacctgccagcctctggtagccaccattctaatctctacttctctgagtttaactttttaagattccacatagaagtgagatcatatatgatatttgcctctctctgcctggcttatttaattaatatgatgttctgtagattcatccatgccgtcataaataagaatattttttcctctttaaaaggctgaatagcatttcattgtacatatatgtcacatacaaaatccattaatttattgatgaacacttaggttgtttccatatcttggctattgtcaatagcactgcaataaacatggaagtacagacatgtcttccacatactgacttcaattcctttgggtatatactggtagtgggattgctggatcatctgatagttctatttttgttttttttaggaacatccatactgttttctcaaatcacaatgct

SEQ ID NO: 4902 - DNA, 6000 bp, Homo sapiens
ggcctgttttcctgggtatcaccagcagaggctgcagaacagcaaatattgcagaacagcaagtattgctgcttgatccttcctctggaagcttcatctcggaggggcacctggctgtgtgaggtgtcagtcagcccctactaggaggtgtctcccagttaggctacatgggggtctgggacccacttgaggagacagtctgtctgttctcagagctcaaacactgtgctgggagagccactgctgtcttcaaagctgtcagacagggatgtttaagtctgcagaagtttctgctgccatttgtttagcaatgccctgcccccagaggtggagtctacagaggcaggcaggcctggttgagctgtggtgggctctacccagcttgagcttcctggctgctttgtttatgtactcaagcctcagcaatggtggatgcccctcccccaaccagactgccaccttgcagttcgaactcagattgctgtcctagcagtgaacaaggctccgtgggcatgggacctgctgagccaggcacagtgtagaatctcctaatgtgccatttgctaagaccattggggaagcacagtatttgggtggcagtgtcctgattttcccagtacagtctctcatggcttcccttgtctagaaaagggaaatcccccaacctcttgtgctttctgggtgaggcgatgccccaccctgttttggcttgccctacatgggctgcacccactgtccaactggtcccaatgagatgaacaagatacctcagttggaattgcaaaaatcagccatcttctgcatcaatcaccctgggagctgcagaccggagctgttcgtatttggccatcttggaatgaggggcctctatttttattattttttatctttagatattaacagtctgattgtaaagtttatatggagaggccaaaaaacccagaacagccaatgttaaggagaacaaaatcaagtgattaaccttgtctgattcaacttcaagacttattatgaagctgcagtaatcaagacaatgtgaaattggtgaagaaacagtcaaatagattaatgcaagtgagtaaagagcctgaaatagataatcagaaatacagccaactgatctttgaaaaaaaagcaaaggcaattcaatggggaataatagtcttttccacaaagactaatggagtaactggagattcacatacagaaaaatgaatctggaaatagaccttacatctttaacgcaagttaactaaaaatatattatagatctaaatactaaatgcaaaactatgaaactctggtaatataaggtaggagaaaataaagatgaccttgatctggcaatggtttttaaaatactacaatgaaggcacaatccatgaaataaagaataactaagctggcctttattaaaatttaaaacttctactccacaaaagatagtatcaagggaataagatgacaagacacagactgggataaatatttttcaaaagatatatctgataaatgatggctatccaaaatttttaaaattcaacaattagaaatcagacaccttgattaaaaaaatgggcaacgggtctgaacagacacctcaccaagaagacatacagataccaaataaatatatgaaaagtactaatcattaaatgtcattagggaactgcaagctaaaaccccgatgacatactattacacacttatacactggctaaaattcaaaacactgatagaaccaaacactggcaaggatatgcagcaaggagaactattagtcattgctggtggaaatgcaaaatggtacagacacttcaggagacagttgggcagtatctaataaaactaaaatatgtttactatattatctagtagttgtgctccttggcatttgccaaatgaattgaaaatatatttccacacaaaaatctgcacatggatgtttatagcagttttattcatcattgtcaaaaattagaaatcaccaagatgttcttcaatagataaatgaatagacaacatggtaaacctatacaatgaatgttatttagtgttaaaagaaatgaactatcaagccatgaaaagacatggagaaattttatacatattagtaagttaaatcttaaaaggctacatactgtatgattccaaacatatgacattctggaaaaggcaaaactatgccaacactgcaaagattatttgttgctagggctcgtgaggaagagagggtgaacaggtagagcacagagggttttaagggcagtaaagctattttatatgatactacaatggtggatacatgtcattatgcattagtcaaatcccatagaatgtacaacacaaagaatgaaccccacagaaactatgagctttggttgttgatgtgtcaatgttggttcattgattgtaacctatgagagttcttgattgtgagaggctgtgtgtgggtgcagggaaagaggcatgtggtaattatatactttccactttccacttagtgttgctggaaaccccaaactgctgttaagaaatacatttttctaaagcctactttaacccaccattctagtcaagctgaggtttgtattacccagtgactgtggagggcttaatgttgatactcccctgatcacttggactgagatgtgaattctatgagacgggatgtgatatgtcactgaactgggagttgaaaaactgtgattctaagtcttatactgaggcattgtgatactttgtctcactgagtcaacaattgctcatttaaaaaaaaaatcaattcctgtttagaatagttgatctcagagatcccttttgtcttcaaattatctataattctttcatagtataaactgaaagatctagggaggagcctcaacttagcagaagagaggaggagcagaactggaacacctagctctcaaggaatgaaatgattattctaaagagagcaaccaagcttatcttacccaaactaaggtagtatatttctgttagagtttaaagttacgtgagtcagggaccaagttattgcttttctttgccctgtataaagggttctccaaggccttggactcacccaagtactaaaggttataaaaccaaactcttctgacccccaatctagtcaacttgggctgtaattattaatgaaattaatatttattttgaaaatcatttactagactgaatcacgaaatactgaaccattgtacacaatcagtaaatatctgtggactcaattgaactgaatgttttgcttgaaatgaaaccttcaagatgcagggcttatgaattctagtctcagctctagcaccagcagacaccatgttcttggctacagtactgaatcttcaaggctcagcctcctcattcctgagatgggtcaattttattgtaagcaaaggcaattgagagattccaaagggatatgaggtgtgagaattctctctaaatggggttagaatccctgttaaaaatgaccagtgaaacattgtgcaattgtgtcttaacataacttactttttcttaataagagaactggaaataacctcattaggaaatttagaacaaatacgatgatatctttaaagaaaatggctttgtgtaagtattgtcgttagtgatctagtaatgtgtatctttctggttgtatttagaccttcaactcaaatgtcagctcccgttaaggtctatacattgtggtggttttgtgctgtgggtccatttagtgatttccctacctcccatcctctattagattcacaactgttgttctgcccataatttcctatgcttgctttgcattgttacatttttttttgaaaatcagaaagcaaaatcaatataaagcagccatgtctggaggagaccaggaggtcaagaagccttagtttctcaagcccttagcaccaaattctctgagatcagctcttccttcagttacactgagcatttcccctctgcagtgatggagaagggagaactcttattttttctcatgagcatctctggggctgttttccttagataaataagtggttctatttaatgtgaagcctgttttatgaacaggatgaatgtggtatatattcagaataactaatgtttggaagttgttttgttttgctaaaacaaagttttagcaaacgattttttttttcaaatttgtgtcttctgttctcaaagcatctctgatgtaagagataatgcgccacgatgggcatcagaagacctcagctcaaatcccagttctgccagctatgagctgtgtggcaccaacaggtgtcctgttctcccagggtctcccttttcccatttgaaatataaaaaataacaattcctgccttcacgtgtttttttagggggttaaatggtaaaggtgtttatatctgctaaggtaatttacttgatatatgtttggttattgaagatatatgagttatgttagctatttcatgtttaggctgctgtatttttagtaggctatattaaatagaggatttcattataaaggacaaagtctcctaatcttcgatataggattgacatactttttaaatatacaaggcatagaatatggccatttccgttaaatcataaattcccaactggttattaatctaagaattcagaattttaagtaattgtttttgcatcagattgtttacttcagtgctctcaattatgacggtgcattggaaccacttgggttaacatttttttgtttttattaccaatacctaggcttcaacctagtacaatgaaaccagaatgtacagagtgggcactgggacgaaggagaacaagaccaaaggacattttatttttatctctatcagtgggtcaaagtcctttcagaaggagcatatagtgggcctaggtgattggccactttatccatcaaagaggcacacacacttaattagcatggagtgttataaaaagcttggagtgcaagctcacggttgtcttaacaagaggagaaggcttcaatggatccttttgtggtccttgtgctctgtctctcatgtttgcttctcctttcaatctggagacagagctctgggagaggaaaactccctcctggccctactcctctcccagtgattggaaatatcctacagatagatattaaggatgtcagcaaatccttaaccaatgtaagtatgctccttcagtggcttgcaaaaggtaagtaaattcacctgtattttttaaataaagtatatccctagaggtacaatgttacaagagatcattgtaaagtaaaatactttgaaaggcttttgttgccttttccagtctgtcagtgtcagaaatagtggaatgaaataatatattttgttattagagaaagatttaggtctttgcatgttaaattcagaataacaaactgtcaatagtttgaaatgttgtgttccttctttatttcatagccatttgctagaatttttggctgagggtaaacagtaagggaagtgtttgttattagagattttattaaataagtcctctactatattagccatgtgttttattcagaatagccgtgaaaattgaacttctctgaagaaataatttatgcctgttgtaaaggaagcagctgtgggtttaggaccagcaaaagcagataagcggtagataagaagttatagacttcaattattagatccacaaactaatgttttaattaagctatagctacaatatataaaccccaaaatgaccttagggtttagtaatagtagaaagagggttagaagatgtataagcattacggttttttcttgagtaaaagatgttttaacagtgttaatatgatatgtgaatacacctcattgtgtagttattagcatatacagagagtaaagggctgcgattagtatattaagccttataagcatgatggtatgatcagatcaagagaatgaggctgtagttatgaagactactcctactagattgatggtagggggcagggcaagattggtg

SEQ ID NO: 4903 - DNA, 6000 bp, Homo sapiens
gaaatccctaggtggaagtctgtcaaaatacatatatcacttgaagaaaactacaaaactctgatgaaagaaaacaaagatataaataaatacacaaatatttcatgttcatggatatgaagaccgttgttagtctttttgatttgatctatagatcaacacaataagaatcaaactccaggaaagttttattatttttattattttttatctttagatgctaacaatctgattgtaaagtttatgtggagaggccaaaaaacccagaatagccaacgttaaggagaacaaagtcaaatgactgaccttacccaattcaacttcaagacttactatgaagctaatcaagacagtgtgcaattggtgaaaaaagtcaaatagattaatgcaagtgagtaaagagtctgaagtagatcatcagaaatatagtcaactgatctttgaaaaaaaaggaaagacaattcaatgggggaaaaatggtcttttcaacgaagactaatggagtaactggaggttcacatacggaaaaatgaatctggaaatagaccttacacctttaatgaaagttaactaaaaatatattatagatctaagccgggtgcagtggcttatgccagtattcccagtactttgggaggctgaggtaggcagatcacaggtcaggagatcgagaccatcctggctaacacggtgaaacccccatctctactaaaaatacaaaaaattagctgggcatggtggcacgcacctgtagtcccaggttgtcaagaggctgaggcaggagaatcgcttgaactcaggaggcagaggttgaagtgagccgagttgagagccactgcactccagcctaggtgacagagtgagactcagtctcaggaaaaaaaaaaaaaaaaaaaaaaatatatatatatatatatgtgtatatatatatatatgtgtatatatatatatatgtgtatatatatatatatatatatatacgtgtgtgtatatatatatatacatatatatattagatccaaatataaaatgcaaaactatgaatctctgatagtataagataggagaaaataaagatgaccttgatcagcaatggtttttaaaatactacaatgaaggtataatccatgaaataaagaatgactaagctggaccttattaaaatttaaacttctactctgcaaaagacactatcaagggaatgagatgaaaagacagagactgggagaaatactttcaaaagatatatctgataaacgacttctctccaaaaatttttaaaactccacaattagaaatcagacaccttgatttaaaaaatgggcaacagatctgaacagacacctcacccaagaagaaatacagatggcaaataaatatatgaaaaatgctcatcattaaacgtcactacggacctgcaaactaaaaccccaatgagatacaactacacacttatacaatggctaaaatccaaaacactgataaaaccaaatgttgacaaggatgtgcagcaatgagaactaagtcattgctggtggaaatgcaaaatgataaagacacttcaggagacagatgggcagtgcctaaaaaaactaaaatatgtttaccacattatctggtagttgtgctctttggtatttgccaaataagttgaaaatacatttccacacaaaaatctgcacatggatatttatagcagctttattcatcattgtcaaaaattagaaatcaccaagatgttcttcaatagataaatgaatagacaacgtgataaacctatacaatgaatgttatttagtgttaacaaggaatgaactatcaagccatgaaaagacatgcagaaactttatacatatgagtaagttaaatcttaaaaggctacatactgtatgattccaaccgtattacattttggaaaaggcaaaactatgcctacactgcaaagattatttgttgctagggcttgcaaggaagggagagagaacacgtaaagcacagaggttcttagggcagtaaagctattttatgtgatattacaatggcacatgtcattatgcattagtcaaatcccatagaatgtacaacacaaagaatgaaccctacataaactatgagctttggttgatgatgatgcgtcaatgttggttcattgattgtaactaatgagagttcttgattgtgagagagactgtgtgtgggtgcagggaaagaggcatgtggtaattatatactttccacttagtgttgccagaaaccccaaactgtttcaaaagcctactctaatccaccattctagtcaagctgaggtttgtattactcagtgactgtggagggcttaatgttgatactcccctgatcatttggactgagatgtgaattctatgagatgggatgtgacatgtcactgaattgggagttgaaaaactgggattctaagaaaagtcttggctgggcgttgtggctcatgcctgtaatcccagcactttgggagacctaggtgggtggatcacaaggtcgggagatcaagatcatcctgcccaacatggtgaaaccctgtctgtactaaaaatacaaaaaaattagctgggcgtggtggtgggcacctgtagtcccagctacttgggaggctgaggcaggagaatggcatgaacccaggagctggaaattgcagtgagccgagatcgcaccactgcactccagcctgggtgacagagcgagactctgtctaaaaaaaaaaaaagaaaagaaaaagtcttatactgaggcattgtgattgtgatactttgtctcactgagtcaataattgctcatttcttaaaaaaaaaaaagcaaagtttagagtagttgatctcagatatcccttctatctacacattatctataattctttctttctgtaaactgaaaggtctaggaaggagccgcagctcagcaggagagaggaggagctgagctgggacccctacctcctgaggaatgaaatgattattataaagacagcaaccgagcttattttacccaaaataaggtagtatatttctgttagagtttagagtttcatgagtcagggaccaagttattgcttttctttgccctgtataaaggcttctccaaggcctttgacttacctaagtactaaatgttataaaaccaaactcttctgacctctcaatctagtcaactggggctgtaattattaatgaaattaatgtttattttgaaaataatttactagactgaattacgaaatcctgaatcattgtacactatcagtaaatattggtggacccaactgaactgaatgttttgcttgaaatgaaacctttgagatgcagggcttatgggttctagtcccagctctagcactagcagacagcatgttcttggctaagatactgaatcttcaaggctcagcttcctcattccggaaatgggtcaattttattgtaagcagaggtaattgagagattcaaaagggacatgaggtgtaacaattctctgtaaattgttagaatccctgttaaaaatgaccagtaaagctttgtgcaactgtgtcttgacataactttatttttcttaataaaagaaatggaaataacctcactagggaatttagaacaaatatgatgatatctttaaagaaaatggctttgcacaagtattgacattaatgatctagtaaagtgtatctttctagttgtatttagatcctcaactcagtatgtcagctcctgttaaggtctatacattgtggtggttctgtgctgtgggtccatttagtgatttccctacctcccatcttttattgcatccacaactgtggttctgtccataatttcctttgctttctgtgcattattacatcatatctgaaaatgagaaaccaaaaacaatagaaagcagccatgtctggaggtgactggggggtcgagaagccctagtttctcaaacccttagcaccaaatttttccctcagttacactgagcgtttcacttctgcagtgatggagaagggagatcccttatttcttctcatgagcatctctggtgctgtttcccttagagacaaataaggggttctatttaatgtgaagcctgttttatgaacagaataaatgtggtgtatattcagaataactaatgtttggaagtttgttttattttgctaaaattgttctcaaggcagctctggtgtaagagataatacaccacgatgggcatcagaagacctcagctcaaatcccagttctgccagctatgagctgtgtggcaccaacaggtgtcctgttctcccagggtctcccttttcccatttgaaaaataaaaaataacaattcctgccttcaggaattttttttagggggtttaatggtaaaggtgtttatatctgctaaggtaatttacttgatatatgtttggttatttaagatatatgagttatgttagctatttcatgtttaggctgctgtatttttagtaggctatattaaatatttgaaaggatttcattataaagaacaaagtctcctaatctttgatatagcattgacatactttttaaatatacaaggcatagaatatggccatttctgttaaatcatatattcccaactggttattaatctaagaattcagaattttgagtaattgcttttgcatcagattatttacttcagtgctctcaattatgatggtgcattagaaccatctgggttaacatttgttttttattaccaatacctaggctccaaccaagtacagtgaaactggaatgtacagagtggacaatggaacgaaggagaacaagaccaaaggacattttatttttatctgtatcagtgggtcaaagtcctttcagaaggagcatatagtggacctaggtgattggtcaatttatccatcaaagaggcacacaccgaattagcatggagtgttataaaaggcttggagtgcaagctcatggttgtcttaacaagaagagaaggcttcaatggattctcttgtggtccttgtgctctgtctctcatgtttgcttctcctttcactctggagacagagctctgggagaggaaaactccctcctggccccactcctctcccagtgattggaaatatcctacagataggtattaaggacatcagcaaatccttaaccaatgtaagtatgctccttcagtggcttgcaaaaggtaagtaaattcacctgtattttttaaataaagtgtatccctagaggtacatgttacaagaggtaatggtaaagtaaaatactttgaaaggcttttgttgccttttccagtctgtcagtgtcagaaatagtggaatgaaaccatgtattttgtgagtagagaaagatttgggtctttgcatgttagattcaaaataacaagtgtcaatagtttgaaaagctgtgttccttcttcatttcataaccatttgctataatttttggctgaaggtaaatggtaaggtattgtgggatctggtcagcagcccacaaagcaactgggctctctcttttttcccaggtggatcggcaggttgagaaataatagacacacaagatagtgaaagctgggtccaggggggtcaccgccttctggtcccatggtgccaagaatgcactggatataccagcatttattattaagtttagtgagggcaggggtaggttagtgagggatttagggtcatttgattatgaggtgagatggtcacatggggatgaagtaattctttaacataacatttgtatgtagaagtacagtacatttgtatgtagaagtacagtatacggagataagaatttacaatatagtgtgtgcgtcagtaatttctaacagagccttaaaacagaaacacaatctttccataacctatgattagcaagatattaatcagcagtaacaattgcaacaaaagctggttacaaacaatccatggaaataggatgtgaagctagacaaccagttagaccagaaattctcagaagggagtatg

SEQ ID NO: 4904 - DNA, 6000 bp, Homo sapiens
tatgcatgataaggagactagaatttttaaagtctgccaatgacattatcagatatcgatttcagaaagatgagagagtatgcactatggcagaagtgacgagaatggagagaggagatgaatttgagagatcttaaggtatagaaacaattggatttggtaaacaataagatgtgggatgtggggaggggtctaggaggaccctgaggttgctgggttgtgtgactaggtggatggtagtgccattatctaatgtaggggttgggcgcagtggctcacgcctgtaatcccaggactttgggaggccgaggcagcctatcacctgaggtcaggagttcgagaccaggctggaccacatggcaaaaccctgtctctcctaacacaaaattagccaggcatggtggtgtgcacctgcaatcccagctactcaggaggtggaggcacaagaatcgcttgaacctgggaggcagaggttgcagtgagtcaagatcgtgccactgcactccagcctgggcgacagagtgagacatcgtctcaaaaaaaaaaaaaaaagtagggaatactggtactggatgggagcagatttggaagtaaagatacagagtacagtttggatgctaagtttgagctgcttgtgggatattctcttgacacccagtaggtggatggaaatatggatctggtgctcatgggagtggacttggcagaaatgtaaaggcataagaagttatgacctaggtagaataagtgaagtagggagagaaggcaaagggtgaaggtctagggaataccaacatttacaagacacaaaagttgactgaaaaggagccatcatacacagatggaggaggaaaatcagacatgaggggggttctggaaaataaggagagatcaattttcaagaaagaaggaaggccaacaatggcccatgctacatagatccaagaagataaaacacaaaaattggtctttgctttacaggccattggcaatcttagggcagtttcattggcatggtgcggtgagaaacgggaatgcaatggaaggaggagtaaatgaatgaggagagaatggaggtgatgaaggaaggcaaaggtagaccatggtctcaagtagcttgtttgtgaaggagctgtttttgttttaattaattttttaaaaattgtgataaaatagacataaaagttactatattgctgggcccagtgtctcacgcctgtaatcccagcactttgggaggccgaggtgggcagatcacctgaggtcaggagttcgagaccagccgcctgaccaacatggagaaaccctgtctctactaaaaacacaaaattagctgggtgtggtggtgcatgcctgtaatcccagctactcgggaggctgaggcaggagaatcacttgcacccaggaggcaggggttgcggtgagccgagatgctgagatcgcgacattgcactccagcctgggcaataagagcgaaactctgtctcaaaaaaaaagttaccatattaatcatttaaaatttatttttatttttgtagagatggggtcttgttatgttgcctaggctggtctcaaactccaggcctccagacaacctactgcttcagcctcccaaaatgctggggttacacggtgagccaatgcacctggcccatattaatcatttttaacagtatacttaagtatttttaagtacattcacattgttgtgctgccaatctcaagaatttattcatcttgcaacactaataattcataccattaaacaacagaatttgtttttaagaatgagaatcacttaaatattttatatgcatagggggatgaaccggtacagtgaaagaggatgaaggtgtaggaaaaatgaaaattctaccattctaagaactttataagaccatttcatcattaaaagacagacaaatatctttacccctttctgacaactccttccatctttctgagtgcagttttaattttctactttctattacaaaaaaaaacaataaaattgatgataattttttgttgagaaagacgatttattttttaagataaattctgaggcctttagaaagatacacacaaactcccatctcttttataattattcttgtatgaattggtgataatatatacttaaccatagtattttcatgatgctgaggagggtgcgaacctggacaacgtgattaaattgtagcacagagcatattaccataaaaagcattaaatgttgtcaaaaggctcatgtaatatgaattaggggttaaaactatgtttctattactccatattcagtttggatgaacttcaaatatttatgaagtgctagttactataatgagattttacctctcctggttaaaccagaagttgggtactagaacaatttactttttactaactctttctctccctgatgaaatgtaaagagaatgagacaattgtcaaagtaaccttttgtcgacaacgtctgatacaacatgactgaagtgaccttgaattttaattttgtttaaaatagagaactgtggctaggcactgtggctcacacctgtaatcctagcactttgggaggccaaggcaagcggatcacttgaggccaggagtttgagaccagcctggacaacatggtgaaacccaatctctactaaaaatacaaaaattagccaggcttagtggtgcgcatctataatcccagttacgcgggaggctgaggcacaagaatcacttgaacctgggaggcagaggttgcagtgagccaagatcacgccactgcactccagcctggatgacagagtgaggctctgtctcaaaaaaaagaatgtaagaacgtagtaaaataggccaggcatggtggctcacgcctgtaatcccagcactttgggaggctgaggcgggcggatcacctgaggtcaggagttcgagaccagcctgaccaacatggtgaaaccccatctctactaaaaatacacaaattagctgggcaaggtggcgggcgcctgtaatcccagctacttggaggcagaggcaggagaatcacttgaacccgggaggcagagggtgcagtaagctgagatggctccattgcactccagcctgggagacaagagtaaaactcttgtctcaaaaaaaaaaaaaaaaaaagaacctaatatcctaatgtaataaagtagagaaccgttgccacagcacccaccaaagtgtgtctctcattgacaagctcaggtacttgtttgtctgtttctcctgcctacccctcagccactctggatcttccctttgatcattcttttctctttctagctttgatgttttggtttccattctgtaattcgcacactattttgtggacatgctcttttcaaatttctctccaaaacaatagtacaaaggcagtcataaaccaattgttggtttttacaaaaaatcccatcatatcaccaaaaaccagttttatcataacaggatgaatatcagaccaatattcattattagagatgtagtctaaactgactcgggagaagacatccattgagtctttcattcagtgtaattagttgttatcatacatgcaaaatcctataactataaagcatttcagaaataaagtattgttaaacagctccaaatttattaaagtataaaaaatgtattgagtatataccatgtggcaccgtgcaaagtaacagagatgcctaaactaaaaggttatcctttgtccttattaaagtatgactgaaagctcgctggagaatatagtttctacatagagtcaaaacagtccttcgggctcacaaatttaatgatttatatggtataactggctttagatacaaatttacatgccagacaagcaatgtagaaaaatcaagaactaggaaacaggaaaacagatctacatttctgctttgctgcaattcattcatttttttcaaccattcatcaaatatttattgagagcccatgctgtgagagaaactgtattaggtgctggggaacatggtagcaaataagagagaccatgtatgtgagcatgagcaggtggcttaacctctccacatctctaacctcttttagactcaatgtctgaggtatctttcagacctgaaatgctaaggtttgcaacagccttgtggagggagaagctgccaagtcgccttgggacttgaggacttaccttcctttcaaaggattagcccttgttttgatttcaaaataattttgttacacagtttaaaaataatttggtcaggctctcatctacattggggtaatcttgacggtctggatgtggtaattcatgctcattagacttcaaaggtaggaagtcaaagttgggaaatggtggatgactttcatcaattcatagccaggcagcggttcccattgagcagctcctctgtggttccacccagccttccaaccaataacgcagcgtctcctgcaggaaactcatcgcttgggtcacctgttgctctttgctctaatgagccttgagaaaggattgctggtcatgggaccagaggctttatggggagggaagaactgttcttgactttcagtttttcgagcgggtttcaaggtaacaactttcttattatctagcttcataattgcagtaaggaatagctttttttgcttgcagctgagatgactttttcaagggagaaaaagggatttctataacgaagagagggagagagagatgaagagggagggagtaagggagagagggaagaagggagaaagagagagagatttgaatatacattgcttcaaggatgcaaaaaattacaacctggaaaaggcttcgagtaactttaggaaaatgagctgctggactcctcagtcaatctgtcctttctagtcaatgaaaaagacagggtttgaggttccttccgaaacggggccggctaatttagcccctcccacgagcccaagggtctgttatatctctgtttccttgaggacctctctcacggagacggaccacagcaagcagaggctgggggggggaaagacgaggaaagaggaggaaaacaaaagctgctacttatggaagatacaaagggtaagaccaaaattgatttgatctgaatccttaagaaaaaaaaaatagaaggaaaaataaaagcccagaccaaaaagcaagtacttgaaagctggaggcaaaaagccctgaatgaactttcccaccctcttccttctgagaggaggcagagaaagagctttgggaaactttttaggaagcagagtccagggttgcagtcaagggtggctctagagcaagctggaggggctcatgaatattcattatcaatttgtattcagagttggtttttttagaggcaaatgactttttcagtccccttgcagtttaagaggcagctgcctcatctgcagtccggactcatctagcctcgggtctgtacctcagggtgtttgcttgaagatgctgggctctgcgtgtagatttgttttgttctcgaatttcttgcatgctttcctgttgtgaaattagcaaaggcttctttgctgggaacaagacagagaagttaatgtggcacaaggctgtcacaacaggaccccagagtatgtctttcaaaatgctgaaagtttcttgagatatgtgggggagttttatgtgggggacagagtgggggacggggacgggtagagggaggaaatagaataattctatcttaaaagggcaggtcacatctgactacatttagattttgtctaaaaactacaagagcagcctggtttgcacagatggtgtgcagtctctatcttttacctcttttgggcattttctgccaagacggagagccagctgcttgccagcgtgtgagagccaggaagaatctctgcagcagtgagggagtatagggttgtaaacctccttctcctccttctttatcatctctaacttctaacattcccacatgcttataccgtatagaacatggaagaatagcatgagtagccaac

SEQ ID NO: 4905 - DNA, 6000 bp, Homo sapiens; identical to SEQ ID NO: 535

SEQ ID NO: 4906 - DNA, 6000 bp, Homo sapiens
tgttatacataagcatttaaaaatatacacagaaatatgcatgattgaatacattgttgctattattttgagtgaactgctattttttaggtcagttagaattaaataatttatttcaccttatttcttctccagtgctcttcctttctttatgtaaatccaaatttctgacctatatcattttccttctctcttaagcaggggtccccagcacctgggccacaaactggtgctggtccaaggcctgttagggctgcacagcaggtggtgagcagcaggcttcttagctccacctcctgtcagatcagcagaggcatgtgattctcataggagtgtgagccctattgtgaagtgtgcatgtgagggatctaggttgcacacccttatgagatctaatgcctgatgatctgaggtggaacagtttcatcctgaaaccattccccacaaaattggtctctggtgccaaaaaggttggggaccactcctctataggaattcttttaacatttcttgcaaggcaggtctactggcaacaaattccctcagtctttgtttgtgtgagaatgtatttatgtatttattattattttatatatatatatagagagagagagagacagagagagagagagagagagagagagagagtgtctcactatgctgcccaggctggactcaaactcttggatcaagcaatccctccacctcagcctcctgaatagctgggactataggcacgcaccactgtgcctggcttctctttacttttaaagaataattttgtgggtacagaatgctggctgttggtggcttttttctctcaccactgtaaatatttcattccattctcttcttgcttgcatgcttgctgaggaaaagttggacataattttcatcttttctcctctacaagtaaggtctttttccccgggcttcattcagaattttttatctttgatttcctgcaacttatatatgcatgcctggttgtagggcttttgtttgtttgtttggcatttgttctacttggtgttctctcaacttctgtgatctgtgatttggtgtctgaaattagtatgagggaaattctctttcattattgcttcaaatatttattctgttcctttctctggttattctcttcctgctatttccattacacatatgttataccctttgtagttgtcccatagttcttggagattctgtttatatagtcttacttatttttgcagttttggcagttattttcaagttcaaatattctgttttcagccttgttcagtctaccaaaaagcccatcaaaggcattctttatttctattacagtgtttttgatctctagtatttatttctttttagttctttcttagaatttaaactctctgcttacatcgacccatttgttcttgtatgctgtctactttatccattagagcccttggcattgtgatcatagttgttttaaatttctggtctgataattccaacatcccagtcatatctgagtttggttctgaggcttgctctctgtctctttaaagccttttttttttctttttttttttttgccttttagtatgcctggcaatgttttcttcatagctggacaggatatacggagtaaaaggaagtgctgtaactagacctttagtagtgtggtatacagtgggggagggggagaggaagagttctatagttctgtgaagaggtctcagtcttttagtaaacctgtgtctctagactgaatttcacaagtgcttctcagttcctatctgccccgatccctgttaggtgggacgtgatggctagagtgggctgcagctgggtattttcagttttcatgtggaaggctagaagagactggagttcttatttcccttctccggcatcatttaggctcctataaatcaagagcattaggctctatttaaacagtttttcccaagggcagactttgtttagaagagaagaatagagtgtccaggtatatttcaaatggttacttttcctatcccctctgccagggacatggaagcaggaggagatttttctctaataaaaagagaacaatatttgagaacctctttgaattcctatgggtaaactcatgaaagtgtggagatcatcccctccttatggctgagtcactctggaatttttctctctcaaacttatctacactgggcctccggcaattcaattacagttcaggttttcctgccctagccctggttcctgctgagatttcttttcttttttctttttttttttttttttttttttgagacagtgtctctgttgcccaggctggagtgcagtggcgtgatctcaagtcactgcaagctccgcttcccgggttcacgccattctcctgcctcagcatctccgagtagctgggactacaggcgcccggcaccacgcccggccaattttttgtatttttagtagagacagggtttcactgtggtctcgatctcctgacctcgtgatccgcccgcctcggcctcccaaagtgctgggattacaagcgtgagccaccgcgcccggcccctgctgagatttctgcgccagtaaattgtgatttttgatattctcttgtttatctcttcagtttgccctgtaaccttatctctctacagatctaagaagagttattgatttttctatttgttcagatttttagttattgttaggaaagattcatgacttcctggctccttacttgcttttctcattcaatattccctatgagtacatattttatactttaagcaacttgttttgatgaacatttagattctccaccctctctttttttgattacttagaacgtttaggccagacacgatggctcatgcctgtaatcccagcagtttgggaggccgaggcgaatggatcgcttgagcccaggagtttgaggctctacaaaaaaattaaaaaaagaaaattaggtgttaatccttgaccttatatttctcaaagttttaccaagagttcccccggactccgagtcctaccaccagtgccaagagaagtatgcagcctaaaggtgcaccctgccccaagtgagatctcttagttccacagctgacctttcctggctcttctggtgagtggtatggaaaatgatggagaaactgccatatgttttcataatggtcagaccaatttacatttccatcaacagtatactagggttcccttttctccacacccttgccagcacttatcttgttgttttttttttttttttgtaatagccatcctaataggtatgaggtggtatctaactgtggttttgatttgtgttttccagatgacttgtgaagttgattcagttgtcatatacctgttggccatttatatgtcttctttggaaaagtgtctgttcaagtcctttgcccactttttaatttgttagtgtatgtttgctattgagttgtatgagttccttatagtatattgtggatattaactcttcatcagttatatggtctgcaaatattttctcccacactgaatgctgccttttcattttttttatgtgtatacttgacttttaaaatcagtaacaaggtccatacaattcacatttggctgatatgcctcttgattctcttgtaatttgtaagttcctttgactcctttccttcttttaatttatttattaaaaaatggaatcatttgcactatagaatctcccacattctggattttgacaattgcattccaatggagtcctttagcatgttcctgtgtttcttataatccggtagttagatctagaatttgaccagatttaaggccaattttttttagctaggatactgcatgggtggttatgttttagctaggataccgcatgggtggttcatgatatcatgaaaaaagcatgttcttaaagcaatttaagtgacagtacaaaaggttgggtcaggtggggcacggtagctcatgcctgcaatcccagccctttgggaggccaaggcagaaggattgttgaagcctggagtttgagaccagcctgggcaacatagtgagaccccgtccctacagaaaacatttttttaattagctgggcttgttggcatgtgcctgtagtcccagctactcaggaagctgaggcaggaagatcgcttgaacccatgaggtcaaggctgcaatgaatcatgatggcaacactgcactctagctcaggcaacagaccaagaccctgtctcaaaaaacaaaaaacaataacaaaaaaagaaaaggttgggtcgatgacagtttctagcgactgatgccaccactctgtttacagaatcacccctctcctctggccctgatgttttatcatgatatcatatttacaatgcctggcaaaggcttcattcccatttggcatactacctctcaggcaaatagaacttttgaaagcctgtattatgtatataacatataggctcacactggataagctattttataacctgacttcttcaaagaaagtttacatcatgtttaaaccatgttttagattctatatttttaattaaaaatctaaggaagaaggatatttcacatttctataaactctaagatcttgcagcagaagcgaaactgcacatttaggggtgcctgcccctctactgatgctgccctttgtgggtcatatgtccttaggaaaatgaaagactgtgcactcttgatttgttggccagctctgttgacatctttcagtggttccttttatgtatggccactcctacagaggcctcttgtactttgggaactggtgagtctccctgtccctagggctttttagtcacatgtccatccactgtttcaatgtaacatgcatctaggcaaggttaacgattaaatggttgggatgaaaggtcatcctttacggagaacatcagaatggtagataattcctgttccactttctttgatgaaacaagtaaagaagaaacaacacaatcatattaatagaagagtcttcgttccagacgcagtccaggaatcatgctggagaagttctgcaactctactttttgggtgagaaattacatttatcttcatattgactcttctcagactcagaacaagtggtagttagttaacttagggtggtcaccaacaagaaccagaaatgttagatgtgcaattggtctaaagctcaggctttttagaaagcataattcataatatctccagaggatataagatctgggaaatgtaatgcaaattattctctgtcatatgtttttttatatcagactcttgtactagctagtcgcaaaattgccttctctaaagagaaacaggtaaaaaccttccaatttaatccgtgtgaggaaggagaattgttgttgcatactttgctagtagaaggaagagaagatccgtgactgagtcttgctgagacatgttgatgttgaaatgataatgataagttctagaactggcaactaatgatatggactagaagttgagtctagggatgcaactttgggcatcatgagcattgaaataatttttgaacaactagagttgggtaatattgtttttaaggaaaagaagagacaccacttagagggtgaacaagaacagtgtaacattacggagtcatagatagcaaaaaatttcaagataggggccaatcaacagtatcaaaggtctagtggaatagaaaacaaaaaaggaccttagatttagtgattttagtaagggtttggtgagaaagtatcatctgcaaactcctagcctcagcatcagaatcacctggggcaataaatgtagtttaagtatcttaagtgattcttctgaattctaacatttgataaccttatatagaggtgagaggggcagggatgagatagcagagcacctgggcagcacctcgtgtcttagaaaggacctgggtcccaagaccctcgaggccaggagtgtataccacggcaaggtggatcttcatgggctatagtatctagacaggccatctcttgagaa

SEQ ID NO: 4907 - DNA, 6000 bp, Homo sapiens
gagggaggtgtggggctagtgcactggcctcttctctaccggggaaagacgtgctacaccatctatccagcctggggcccaggaggagccatattcaagggtcctcgttcatagtatatcaggtcagtcttttcctcctctaggtctctgaacttgccaactgcccttctccacactcacccttaatggtcccttcggatttagcaccgtctcctccgggaagtcttctctcgttctctggagctggtctggagtgtacctttcctctggagcctatagctcaatcatctagagttataaagatacagtggctgacgcctgtaatcacagcactttcggaggacaaggcaggtggatcacttgaggtcaggagtttgagaccagcctggccaacatggcaaaatctcatctctactaaaaatacaaaaattagccgggtgtggtggtgcacgcctgtaatcccagctccttgggagcttgaggtaggagaattgcttgaaccccagaggtggaggttgcagtgagctgagatcgtgccactgcactccagcttgggcaacagagcaagactccacccccaccccccaggttcaagcgattgtcctgcctcagcctgcctcagcctcccaagcagctaggattataggtgcccgccaccaccctgggctaattttttgtatttttagtagagacggggtttcaccatgttgcccaggctgatctggaactcctgaccgcaggcgatctacccgcctcggcctcccaaaagtgctagcattacaagcgtgagccaccatgcccagtctttagtttttttttttttttatacttttcttattgagatataatttatataccatagaattcatccatttaaatcatacaatttaatggcttttagtatattcacaggttgtgcatccatcacaatccattttagaacagttttattactccaaaaataaaccctgcattccttagccatcaccccccaacatcctccatcctccttccaagccctgggcaaccaccaatctactttctgtctctataaatttgccaattctggacatttcatataaatggaagcaaacaacatgtgagactttgtgactggctgctttcacttagcattctatttttaaggctcattatgttacagtacttagcagtacttcattcttttttattctcaaatggtattccactgtgtgggtatcccatatcatattattagagacaggttctcactctgtcacccaggctggagtgcagtggcacaatcatagctcactgtaacctcaaactcctgggctcaagtgatcctactacctcagcctccagagtagctaggactacaggcacacacagccatacctggctaatttttttttttaattttcattttatgtattcattttctttcttttttgttgttgttgttttgagatagggtctcactttgttacccaggctggagggcagtggcatggtgacagctgagcagccttgacttcctgggctcaagtgatcctcctgcctcagcctcccaagtagctgggactacaaacacgtgtcaccatgcctggctgatattttttttcttgaaacagggtatcactctgttgcccaggctggagtacagtggcgtaataatagctcactgcagcctcccctcctgggctcaagcaatccgctggcctcagcatcctgagtagctgggactacaggcttgtgccaccaggcccagctaagttttaaaaaatgatttttggtatagaggaggtcttgctatgttgctcaggctgtatttttattgttgagacaaggtctcactatgttgccatgatccccccacctccacttcccaaagtgctcatcttatctgttcattagtcagttgacagacatttaggttgtttccactttttgaccattatgaataatactccagtgaatattcatgtatacatttgtgtgggcatatgttttcatttctgttgggtttatatctaggagtggaattgctggatcccgggtaatattttgacaggcagagttcaggggaagaaaaacttgggaaaatgaagcatgtttagaaatcagcaagagtgcaggggtttttcggagttttattttatattctgttgacaaatgtgcagtttgatgaagatacaagttatactaagtgagaagtgagaattaaggctggaatagggcgttcagagtaaaatcatgaagcactttgaataccaaaattaaggagcttggctgtaaacaaaataataaaaaatcacaattttttttttttttttgagaaagagtcttgctctttcaccctggctggagggcagtggtgtgatctcagctcactgcaactttcgcctcccgggttcaagcaattctcctgcttcagcctcccaagtagctgggactacaggcacttcccaccatgcccagctgatttttgtatttttagtagagatgggatttcactttgttggccaagctggtctcaaactttttgctgtcataattgttgtaactattgttccttttgctgaggtagggcccccagaccaaaaaaaataaatcttagaatccaaatcagtgtgttggtttgaccactgtcacttgagaaccacagtgtgaccagggcctcaggagtagaggtgatctctgctcgaaagagaaatagaatgaaaatattctccgggccaggcgtggtggctcatgcctgtaatcccagcactttgggaggccaaggcatgtggatcacctgaggtcaggagttcaaaaccagcctggccaacatggtgaaaccccgtctctactaaaaatacaaaaaattagctaagtgtggtggcgcatgcctgtaatcccagctacttgggagggtgaggcaggagaatttcttgaacccgggaggcagaggttgcagtgaagcgagatcacaccactgcactccagcctgggggagagagcgagacttcctctcaaaaaaacaaaaaacaaaagaattaagcaaattagacattgcagagagaacctgaagggggtcagaccacgtacagatttctgtgccacatgccaagtacttctgaggcatgactggatgagctgtccacatctgaaatcatccagtcttgttcagaactttcacaccggacagggagccaggactggaatgcagtctcctggtcactggccagagagttggcctgaccctgagaccagtggccaacaaaggagctgcttagtctacctcccaggaaatcccaggtgcttgtcttcctgggaagtgaatcattggcgcagcactccgtattttctcctcttcccaggggaaggatcctagggcagtatttgggaaagacatgggcatggaaggacaccgggtgaatgcatagcctgcctggttctgagctctcatggtaaggctcctacagacacggaaaagatgggggcacagggacagatcagtagggtcagagcatctcagggaccgagggcaatatggtcctgagcagggattaagagcttgggctctcatatggtgtttctgggctcaactgccagctccatcacttactggttgctgtgaccatgggcaagttattccatctctccatatctctttcctcacttttaaaatggaataatggggtacccacctcccagggtcacagagaggcttacagaaaacgattcttgtgaattggcttgcagtaataattcaatacctgccagctattcttattccacatccaagccctttcgcctgctgctgggtgaaaacacatgtcagtgtttcctgacggtttccacaaagaagattccaaaattacaacctgccagtctgaagaatctccaaaacatcccgcacgcatcctggaggcgcgggcttggggatgggactgcccgcccgggtcctgaacaggatgcgtgcgcgcaggcacacacacaccagccagcctgtgtgtgcggccggagtccggtgcggtcccgggtgagcagcgcgtggctggtgggcggggcagagccattgttcgcaggcgtaccgagtcccccgcgctcgcccgggagggaggcggggcttcccgcgtcccccaagctccagatcctggggtggctgccacgtctccctgccacgcgcctggggggacggaagacgggacggagatgttagtggtgggcgccccccgagggttcaccactgtttcctgagaaacttccccagtgcccacccacccgttctccgtgtgcccgagggccggtcctgggctaggctccgcgccccagccccaaaccgggtccccagccccttccagagagaaagctcccgacgcgggatgccgggcagaggcccagcggcgggtggaagagaagctgagaaggagaaacagaggggagggggagcgaggagctggcggcagagggaacagcagattgcgccgagccaatggcaacggcaggacgaggtggcaccaaattcccttcggccaatgacgagccggagtttacagaagcctcattagcatttccccagaggcaggggcaggggcagaggccgggtggtgtggtgtcggtgtcggcagcatccccggcgccctgctgcggtcgccgcgagcctcggcctctgtctcctccccctcccgcccttacctccacgcgggaccgcccgcgccagtcaactcctcgcactttgcccctgcttggcagcggataaaagggggctgaggaaataccggacacggtcacccgttgccagctctagcctttaaattcccggctcggggacctccacgcaccgcggctagcgccgacaaccagctagcgtgcaaggcgccgcggctcagcgcgtaccggcgggcttcgaaaccgcagtcctccggcgaccccgaactccgctccggagcctcagccccctggaaagtgatcccggcatccgagagccaagatgccggcccacttgctgcaggacgatgtgagtttcccagcctggccccgtaccgccgggtcgcaggcgcgggctgggcttccaggggacgggttggtggcagaagagaggggagagctccgcggaggacttggtcatctttttcgagttgtgctgccttccgtgagttgggaatgtggattgtaatttggggacttgagtctccaactttagtttcttaagctttaaagaaaaatccggtcgtgctggtgcttttatgaattatgcgggttttcctttgtcttcgtggggatgtgagtgctttacttctccttcctactgccgcctcccgataggtttcgcgcccctcgtccccctcgccctccgcccctaatgtatctgtacagtttcagggaacttttctccgttgcgtctcggatacaccctaccctcagtgaactacggcgctgcggaagggtccgtactgtccacccttcccccagcgtgattagagagcggagtggccccagctgcctccacgtgtctcttctcctgactctcctcttcctcccccttccagatctctagctcctataccaccaccaccaccattacagcgcctccctccagggtcctgcagaatggaggagataagttggagacgatgcccctctacttggaagacgacattcgccctgatataaaagatgatatatatgaccccacctacaaggataaggaaggcccaagccccaaggttgaatatgtctggagaaacatcatccttatgtctctgctacacttgggagccctgtatgggatcactttgattcctacctgcaagttctacacctggctttggggtaagcagcctccctgtcctcctgacctagtcctccaggtactcactgctcttttaataaggtaggatcttacagaggacaccagcccctcccagcctcccggttggggtttttctcaggcatttctctttggttgcttcaggcctagtgggctgggaagaacctgggggtactgagatgcaggactgtcaatgctgg

SEQ ID NO: 4908 - DNA, 6000 bp, Homo sapiens
accttttggaaggtttgcattttgtttctgctttcaagcgcaaatagtagcttgctttcagcttcacaaaaatctcctcaaatgtaaaagatacaaaatggcgtgttatcatccaggcttagttggagtatttgcatttttatttttatcaaaacaaatataattggtggggactggccagtaataatgtgtggcgtctttaagccaagagtaatttttaaattaaaaatgaaaattttaagaggtagcccattaaacaagctactgagttggagaattaggggatgactgtggtggtttgtcgctaaggaggcaacagtagggtccaggcggcggggcacgtagagcagttagcatgatccatggttattccttactcatgaacagtgtcggcgcacctcattatctgtgcatttgtttttcctgggcagtcctgtcagccagttaatccaccagctcttaggaagtaaatacagatttttttctttccttttttttttttttaaagattttatactacatcttgttaaagtcctatgaatgtgtgtgtgtgtgtgctattaaaactgctttttctcagtttgaacatgtgtttggtaatatttgtttgggagttggggaggctaagttatctggaatgccctgttccctcagcccaccccagtcccctggcttttaaacatttcttcttgctttggattgtccagttttttagcttgatgtctcctgtttctggaaaacataaagccaccattgtacacagttcacttttatataacccagttaattgctgtatactttgcaatcaggaattcagtaatctcattcttacctcattcactatgttcattccaccattcattctaacaattgagtctcaactacatactaggcactctttttaggattcagtaaggatttgatggtgaacaacatagagaactcatgaatcttacctcctggtatccaggttaaaatactttctgttcttgggcaaagagaattagaaacaaatacccttaacctgactcccttgttcttgagcccaggaccaagaaagaagaagctgtacaatgcagaagcagggcttgagatcacctccaacctgccaagcagatagagatctgggtatgccaacttgggaggcagaggttgaaacctcataggaggaactttggagctcatagaaggccttggcattgtcagaggccttgagttccaaaaccatgccagtatttctgccttctgacaggctggctagaaagagactaaatgggagcatttttctctgacagtggggcggagggatgaggggatgacagcccaggaagaagcagagacattgccgtaagtacttactagagggcaggcagcacagctttatgcaagttaagggccttgaccttgccccaaggcctgacctcagatcccagattcatcatactagccttttgatctttgccaaattacttaaactcactgtttcctcatctgttgaataatggtgtctacctcagggtttgtgaggactaagcgagctaatgcatgaaaagtgcctagtacagtgcctggcatatagcaagaactcagcaaatgcttgctgctctaacgaggcgtttctctgatgacagatttgatcttaagcagacacctcagggtgtactgacatctgagcaaaccatatctccaaaaattatagttgtaagtgtgccctatttctttggataccgggagctggagcttctctgtccagctatctctgctgattttttttaattaaaattttcactttttaaaagccagcatgctaaagctgagaaattggtgatgggtggtggttttccagcatttgtgggaatgtcctgacactccctttcccttactaaccattccctaggctggagtcaagagagggcaaaccagaaggcccagctttgggtctgactccaagacgactggctgggaggaaaactaaacaggcttctgaggcacagtggaatagtgagacttccgcattgttgcactggtgacagcccctacagaagaagcacctcagctgtatatatagccaaaataaagaccacaccacctaaagggaaagtgctgggcaaaccagagatggagatggcaaagcaggaacagaaatgctgccacattgaacagtaagcaggacaacttgactaggccagagttctcttgcttcagggaacctgctcaagtttcaggaattcatacccacccccttcacctaggatccctgctacagtaagtaactgttctgtgcaaagtggagctaaactctggtgtgtaagtggctgacaatcactgctgaagacggccagcactaccctcagccactttcttacagcaaagttggggaaaatagactagcaaaaacaaaactcatacttttctgtgtgtgtgaagttctccagaaggtttccaaatggaatcctctcacagccaccctgcgaagcagccagggtagtgaccttatggatgagtgacagcctgttcaaagaatgacctgcctgtgtcccaggatgcagatttatggctgggttagggttaatttctttagttgatttccagttttcttttccactgtctgtcagtattcccccgttcttattttaccagctggatttgcagagagacatactgtcaatcaaaagggcttcctatgggcagctccattaattgcttttacatctgatactctcattaggtttagagattttactgggaggctagcagaaggaaatggattgtggtctgctatcaaaagtactgaagtaactgcccagtgatcattgaaatcacacattttgctcatttaacaatgtctgagtttgccatcagcacctcagaggagcaaagcttggttcataaagtgaagttgagtgatactgagcctaccacactggcctactcgccacctccagagctatctgaagtcagcactgcaggttctgtgaacatttgggaagctgtgcctcttagccccctgggcccctacagtttaattgctctcctatctgctactgaaggaccagcagtcttcctaccctgcctccactgttaccaccaacccactttttgataaggactgcagatttatctttcttagccctgccttgactggtcttcccacctcagacgtccttactcagtccatcatctctttcaggattttcttctgtggtctttttcaaactactagctgacttttcccttttatttcccactaggaacccctccccgccccccccccccccccagccatttcatcaaatcaaactcactgccctctttcatgccccttccttagttccccaacacaagcctgtgcataagcttgaacatttctacctttgccaatggtatttccccttctggcttaccctgcttcctccttctcagacttttccagtcttgattgtcctctccataaacacaagaatgaacttcaaggcaagttacttaatgtcttagagcctgtttccccatccataaaatggggctataaattcctcaggatgggatgagggtacaaataaaaaatgaagcaggatattctttgtaaaagtgtgtgtacattttttattgtgtttctccccagctaccttccctctccccgccacacacatcctatttgcagagtgttgggggaggtggaactgtgatgtgggccctgctgtctagcagtctgcagtcacacacagccatccaaactacgagattgtatatgattcagtgccaaactgtgagctttggggaatccagaaagaaggatgaagcctttcccaagtttcctttagttaaatgtgccacttgaatcctgttctgactcctaggcacatgcaagagtcaatcacatatgttcctgtggcctttatcattttggtccatctcttgagcccacatgaatactgtcatggatggaggaggaaggaccaggctgggtcagggcctgaatgcaggttttgtttggactataggggctaagttcactttaataggctgtgacctattaaaggaggcaggaaccaagtttgcacagaaggaccatcctagttgagttaaaggagttggggagttgattgtgaggggtttcctagattgctgctgggtaaggtgattgaatctgggaaggatagggtacttgattgcctagaagggtgcactctaagttctggataagaatggtgcccaagatgagctggaggggaaggcaagtgtttgaatgacccagtccctgaggtgagcctaggttagggttaagatttggtgagtgaacaggtgcaaacgcttgtggcttatttatccagaaaaagcattttctgtgtgcctttcaggtcaggctgttactttatccccttcaggcctgaccccatctcccccacgcatagctcaagctgaacagcccctgaagctgggaatcaagcccctaccttgtgttcagagcttccctaacgtccagtcgccacctagggtagccttccctccacaccctaggccgagagcagaagcgggtggcaggagcacagggagtgaggtccaggttagaggacaggccagaaggccctccgagagggtcccccaaccccgcaacgccaggacaggtttgcacgtccccagcagtaggcaagtcaggggggtcctagggttacagcggaggagaggacgggctataagcatgtggagggtgcacggggtggcgaggccaccaccagggggcgatttcagggccgcagcgcctagaggtggggggtcgcccgatggccgaaggctgtgtgtgagcctcgccctcaaaccgcctctattgtgctagagtagggggcgcaaagaagagagtggcgaccttcccctcaccccacccagtcggccccgcctttcaggaccccgccccacccccggctccgcctccaccaccccccccccgccccgcctccagccgcggccccttcctctcgcagctggtgctgtggggccgcggagccgcgcgtcgctgtctctatggccccggatccgagcgcaaaggtgagcaaggcgaggagtgcgggcggcgccctggcgtgagcctggggctgcgggccgggggtcgggcaaggcctcccccacgtccattctaccctccaagctgggccaggcctttctcaccaccaagtcccccggtcctgcatgacggctctagaggggcgcgggccaggcctcgggctgcgcggggtgcaaaccggccaccacggagtcggggaccagcgcggggagggggccgcgtggcgaacagtgttccccaggatctgggtcacgtctcccggcgtccggcgggatcgaaggagagcttgtcctcgagctgcagcagtagagactgaggttagacctgacgaagggagaggaccgcggactgtccaggatgttggagggagggggtcccgggggaggggctctctcaagccaggagagaccgccatcctactaggcagagggaaataccgcctacactaggcaggtggacatctgggatgaaggtcgagagcctgctgatcctccattgatcctgtttgaagggtctctcctccccagttccctccaccccaagatctaatagaggaaaggtgatcagagttcagggggctggccctggggaagaacccgaactgtggaacttggggtggagtgtggggcgtggactggagaccttaaacccgtacttcgccactgaagggaggggtgatatgctccgccccgcccacttagccccgccccctcccacaggttaagtgggggctgagagctccagcccgtctcccacctttagaaccgcaatatacataggggtggaggagtactaaattatgcgttccattccatctttgctgaagctaggggcctcctcctgcctgagttactttcccattccctcccttgtagagcggccttgactcatgcacccatcccatctgcccatccaaggtcagaagcctcccccatcaccac

SEQ ID NO: 4909 - DNA, 6000 bp, Homo sapiens
ttatggctacaatgcggaatgctggggggagagggaaagatgcgtagagaggtaaaggggtaaaagtatgtagagttgtccattatggctacaatgcggaatgctggggctgagggatggtgggattttggctggaaatgaatggtcagggctaaactcaggaatctgatctttgtcctgaggattatttttgttcttaatgaggaatgacatgagctcatgtgttttagaaagacctttctggcagcaaatgagaggcagatttggagacactggagtgtatgaaatgagcttgtttgtatccttagccatttaccaagggtcgaagataagactatgaataagatttttgtgtagtatgcacattaaccctttatctgacctacttaaaacaacatttcaggccaggcacagtggctcacgcctgtaatcccagaactttgggaggccgaggcgtgtggatcaactgaggtcgggagttcgagatcagcctggccaacatggcaaaaccccgtctctactaaaaatacaaaaattagccgggcgtggtgtcgcacgcctgtaatcccagctactctggaggctgaggaaggagaatcgcttgaagccgggaggtggaggttgcagtgagccgagatcgcgccactgtactccagcctgtgcaacaggagcgagactccatcgcaaaaaacaaacaaacaaacaaaaaaagaaggtaaaaatgtcgctttttttgtaaataattactgatgcttactcaactctttacattgtataatgctctttatttatttatttttaaattgagacagagtctcactctgttgcccagactggtcttgaactcctggcctcaagtgatcctcctgccttggcctcccaaagtgctaggattacaggcataagccatcatgccccgccaatgctctttaacatatattatttcatttgatcctcataaacatccttctgaagtagttatctccattgtacagatgagaaagctgaggccatgatatgtttgatgatgtcttcgccaaggttacctaggtagtaagtggcagagataaaatctgaatataggcattctgatgaccatgccacctccagaagaaatgacaggaccttgtgtcctatagaagaatataacttgacctcacaatttctagcctgaaaaattatataaatagtggctggaaaaatcagcctattttggaggtagataacaaattctgtttggggtgtgtattgctaaggatgctagcagaacataccggtagagatgtccaacaggcagttggaaatagggagagaaagaagttgggttgagaactcatagacacagaaggcagctacttggcaccaggtaatacaagtgattggtgttctataaacttccaaagcctgctcagttattcatctgctcacaccatcccatgcttagcgcttcttcctctatgttgaggctttcaggagggctactggggaaaaaaaacaaaacaaaaccagtgaccacacaaaagataggcttggagtatttatcctggagaataaataatgtcactcaggtttacatgccaaggatttcatccattcaatcacttgcgcaacaaatattacctgggttatgctcagggttaggagaatgatgaaaaaaacagacatattccggcagtggctcatgtctgtaatctcagcactttgggaagctgaagtgggcagatcacttgaggtcaggagttcaagactagcctggccaacatggcgaaaactgtctctactaaaagcacaaaaattagcaaggcgtggtggcacacatctgtagtcccagcactcaggggactgaggtacgagaatcgcttgaactcaggaggcagaggttgcggtgagccaagatcaggccactgcactccagcctgggcgacagagcaagactctgtctcataataaaaaattttaaaaaatagacatagtccctgcattcatggagctcaagaactagtaggaaaaacaggcattgatcaagaaatcacaaaaacaactaattataaactctcactgaagaaaagaaataccatgctctgagaacagtttatataaaataagggtaccagaccaagtccaagggtcaaggaatgtttcctctagaatataatttctgaagatttttcctcttcttttttcttttttgagacagagtctcgctctgttgcccaggctggagtgcagtgacacaatctctgctcagtgcaacccacgcctgccagattcaagcaattctccctgcctcagcctgccaagtagctggaattacaggtatccgccactacacctagctaatttttgtatttttagtggagatggggtttcaccatgtgggccaggctggtcttgaactcctgacctcaggtgatctgcccacctcagcctcccaaagtgctgggataacaggcgtgagccactgcacctagctttttttttttttttttgagacagagtctcactctgtcacccaggctggagtgcagtggtgtgatcacagctcagtggcacgatcacagctcactgcagccttgacctccctggctcaagtgatcctccctcctcagtccctgagtagctgggaccacaggtgggcgctaccatgcccagctaatttttgtactttttgtagagatggattttcaccatgttgcccaggctggtctcaaattcctgggctcaagcaatccccccacctcagcttcctacagtactgggattacaggcgtgagccaccgtgcccagccccgagtgttcttctttccctcttccacatacacctcctccaagcctcaccattaaacctcacagggaaagacaatgttaaatatcttcacagagaaatccaggactgagtatatattctccatatgcacttgtaaacctcccataatgattcaccttgccatttccatgtgtctagtccacaatatcattttatctacattatctggcttgcatactaatcacaaccttgtgacataagcaggcgagtatgactatatgcatttttttctgaagtagaatgtgacaaaggctaggtaacttgcctaaaatcacatggctcattaatgggggtgctgggacttgaacttgggtcttgtaagacctagatggcattattcttgtaatattcattcttttatttattcattcatccatagacatgtattgatcaccttttgattagctgtcaggctatatatggagccatcaggaaccactgaaggtttttttttttttttttttttttgagacggagtctcactctgtcacccaggctggagtgcagtggcacgatctctgctcactgcaagctctgcctcccaggttcacgccattctcctgcctcagcctcccgagtagctgggactacaggcgcctgccaccacgcccggctaattttttgtattttttagtagagacggggtttgacggtgttagccaggatggtctcgatctcctgacctcatgatctgcccgcctcggcctcccaaggtgctgggattacaggcgtgaaccaccgtgcccggccgaaccactgaaggtttttaagcaggaaagcagagctgttttctggatgagcaaacagaaagtagtggttttccaagtacagtctgagacaacctataggaccagaatctctgcagttgaggctcaggaatctggtaatcagccaggtataggaactcttttctgattgcaatgcagtgaagagcagaagcactgtattagagaaagaggcagtgcaaccaggtaacgtgaccaggtgagaagtgatgaggtacagagacaaagagatgcacttttgagtcacttagatggcactgataggacttccactacaccctcgcatagacagtggctgaggttcaggaaatagagctggggttcctacttggatcctctggctctagagctttactgcacatagccatttatacccacatcttgattttaattattttatatctatgtttcttagcactttttgcaaatttccaccttatctcaaactgccctcaagccttgtatttctccttcgctttcataaaacctaggaaagaaataagggacagccaagtaaaacttttaaaagttttagaacatttatttctttggggctggttacacaggcgagaaagaagtagatttggttagggagagaaaacaacaggccttggggagatacactggctctccccctccctaaaccctaagaggcctccaggaaacctgaagacaataattccagaagcccagagggtgaccccatttcctctctccatggttattactgtcagtctggagcagttcaggaattcaggaaactataaagaaaccacaacagcctcaacaacccaaacatcaacatcaacaacctcaacaataaaactccttaaaattcatctccttccacccactcacaaccgcagactcgaagctaggaggtggaagggactacagaagctctgcgttgcccaggttagtatttgctcatcacaggcctgggtttcccaggatctcagggagcctggaaactgacgcctccatttctgggtgggagcaccaaagcctaaggacacctttcctctctcttcactgctaagcaggtcaagattaaagcaaaccgaggcaaaggccacggttgacagttccaagggaacccgcaaggccgcacaggatggggtggacgttttacgggagaaaaggctggggaagtgggcgggcgatggcctacgacgggacttggggcggggtgtgcgaaacgcctggcaggcgggcccttgagtatgaccaatcagaatgcggactgcgtcccaggggcggagcagaggcgtatcttggtcgagattggatagcggcggggcgcaggaaagaggtcgcgccagcccgggcaggcagctttgcaagtccgcgttatatatcgcagtggctgcgcccgggatagctggctgcgccgccgcgcacatgcctaggttcgacgccctcctccctttgcccaggagttccttctgtcccggctctgttccgtctcgccccgaggttcacgccatcctcggagccccagcctttcacccagcgcctccaagctttggaccttgacttctgcaaaactagatggtcacagccatgaatgtctcacatgaagtaaatcagctgttccagccctataacttcgagctgtccaaggacatgaggccctttttcgaggagtattggtgagactttgggagagggaaaggccatgccagggccccggggccggggcgcgagggggtggcattgaatgcccacaatgattttcttacagagcagagttatgggactcccttgtactggcttcacactacctttgtccgaggtgcaggtagtatgtggcacctcaaagagattagagctgaaagcaagcaagcagaaataagaggatgagggagaacgtggaaatatacagaagtcaaagagagcgtgtagtgagaagggtcttggaggcgtgaggttgatctgaagccttactagatgacttccccgtcctttgtggctgtgtgtgcgcgcgtgtgtgcacagtgcagggcccgggggacagcctgccctttacaattatcccatcgttccccaggtgctccaccgttcctgctgtggagaaggaggcgaagtcagagagctcttccaagctttccccaggaagagctctctggctttgccttaaagctccccagaggttttggaggctgactttatgctccaaccaatttgccataccccagccagggagaagctattgccacattcttcttacgccacagccctggtatgcttctaggagccccaaccagggagaagctattgccacacttcttacaccacagccctgggctgcttctaggcgcgggccagacagccgtcacccacctctaaccccactgagagagcaataatcacagaaaccttggacat

SEQ ID NO: 4910 - DNA, 6000 bp, Homo sapiens
agagacaaacataatgtttattcaccttaaaaggagaggagcaaagcacagataagaaagaaaaagaaatcattctaactataaggctgagtgcagtggctcatgcctgtaatcccagcacttcgggaggctgaggctggcggatcatttgaggccaggagtttgagaccaacctggccaacatggtgaaaccctgcctctactaaaaatacaaaaaattggccaggcatggtggtgggcacctatattcccagctacttgggaggctgaggcaggagaatcgcttgaacctgcgaggtggaggttgcagtgagccgagatcacaccagtgtactccagcctgggccacagagctagactgtttcaaaaaaaaaaaaaattctaactatagataaactttattaacctaatggtgtagaatacagtgcttctacatttctaatgagtaattttccttattaggaaataataacttcagatacttcacctttgagtgaaattacagagaaatgcaaagttcagctaatgttttcttccagcaaaatgataaatggcatttcaagcatggtctagggaagacaagtgcaaatataatacagcatcatattaatccaactactgaggatgggatcacaggattatcagggtttgctaaatagggaagaggatatttatagagatcagggttctgcctgaaaggtacaaagtaagctgatttaagaggctggatgaaagagaccagaataagtctattctgtgcatctatacatatatgcccatattttattttaactgtcaaatgaagggagacagcgattagaagttaaatttatcatagggctgagttttgcagtataaatacaatgacattaatttttaaagtgcattttttggccaaaatatccattcacgcaattatcattaaacacccttaatgtgccccaagtacaacagtgagcaaaacgggcatgatctctatgtaggatttatattcctgtgacattaaataaaacaatttaagaaacatgaacttcagttaaaagtatattgtgtgttaccagcatgtgtgtatacaagttatctacaccctggtgggcagaagtggtctgactcaaccacaaaacatttaaacaaacttttctacagtcaaatcatgaatagatgtgctatggactacagacgttttatctgcctcgaaatcagcttaaactactggcagaggcatggtgccctgacctaaaacaatacaaactaggtcattcaaagaaaccagagtggtggagggagaaggaatgcgttggtatatggaaaatatatgtggttgtgaggaccagctaaaatttgaattctgaaattacgaagccaacagtcaagtacatacggtccccataactagcttaaatataactgacttccatttgtttttacgtctttcaactgaactcctatcagcttaaagctcaaaattgagaacttaatccaaactgtgtcttctttctcatcaccctctcctaaataaatacaaacaatgtttcctaaggaacaaagtctgagcatctcctcaggaagagtgggttcccacttcaccagagtcctaatgaaatgaatgttatgggctttagaatttcacagacttgtattcagcttctgtgtgtgtgtgtgtgtgtgtgtatatatatatatatatgtatgtatatgtatctgtatatatatatgtatatatatgtatgtgtgtgtgtgtttttatatatatatatgtatatacataacactgcacacagtttcagctagaaaataggaacaggccgggcgcggtggctcacgcctgtaatcccggcactttgggaggccgaggcgggcggatcacgaggtcaggagatacagaccatcctggctaacatggtgaaaccccgtctctactaaaaacacacacacacaaaattagccgggcgtggtggcgggcgcccatagtcccatctgctgcggaggctaaggcaggagaatggcgtgaacccgggaggcggagcttgcagtgaacggagatcgcgccactgcactccagtctgggtgacagagcaagactccgtctcaaaaaaagaaaaaaaaaagaagaaaacaggaacaatacttacatctcaagagatgatgctatgaggatgaaatgaggtcatgtatgtaaagcatgacacataacagccactgaaaagactaccctcgtgttttgtttatttttttaaaataatttttcacgggccattttctaaccagaaaacataagtaactgttgggaacaatcttcaaatgttgaacatgcttgagaacgaccacaagctccatatatgtagaaagtgctccataaataattactgaatgaaggaatcatatgttaaatataagtggttagttacgtgctaaaattactgtcattttagtattttagtaattcatcaagaacctggcactgtaaagcaggggtaaaatagctgactctaaatgttcagagaaacccatatttgggtttttgccacagttacccaaatttgaaaaaaaatatgtatttgtcacagctgaagtttaaaacaaaaaccaaaaaaaccttggggttcacgcttcagttgtacagttaaccatgggggctcatgggataccagatgggatacacttaagtcacacgactgactaaattcagtgtttcacttcaagttttaagaacagctcacgcttgtggagatagaaaaaaaatgtttttgggaaaccagataaagaatccggaataatttgtcttaatttcttattgttcatcttaggaaaaaggaaaaaagaaaaacaaaatctgttttcatcattgaacacaacagttgtatacaacagtgttgtatatacactgtaaatttgttgtatactgtgccaatttgcacctggaaacatgggcagtggttaatttactgtggcctgtaattataaattaaacaatcatggattacacagtacacttaattgatcaacaaactgggaaaagttagccaactctcatgcacttctcatccataatgatgaatctcaatctctgttggttcggcatgcccttttcattccaattctagctattttctgggtaaatatttatgtttgtactcatttgttgagaaaaactttaactttaaaaggacagctcacgtataaatgattaagaaaaagaaacagttgtaaaaatctgtttagcctgaggttaaaaaaaaactgcaagtgtagcaagtgtgaaatgtgattggcaacttcagatcaaataaccctacttctttaacaatctgacaatgtaaaatcaattgagttttttttttcctttctaaatctactcactggataatctgaccaaacatacatctatttttttttttcctgggcatctagtttttttgtttttttttttacttcttaaatcaacagaaatggctcaacatttctaaaagtcaagaaaggaactaggaagagagttggagcagtgactataagtttgatgacaggctctttgcagccaactaacctgctttaagtgttcaaaatcaatttttctttgatagctctaaaattactcaattccattttaactccctccaactaactgtacagacattaacaagaaacagagtgtcaacggtcagatctgtcacaaccataatttagaatttgggaaagctttaattgggactgacagagaaaagccttgccccggattgaagttcgatctccatttttaacttctcgttcttttcagtttggagaactcaagctaggattaagatcttttggtcctggtatggtcacacgcaagaggagactgcaaaaggtttcgaaggaaattctagagacggagcagctaatatgtcttcatcaacatggattatgtattgaatgaaaaatcggtcatcaccaacaatcagatcctgcaaaactctcagcaaataactaaataattcgggactgaggaagcgcacccgccacgcagacaccaagacggcgtaaaatccaccaggcatcccttccaagcggcacccctttgtgtcgtgggacttacttccctaccccccaggggcccgcacagcgcgagaaggaggagagctaggctaccatctcccctgctaccgccagggcgacctcagagccaatggggccggccttctctccgcttctggccgggctccagacgaaccccactttactgcaaagccgcgagaccgattgcccgggaagtctaagcctgctagcgaaagctgctctccgcagttcctgggatccgccctcacccctgtccccagagtaatgatggagcccgggctccgcacccggccagccgcgcactctgccagccccttccccaagcctcggacccgctgcaagccccgccttcctctccaggcccaggcctccctccagggcccaccctcgggtctccccgccgacccccgaaatcagtccacaacccagatagcaggctgagcgacgtcccattccctccttggctttaagcgcagtgctccgccctgggcctggggacgggagggggataaccggccggctccaagggggcccaggcccccacactcaccatcctcccgccgagtccctcctcctcctcctcctcctgctgcctcccccgttaccaggggcaactgctgcggcgccgcccccgacgtccctcgcacgcacagctgaggagctgagcagcaatacggggcggggtgcagctccgctttccccagagtgcgcaagtgcgctaaggcgcccgcccacgcagtgggcgggctacgggagctgcagaggccgccgccggctcgcctggaccagggagtggagaaagcctgcccacgtggctggcgggagcctcccggcctgggattggtcgaaaaggaggggcgtggggcgggcgtgggggcagttccccagcccaggtcctcctctcacccgggccagttttcaaggcgggctgtaactggtggcatttgtcccgggaccaggtaaggggccttgggacaatggcgctcgccctgtctacctccaatccccacatctcgggtgggtgctgagattgctgtcctgactgcccaggcggggctgcagcgcgggctggacttccacctgcagaagccacgtggcgcgaagtgcgccctggggctgcagatgggcccctctgctctgacccccattgcctaggagtgccaggccgagcggctggggcgttacgagctgtccgggatgggggagtaccgatggggggaggccgtctgtcggagggcaagaagcagcctgggggctggccctgagccctgaggtgagctgaaagcacaggtgaaaggcgttttggggatcggcccggtttttgttttgacacagggtgtcgctctgtcgcccgggccggagtgcggtggcgcgatctcggctcactgcagcctttgcctcacaggcttaagcgattctcccgcctcagactctcgagtagctgggattgcaggcgggcgccaccacgcctggataattttttgtattttgtttttgtagagacggagtttcgccatgttgcccaggctgggctcgaactcctggggtcaagccatccgcccgcctaggcctcccaaagtgctgagactacaggtgttccaaagtggtgagccactgtgcccagcctctggccggttttgctaagctgctttggacaggaccgcgtaccatctgtagtcctggaggaggcaaaaatgagcctgcatttttagccaaggaagagcaagtgggacactggggtgggttgggaagtgctacctcccatccctttcccgatgcagaggactataagaagagtttacacaaacgtgctaggccctgttctagacgctggagacacagcagtggacaaaatcagcccgtatggaaattacatccttcctaatgaaatacatttcataccaaatttcattttcacaacccctagaaattggtaattgcggc

SEQ ID NO: 4911 - DNA, 6000 bp, Homo sapiens
ggtaaattctttttagtcatttttgctgctgttttatcctctactttttcttaactggttcatacagaatctttgagctagataggtccaaccctgaaaacgtttgtatattggctctgaccagctgccaagtagttttgatttacatacttccagtttgagggagctcaatccctcagaaagcagacaattccagttttagaaaactctagttattagccaagggtttatggcattaaaataaaatctgcttcatctaaatttctgcctgttggaaatagttttcccttattcactaccttgttcaaatattgtcctgtgctctgaaatccataagcaagtcctccccactccctgcacaacttcaaatagatgtccttaatacctgttcctttacccttgtcttatggaggttgagcatctcttgctccacaggatctcttctgaaaaccctgatctacaccccatcatataagggggaggcagaagggtttattccccaggaggccacccttggccattcagacacatacaaagagtttggaagaatgctttatgatcctttactctgggatcatcgtggtccagcccattagtccacaagtgggactcagattccaaagtggtttctctgctccatcccactagctccttctcctgtgattattttatcccaggggttttcatatggccaccttcttgtgatgggcagatgagtttcctttctctgtgactacctgccttttacttggcccctggtcctccaaaaactttttttttcaataatgaacaattcagtatggtggtagcataaagtacagtcttcctaaagctcagctctggtcatgcattcacctgctgaatgaatgaatgaatgaatgaatgaatgaatgaacaaaatacaacaaaattaaaaataaatgtcccaagccaacaaaaagacaaggacagaatcctagaaccaatatttagggtacagaagaaaacagagtgggaatagaaactattaagtacctaatctatatcaagcactgtgctaagtgtattactctgctatctaattgtaatattctagcctctatttgttcattaatcccaagcctcatggtacttatttttgtgtgggtatacgtgtgttcatgtgtgtgtgtgtgtgtgtgtagctatgtgtgttttaaatattagcccattttcacatggacttgtctatgctgctttattataaggtgccccggattgtagaatattccccaccggtggtggtggtagtggtgtttgttttctttgttgttgttttgttttgttttttgcttctgtgtgagccatagaagtatcaatggacatagacagttttatgtatatttatctactaggaattccggcatctattgtgcagattttgtgagtccaaatcatattcatagctacagctagcttggggttttattttcttttgtgtgtcaattcctatgctaccaccaacccctgcaccctaatccaaggcactgatcagaagacagtttgctgctgcatgctcagatagtggccaacatattggagggcaccatatcatgtatcagataacacttcaaactttgtatattgggctcatttcccattgtttaccacataaggcataaagataagtgtcttttccttatgtaggtattatcactcacccatcagttcccagaacttaggtgtctttcccaaaacaccatgggtcattatcgagtcagatactgctttatttttgaggtcttagtttgattttgacactcagcaatttaattcgaggctcagaaattatttaagatttttgaattatactttatctattagatcaaaatgtttgttgggagatggggttctatccagttggaaatgtggcttttgtatttctcctagataattttcagactaaccatgtaaggtaggtatcattaactcagctttacagataatgttgtgaaggttcaggatagttaagtaagtttttggaggtcacatagccagtaagtgacagaggagagacatttaggagccagcaaaggagagagaagaagaatgtttctggaagcaggaagaaaaccaggagtgagcagtgcctttgaattcacggaaggagaatcgtgtaaagtttggagaagaatcaaatactgtagaggggcaagggctgagaaaattattggatttggcaattttctagagagaacagattgtgtctaagtggttctttgaagtgtgcctggagggcagggattgtgttgtcctgtatgcttccttcagcaccacttgaaaatgtgcacttaaatgttttttgatggtgatgttgattatccaaaacatttccttgaaatagcactttccattgcaaaacttatgcaaggatgtggggtcaggttcagcttcatgcttaccctttgaatatacttgttctctgggaggatgcctatagaacccctttaagggaaaaagatggaaaggaaggatcagttagtgacaggtcaattaaaagaagcagtttcgctaactctagccttgaaagcagaggtggaacattctttcatgaacacagacaagttattttgtagtatgctaagctcttcaggcacaatatgtctttcaatcctttggaaaaggacacaactgttcccatttcagagaagaggaaactagggttttagagcatccaagtgactcaaattatcagagctagaaatgacagaattgagattcacagacatgtctgacttcatagcagagcatcttaattcttcaggtcccacagtgggatctgttttaagtggttcttgaaatttccctggacacgtggggaatgtgactgccaaaatcaaaatgagagagatcaataggtttcaaattatctttcagacactaagatgtgtgcccaggtaggccccaggtgatggatgattaaggaccttcatagcctctgattttggcccactggtctctcctgaagagcagataaaagagtgtcgcaggctggagaatgggtgcctgcatcgtgacaaaggaggggagaccaagagattcaccctgcttcatatgaagccgtttctcaacctagctggaggtgacaggttcatgcatttaattattcattcttcccacaaacatttatgggttcattttcacagaataaccttttattgaagactgacttgtgatggcagtaacctcagataggtaggaataaggatttatatcctagagagtaacatgaaatgcctaccctgcatcaggcactgagccggggtataagggccacagaatgaataaggtagtgaagaggtgagctgttcaatacagaaacctctagacacacgtggctgtaaattaaattgaattaattatgaataaataaaacaattccatttctcaatggcactaaccacatttcaagtattcggtagccccatgtgactggttacctaccctcttgggtaatgcagatgtagaacttttgcatcattgcagaaagttctactggacagtgtcagtgagagcgagtgttggctctggagtcagaaggcctggattggaacctggctctgttccttagcatctgtgtatttgtatgtacttgagtacgttccttagtatttctgcttttcttcctttacctacaaaatagggagcacaattggaacagcaaaataaggaatatcatatagagtactcgctgtgttccaggcaccattgtattggctttatttgtattaagtaatgtaatactgacaactaccctactaggtaagtgctgttactatccccgtttcatagatataaatgcaggcacagaaaagttcatgcagctcatgcatggtggcactgggaagtaaaccctgacagctgggatctggaatcagggctttccatctttgttataattcctaacaatggcatcgctctcatagtgatggtgggagaattaaatcatttactccactaagattgtaatatctgcctggcatggagtgaaagctgaggaaatgttagttattataatattattctggccttcaaggaatttagagaaactctactttttattctgttcaggagtctaggagcagtggacagcctgttcctcttgttagtagaaaatagcaaaacatggcagataaaggagcttagtgggagacacagcccttagccttgctcttgcctaccctagatgtgtcactgcccttctctgcctcagtttcctcatctgtaatatggggattgaactagaatgtccccgaactctgcttgctttttccaaactctctgattccatgattaaatggagcctaatttgtgttgtgcaattcgaagttatgtataaatattagcttatgcaactggttaatcacttagtgtcagataaatatgcagagcaaggtgtttaatatgtttacataaactgtacaaaccacttttcattaattgtgcttttccagcgtcctagcaggagcgtgttgaagcagggaacttgacatgggtgcctgtccccctaacttttcatctggacctcgctttgatttattccatgggctccttcctgtgcacttgggaactggggctttgaaaatgtttatgccaacagttcagcccttagaactggcagcacacaaggtgttatctctgtcttcagacaggctatgcttcttgtgggcacttcatttttcatccagtcagggaaaagatgggaattaccactagtttacacctggatgccaaacctccttgtttcctcttatccctttcccctcctttttttctcttctctctcttttttttttttttaccagagaagatccaggatgatttcagggcagttatgggaagtttctcaggtgtgataaaagttctctgagtttttgttccattgatttttatgggactgtgggtggctataaaatcagagtgggtacagtgcagctgtctgcctgacagcatggactatgtaggaagcctggcggggttggggccagagcaggatggacagagaagggatgggctttgatgctgtaccagccaggctctgcctgggagcagaaggttgaccttggctggaatttcagtaagaactgagtgaagggactctctacggagggatgtgcagggtttaaggaagcaacatggcatggcaaggcacccaggaactagcagcagtaggaggcttttgaacctgggcctgaaggggcaaggacaggaaaccatgttactgaatttctagacagagctggaattaaggggtagggggtaccgaacagctgaagtcaaagggattggagcttctgccagaaacttggggactaggcaggataggaagtggagcagataaactctaacctctcctctcctcttcttaactaccagatccctgctgtttgtttttgtttttggttgaatgcaacaggatggcaaaacgcaaggaagccaggtgggctaatgcagccatatgggtgagccctgtgggggtatagaatagagtagaagaggtcagaaaatgactttggggtgagggcaaatggagaataatcagcacagacagatgtggagagctgtgtgtgaatgtgaggtaatagagtgaggtggggggaagtggggggcggggggagtgcatcgagaatgcaacgttcagtcttatcaagtctccccttcccttccaccattcataatcagctcctctctaaacaggccagcatgaaatacttactgaactataaccatggagaggcaaccatgaatatggaaagggcatttgatgtgaattaggtagatctgagttttctttgtaatcgtgatatagttccttattagctaagtagcctttgaccagttactcaaactttctcattctcagttttcatatctgtaaattatatgaataccacaagattgctaattatatgaataccacaggaatgctattaagttgaaattggttaatgaatataatacacctagcccaggacctggtgt

SEQ ID NO: 4912 - DNA, 6000 bp, Homo sapiens
cactcctgaagccaacaagaccacgaacccaccgggaggaacaaacaactccagacgccccaccttaagggctgtaacactcaccgcgaaggtccacagcttcactcctgagccagtgagatcacgaacccaccagaaggaagaaactccaaacacatccgaacatcagaaggaacaaactccggacacgctgcctttaagaactgtaacactcaccgccagggtgtgcagcttcattcttgaagtcagtgagaccaagaacccaccaattccagacacacaaaggctgaggagtgtgggcacacggtgtgggactggcagccagctccacctgtggccacggtgcgggatcgactgggtgaagccagctggcctcctgagtctggtggggacttggagaacctttatgtctagctaagggattataaatacaccaatcggcactcagtatttggctcaaggtttggaaacacaccaatcagcaccctgtgtctagctcagggtttgtgaatgcaccaatggacactctgtatctagctactctggtggggacttggagaacctttatgtctagctaagggattgtaaatacaccaatgggcactctgtatctagctcaaggtttgtaaacacaccaatcagccccccgtgtctagctcagggtttgtgaatgcaccaattgacactctgtatctagctactctggtagggacttgggtaacctttatgtctagctaagggattgtaaatacaccaattggcactctgtgtctagctcaaggtttgtaaaccattcagcaccctggtctagctcagggtttgtgaatgcaccaatcgacactctggatctagctaatctagtggggacatggaaaacttttgtgtcaacactctgtatctagctaatctagtggggacatggcgaacttttgtgtctagctcagggattgtaaacacaccaatcagcaccctgtcaaaacggaccaatcagctctctgtaaaacagaccaatcggctctctgtaaaatggaccaatcagtaggatgtgggtggggccagataaaagaataaaagcaggctgtccgagcccggagtggcaaccacctggggttcttttcacactgtggaaggtttgttctttagctctttgcaataaatcttgctactgctcactctttgggtctacgctgcttttatgagctgtaatgctcactgcaaaggtctgtagctttactcctgagccagcaagaccacaaacccaccagaaggaagaaactctgaacacatctgaacatcagaaggaacaaactctagacacaccgcctttaagaactgtaacactcactgcgagggtccgcggcttcattctggtagctaaacatacacagatcaatggggcagcataggggccaaggcactgcaggggttctcatgactctgagtcaggtgctgtcttgaccgactggttgtgtgattccagaagccttctttcacctgaaaaggcctcactggcctcacctatacagtaagtttgcacatcatctccagggtttctttcatttctacccactgtttttgtttagtaatgatgccttgcagtcctaatgatcttggaatcaagaatggtgactagagaacttcaaagtggaaagagaggctgggcatggtggctcatgcctataatcccagcacttcgggaggccgaggcaggcagatcacttgaagtcaggagttcgagaccagcctggccaacatggtgaaaccctgtctctgctaaaaatacaaaaaaaaaaaaaaaaattagccaggcattgtggtgcatgcctgtaatcccagccactccagaggctgaggcaggagaattgcttgaactcaggaagtggaggttgcggtgagactccgtctcaaaaaaaaaaaaaaaaaaaaaaaaggagagagtaggatggctgagccatgacgcagtagcaatgcttctttttttttttttttttttgagacagagtctcgctgtgtcgcccaggctggagtgcagtggcgcgatcttggctcactgcaagctccacctcccgggttcacaccattctcctgcctcagcctcccaagtagctgggactacaggggcccaccaccacgcccggctaattttttgtgtattcagtagagacggggtttcaccgtgttagccaggaagcaatgcttcctattctagcgccttgctaaactatgtgtgctgcagactgtgttcgtgattccgaatcctaaaaacaaccgtcctaggcttgtctctcagcctagactctagactgatttggctcatttggttgtcttggagacgttctaattctgaagggggcagtggtcccttctagaagatagctggtctgcaaatgcacacctctgcttagtctgaatcctaaagttatagcttgagccaattaaagtggcttctcatttttctctcactctgatctcaaggagccctttttcttctagtaatctagaccttcctcttcctatcacagtctcaaggattgtgcccccaaagcagatgcaaagccctgtctaccccttctccttcccctgaggtagagctttatcgaaggtttctcttggtaaacgttagctttctgaactaagggccgtcttttttttttttcccgcttaagcccattgcataacaatctcttgttttaatcttttgcccaacactgcttttcttactgtcagaggttactacaagtgtttgaacaggtaacttctacctttgaacttctgttgtgacagattcaaaggttccaggggagtgtgttggccactctcaggacagtacacagtagcttcgggtgtgtcccagtcagtcctaggagctgtggaaagagtagaagtgcctgaatgtggtgctgaatcaatacagccagctgtgaggggagcacttcctggacccaggaagggagagtcttcttccaaggtaagctgcaatgatactacctgcactatattgaatatatctgtgagatagtagggaggggattggtgtggggaaagaaagtgggatttgttatgctcaacctaaggctctttaataacatgaaattacatttagttgaatagtaatctcagctgacttgtgtgggaggcaaagaaaaaaatcagttggaaaaggggtggagatatatgagctatccaaatgctagcaggggatggaattggaagggaacactgattttggtaagtgtactaaagcacaccaagccagaatgtgggtctccttcatcttccattaagaaatttctgtctcagtgtagttagaaggatcgtgcgtcagctgctgagggcagagagtcccatttggcagacagagaggaagggaatcagcagatattcgattaggtgctggggactgttctgggtagattatgtatgttacttcattggtgtatctcatcctataaagcaggtggtatccttcccatttcacagaggcatagtgcgtctccaggctgttaaacagcatggcctaagctacatagctccaaggtggtgtggctagaatttgagacttgattggtcagtttccacagcctgcccaataatgcagaattgttgtgggttgccaaagctttcagttaccccctgaaatcctgagggtgtcactcatgtgcacagaggattgataggaatacaactctgatgggcctttagaatgactcaaccttcctgaacttgagcatttttactggaggaggtcaataaaaaaaaaagaaataaaacctcatcttcccctggccctgagccctttggtgaaggaagacagcacccggtgaagggctcagaggtattagtgtggctgagattcgacacccactctgccatcctctgctctcctctagaggaagttgcctcttggggagctgagttcctgaaactaagcaaatgacaagtgctcctccagccgtgagatgagccagaggatggaatgccacaggccccacttcgtctcccagcccttcatctttcttccatgtccaaaggcggctccccagaggccaagggctcagctcttgtgttctctgagactgtggcacagctcaccctggcttccttagtaggaagcttttaagaactgctctgtagaaagaacaaaccctaatctagctccagcaaagagccaggatcatgctgaacttcctgtgagccttcgtgggggatcgaggctggagaaagtgctgcttcattctgaggtatctgtgaggtggggaaggggcaggaaaatttgtcatttcggcttcctaatctgagaatggtagctccagggcccccctgtagccacagccttaggcggatcaaaaatgagactaatacaggtcctggtaatactgggggtgaccaaggcgaaagaatcgatttttaagttaagttttgaggtgtgactgtatcagagggaaagaaaccatgccaattgaacgactcacagccctgtcgttcctgacttgcttattttcttggctttgccagaacttcttcagagaccaaggcaggcagctctggcgactggagagaggcggggtagaaggtgtttgtgtgggtctgagggctgaggtaccctctagccagactttcctgtcctccgaatccagcagggaacagcgtcacctctgcctctgtgaggcttctgatctgagggggcacctcaagtcattttagtttgtttgttttcatcttagttgaaagatgataggccacaggagggcagggtcaactgtgttgaggcaagctggcttttgtgtcggcccttaggggctgaggtgaaaggctttgacacggagccagggtagctttggcagcttctcccctcctggtcagaacacttccactttcagttgtgaaaaaaaaaattaaaaccaggaagtgaagtccccgagcacgttagaaagcctgacatggcctgactcgggacagctcagagcagggcagaactggggacactctgggccggccttctgcctgcatggacgctctgaagccaccctgtctctggaggaaccacgagcgagggaagaaggacagggactcgtgtggcaggaagaactcagagccgggaagcccccattcactagaagcactgagagatgcggccccctcgcagggtaaggggaccatcgagggggtgttattcagcaagggggtcttgtgagggtgtgacagaggccaagggggcatcctgacccccgactttctttaagcgacttagaatcaagggccggctgagttccacgggcacatcatgctgtctccctcctggtctcggtcatgccttcagaccctgtgtcaggaggagcaacgggaaggaaggatgtggggcatgcatggggctcactttccttctctcgactctcttggggaaggtgaaccaaaacagagacctctttttgtgggtctgagcatccagcatagctcccctgaggtgggctgggggtttgccctcaattttatgttgggtaagactgatgaatgagaccaatggggtgggagagacagatgaatggagctgagtgtattttaggaagtaaggccacaggttaagtctcaggtgctgcttaattcctaagtacttccttcccaatgcccactccctgagggtcctaaggtgaatctcaaagaccctcagggagtaagcactggaaagggactctaccactggagaccctcagggaataagcactggaaagggactctaccaccggagaccctcagggaataagcactggaaagggactctaccaccggagaccctcagggaataagcactggaaagggactctaccaccggggcttggtaccttctgagatatcagcctttttttggtggtctgaaaggtagaattgaatctatagctccaatgtgtaggtgattagtattctatatcagaggcagagtcttaaaaaataaagttaaggccgggcgcagtgactcacacctgtaatcccagaactctggga

SEQ ID NO: 4913 - DNA, 6000 bp, Homo sapiens
ctgaggctgccagccctggaaattcaggggactgggatacaggccatgggagccacccggggctatgtacaaatgggatggaatttcccacaaagtgcagtggtaactgtctcagcgacttccctggtgtgtcctgaaacgtacaatgtatcctacatttacccaggctcttcctgggagcaactctttgtgcagggactcttctgtgggtagcctctggggggcttttaaatctggcttcttggtttgaacaaaagatggcagagagagagggagagagagagagaactctggatcagagggtgggcacttacttaattccaccaaaaagttcctgattgctctccagaaaggctgcaccagtccccatgcaccccaaggaaagtactctcatttagctatattttcaccaacaaatggtctcacccaacttcctattgttgccagtgctccaggtgtagggctgtgtctcaacctcattttaataggcatttctctgattactagcgtatgagtgtctcttcatgagcttggtagctatttgggctcccccttctgtgacctatctgttccaatcctgtgccagctcgctggctcctgcctggctactctactctcccttccttccctgtctgtgataactagtacgccaggttgggctaggctaggaaccactgagtctcttgggatggttttgttcgtttctgctctgacccattatttgaatgtcacagcttaatgcccaggaggtgagggtactgtccttgtttccaagttctctggtgggggagcacctgaggatttttcccccaggaaacacctacaccttccctgtatccagcagtttccattttccagtaacagagaacacctaatgtcaggcactaggcaaggcccatcccactttctctctataactatgctggagggagggactgttatcctgctggagagacagataagaaacaggtatgtaaaggtcaagtagaatgaccaaggtcatgtaacttgtaagagaccccactaggatgctgtctacagcttaaactgttagtgcatctccagtaatgtctatttcaaataactgctatgtcccaggtggctacttcctaaatagaatttagaaattatcattctcaattattgaaatgtaatgaaaaagtaaactcgggtaccacctttgtacctcctcagtccccagtgtctaaaaaaggtgcaagtgagtggagggagaggagggagagttactttcctctagagaggaagtaactctagaggaagtaatgtttctttgagggttactcaaaggaggaagtgaagtaaaaaggagaagtaacaccttcatgagggtttataagggaggggcctgtctgatgctggacagcatgctttcctccatgaggaaataactagaaaagaagaggaagcggaaagaaaatgtgcaaaggccctggggcagagaaatgctgagaggaaccactgtggccagagggggaaggcgagggctaagatgtttgagaagtggccgtggaggctcttcaggctggaatggcaggacactgagtgtatatgaagatgtcccgagccgtttgagaccctcaattttcatgtcttccattctaaagcttatctggctgatatggacctgggtggggacatgcacatgctcctgcatggcctcccctctccacagtctcccatcttcccctgggcaaagaaaggctcccttcctatctaacctgagtctgacccccttcctgtatacagtgtcctgaggcacaaaaacatcctcggcaccaaacagagacacttttggtgtctctttcagcaagactccaaaaatcccctctctatccatcccttaagtaatgcacttttaagacaattttcctttttatgtttaataattatttatcagaatacatatttgtgtatgatgtcttgatcacttaaataccattaatcattgttataatcacataatcctaaagagaattttagagccttattaattaatcattaattaatttttgaggcagggtcttgctctgttgcccaggctagagtgcagtggtgtgatcatggctcactgcagccttgacttcctgggctcaagtgatcctcccaccccagccttccaagtaactgggaccccacgtgtgtaccacgatgctcaactaaattttaaacttttttgtagagggtctcactatcttgcccaggctggtctcaaactcctggcctcaagagatcctcccacctcagcctaccaaaatgctgggattacaggcatgagtcactgtgcctaaacttttttttatactttcaacttttgttttggattcagggggtacatgtgcagggttgttacactggtatattgagtgatgttgaggtgtggggtatgactgatcctgtccccctggtagtgagcatagtacccaagagttagtttttcaaccttttcccccctccctccctttcccctttagtagtccccaccagggtctgttgttgccatctttatgtccacgtgtagaaaattttaaaaagctaatgcatattcacatatttattgtggttcacataatagataggtgatgaatacagaatttaaacaataaaagcattagggtaggatacaattctgttggaaaacggaatggaaacatacttaaaaggggtaaagaacacaatgtaaatattttgactgttaaagggatacttgtttatattcttaagtataacatggcagttttgtattcttatacaaattcctttgggtatatttaaaagagagagataataattttatacataaaggtcaataaatacaatataccctatttaaatatatgattaaaaaactcattttagatgccaacttgaaaatgtgtaaggcaaacatattgttaaacattttttagggggtttcaacaaaaagtctgttataggccatagtgctctaggggtggtgacagtgatccggaggcgggaacgccgggctggcattgtccctggagccatctacatccagctggctgggctggagtttggtgtggcttccagtgttcactgctatgatgctgctatcaggtcagaatgtcagcagggatttgtctaggctttactgtctccccagcattaaccatagtgcctggcacgtagtaagagctcaacacatattcagcgcatgaatgaggggccggcacttacggagctctcactttgtgccaggcactgtgctaagagctgcctatgcattcccctggaattctcacaaccacgctgcagtaggtccagtgagtatccccattccagagatggcgaaactaagccacaaagaggatacataaccagcccaaggccaccagtcaaggaagtagcagactgggacctgggcatcctggcaggcaccctttaccataatgcctctctgtccccatgtggtccctggggtagagtctgcatccttgggttctgaaactccagagcaagcactctggggcactccctgagtgataccctcctgccatcttaaacggctctctgccatctgcttcctcctcctaagtggttttccttctgtcctccctgtttaatgtttaagttgtgcacatcctgtgacatcctggagacccatgttcctgacctacttacctattcaaccatctcttctcacacatggggtagcaatgagaagcacagggggtctctgcaagggagtagggaggtggagagagcgggggcagccacacatcacactgctgttctcagtggcctcctgctgtcaacaagctaacattaataaaacaagcccactcttctgctaagagactgtgacagggtaacatttattctaggtagcttttcaagaaaacagctcttgctcccacggtcccctcggagggcctgcagagctccagcgatgtcagagggcatctgtttgtttctcctttgcttataaaagggacctggaaatcaaaggcaggctcttagcccttagcagtgaggatgacagctctgcaccagccacacgcaggcccctggctctaggaaccacctctcacccagacgcccaggcacagcatggtggggagagagtacaggacacagggcctaggcctgctgccccgcccacagcccgccccctagccctttctctgaggccaggtgtactcacctagcctccagggtcccctgctcaggtggccccagaggcccaaacccactgctcccactttctgagacctgggaccctcacctccccaactcccaccatagggcgacactgaaaagtgtccccttcccccccccgtttccaagtcaccagcttgaggatgcccaaggctcaaaggctcctccgagtggcaccccgcatcgggctgcagaggtcggagaggggaggggatggtgggtgcaaagggtggcttcttcaggaaagggaagcctgtccctggctcccagcacctgtcacccctggcgatctcaccccgcggccatcattcccgtcctcacggcccatttcagggacactgaggctcaaagagccacgtgatttattcaaagcagctcgagccaccacttggagccacaagaaagccctggtccgtgcctcctcgccttggtccctggcccttcactcttcgtccaggctctctgacctctttccctctgcgcccctgcctcttccccaggcctgggtccccaaggcactcggccacgcgctgggtccggggaagaggcgcggccgcggccgaggcggggacagggaggcggcagcccctcctgcgcagcgacggcgcgggcgggcggaggccggggcgccccagccccccgcccccgctccctccggccgtgacgtcagagccggacggggtaaactgagcggcggcggcggggcgctggggcggagactgcgacccggagccgcccggactgacggagcccactgcggtgcgggcgttggcgcgggcacggaggacccgggcaggcatcgcaagcgaccccgaggtaacacggccccggttccctgctcgcagggcgcggtgccggaggggagcgggcccgggggaggcagggaggcagggaggcccccagagctacgcgggcggggctgcggggaccccggggcagccggggcgcagggcgcagggcgcaaggtgcacggggccgagcgtgcagtttgggaggtggcacagttgggggcggcggggatcagggcagcgtcctgggggttctaggttgggtctccagattgggtccccgacggcgctcgcgggcgctctttccagggagcgcgggctctcgtggggacgcgctcgaggcaggtgagccgaggctggggcgcccgggggtgtccccggatgccggtgcgcgcggctccctgacccgcccttccgcggcctgggggacgggagaatggggggtccacggccgccttgggtcctcaccgcgcaccgcgcccgcagcggagccccggagccatggccctgagcgagctggcgctggtccgctggctgcaggagagccgccgctcgcggaagctcatcctgttcatcgtgttcctggcgctgctgctggacaacatgctgctcactgtcgtgggtacgtgcggacagggcacccctgccccggcaccccagccccagcgccccttccccggcactccacttacccctgcgcggtcccggagctccgccaaggcccgggaaagttggagaactcgctttgcaaaaaagacatcccctccaggctgccgcgccggggctaggaggagccgcgttgtgtggcttcgctttcctgatgctcgggtcaaaaactgtgacatccgataagacccagaacttatgtttccccctgataatttcccgcatcctcttgcctgctttcactgcgatgaaaaagatttctgttccaaaagagaaattcctaaagttcaaaattacgtgttagaataattattgggctactcgaaaaggcaggttagtaatttggtgt

SEQ ID NO: 4914 - DNA, 6000 bp, Homo sapiens
tccagcctgtcccctcagtcccaaccccaagcgtcgctgagtctttctaatcctccttttctacagacccatctgacctctcccctcctcgccagcccaagctaggtcccaattcttcctcagcctccactcctccaccctgtaatctttttatcgcctcccctcctcacacctggtccggcttacagtttcattctgtgactagccctcccccacctgcccagcaatttattcttaaaaacgtggctggagctaaaggcatagtcaaggttaatgctcctttttctttatcccaaatcagacagcgtttaggctttttcatcaaatataaaaacccagcccagttcatggctcgttcagcagcaaccctgagacgctttacagccctagaccctaaaaggtcaaaaggccatcttattctcaatatacattttattacccaatctgctcccgacattaaataaaactccaaaaattaaattccggccctcaaaccccacaacaggatttaattaacctcggcttcaaggtgtacaataatagaaaaaagttgcaattccttgcctccactgtgagacaaaccccagccgcatctccagcacacagaacttccaaacgcctgaactgcagtggccaggcattcctccagaacctcctcccccaggagcttgctacaagtgccagaaatctgaccaccaggccaaggaatgcctgcagcccaggattcctcctaagccgtgtcccatctgtgcgggaccccactggaaattggactgttcaactcacctggcagccactcccagagcccctggaactctggcccaaggctctctgactgactccttctcggcttagcggctgaagactgatgctgcccgatcgcctcggaagccccgtagaccatcacggacgccgaggtttgggtaactctcacagtggaaggtaagtccgtccccttcttaatcaatatggaggctacccactccacattaccttctattcaagggcctgtttcccttgcctccataactgttgggggtattgacagccaggcttctaaacctcttaaaactccccaactctggtgccaacttagacaatactcctttaagcactcctttttagttatccccacctgcccagttcccttattaggctgagacactttaactaaattatctgcttccctgactattcctggactacagctacatctcattgccgcccttcttcccaatccaaagcctcctttgcgtcctcctcttatatccccccaccttaacccacaagtataagatacctctactccctccttggcgaccgatcatgcacccctttccatctcattaaaacctaatcacccttaccccgctcaatgtcaagatcccatcgcacagcacgctttaaaaggattaaagcctgttatcactcgcctgctacagcatggtctttcaaagcctataaactctccttaccattcccccattttacctgtcctaaaaccagacaagacttacaggttagttcaggatctgcgccttatcaaccaaattgttttgcctatccaccccatggtgccaaacccatatactctcctatcctcaatacctccctctactacccgttattctgttctagatctcaaacatgctttctttactattcctttgcacccgtcatcccagcctctctttgctttcacttagactgaccctgacacccattaggctcagcaaattacctgggctgtactgccacaaggcttcacagacagcccccattacttcagtcaagcccaaatttcatcctcatctgttacctatctcggcataattctcataaaaacacacgtgctttccctgctgatcgtgtccgattaatctcccaaacctcaatcccttacaaaacaacaactcctttccttcctaggcatggttagtgcggtcagaattcttacacaacagccaggaccgcaccctgtagcctttctgtccaaacaacttgaccttactgttttagcctagccctcatgtctgcgtgcagcggctgccgctgctttaatacttttagaggccctaaaaatcacaaactatgctcaactcactctctacatttctcataacttccaaaatctattttcttcctcatacctgacacatatactttctgctccccggctccttcagctgtactcactctttaagtcccacaattaccattgttcctggcccggacttcaatctggcctcccacattattcctgataccgcacctgacccccatgactgtatctctctgatctacctgatattcaccccatttccccatatttccttctttactgttcctcaccctgatcacgcttgatttattgatggcagttccaccaggcctaatcgccacataccagcaaaggcaggctatgctatagtacaagccactagcccgcctctcagaacctctcatttcctttccatcgtggaaatctgtcctcaaggaaataacttctcagtgttccatctgctattctactactcctcaaggattattcaggccccctcccttccctacacatcaagctcgaggatttgcccccacccaggactggcaaattagctttactcaacatgcccgagtcaggaaactaaaatacctcttagtccaaatagacacttccactgaataagtaaaggcctttcctacagcgtctgagaaggccaccacagtcatttctttccttctgtcagacataattcctcagtttagccttccacctctatacagtctgataacagaccagcctttattagtcaaatcagccaagcagtttttcaggctcttagtaggtgtcagtgaaacctttatatcccttacaggcctccgtcttcaagaaaagtagaacggactaaaggtcttttaaaaagacagctcaccaagctcagccaccaacttaaaaaggactggacaatacttttaccactttcgcttctcagaattcaggcctgtcctcagaatgctacaaggtacatcccatttaagctcctgtatagacgctcctttttattaggccccagtctcatttgacaccagaccaacttagactgtgccccaaaaaacttgtcatccctatcttttgtagtcatactcctattcaccattctcaactactcatacatgccctgctcttgtttacactgccggtttacactgtttctccaagccatcacagctgatatctcctggtgctatccccaaactgccactctaaactcttgaagtaaataaataatctttgctggcaggactatgctgaatctccttaggcactctctaatcagatgtcctatgtcctcccaattcttagaccttttatacctgtttttctccttctcttattccatttagtttctcaattcatccaaaaccgtatccaggccgtcaccaatcattctatacgacaaatgtttcttcttacatccccacaatatcaccccttaccacaagacctcccttcagcttaatctctcccactgtaggttcccacgccacccctaatcccacttgaagcagccctgagaaacatcacccattctctctccataccaccccccaaaaattttcgccgcctcaacacttcaacactattttgttttgtcttattaatataagaaggcaggaatgtcacgcctctgagcccaggccaggccatcgcatcccgtgacttgcatgtatacatccagatggcctaaagtaactgaagatccacaaaagaagtacaaacagccttaactgatgacattcaaccactgtgatttgttcctgccccaccctaactgatcaatgtactttgtaatctcccccacccttaagaaggttctttgtaattctccccacccttgagaatgtactttgtgagatccacccctgcccaccagagaacaaccccctttgactaattttccattaccttcccaaatcctataaaacagccccacccctatctcccttcgctgactcttttcggacttagcccacctgcacccatgtgaaataaacagctttattgctcacataaagcctgtttggtggtctcttcacacggacgcgcatgaaactaacaatgtattggggagagaaacacacatctgcaaatatcattgctgaaaagaaatcattgcattaagtgctatagttaaagcgtataaacccaacactgaacacaaaggagggaaggactgggtctgacctggagagcagcagaggagaaagtgcgaaatgaaaggtacccagcaacagacaaagggtcacacttggccccagacatagtgcttcttcctcaagtgcgaagggagtattgcaaacaccagatatgcagtgttatctgtatttggaaattgtttatattcaggccattcacttcattcagtctggcaatttcattcaattaatctcattcatttcttaattaatctcattcattattctctgtaaactccacgagagcggagactttgtgtcttcttcatcggtagatcccccatgcctactggcactagtagttgccctaaattcacttatcaaaggcagcaagaataactgggactcttctctcttgcttttcacgatttccagcagggcacaaaggcctacagtccccacctgaaaaaaacagacttgactggaggcagcgcctcttcttccaaatacagccccagctgacgcagattagcacaaccgcctaagcggcggaactctggagagtgcggaacctaggatcctaggaaactgaaggcaacggaacctgggggcgatggaatccgggagcggtggaacccggagcctgtagaacttgaatctagaggaacctgacagcggcgccgagggggccacccggactctgtttggaacggaagcacagtgtccgccgcttcctggttgcgggtcagcgcccaggtcctgggctggccgccgggatgttgccctacacagtgaacttcaaggtgtcggcgcgcaccctcacgggggccctcaacgcccacaacaaggcggcggtggactggtgaggacgccgagcttccaggtcgccaggatcggccaggaatgtgtgagggggaagggggaaggacaagaggtttcaccccctggttagtttggcctcgctaaggcagggagccgccctcacgcaatgagcttgctttcagttggtggatttttgttgttacaaaagtgataatagccccgtgtgggaaattcccccatgcaaatacatttcccctctttctcgcgtatttctctgctgttttctctgcacctcgcccttttgccgttccattcctctctcttttcctctcctccagcttccaggcttctctctctccaccattaattccctgtgcactttctctttcccatcctgtcttttctttttcgttgtcttgtattcctgttgtctttcaacaatgtgccagaccctgtgctaggcgcctgttctttcacctgtccttttcacctcttttcgggctcctcctgtgtagaacattcctgccttcaacaggtcgtctttattactctctcctttcactataaattactactgcagctctgaaaactactcattagacaaatgtaaagcaaaattctgtggctgtgggatgttgttaggaggactgaaacgtcttgtgcagtgtttgtcgttttatttagttggaaggactaggattagtcgcagtatccccaggcacattgtggatactaaggattagaaatcggataagcgaaagacgtatgcctacaagaacagtcagagggcacaagttcctttttatgtcctcgggtctctattttcatatcttttagaactttttttatccgaatgaaaagtgaatttcaacaagcattttaagcttagccagatcttttatttaagtgggataatgataaatactggcctttgggtttaaatgattttattaatggtggtacatatgaattagacttatc

SEQ ID NO: 4915 - DNA, 6000 bp, Homo sapiens
ttttgagacgaagtctcactctgttgcccaggctggagtgctgcagtgaggcgatctcggctcactgcaacctccgcctcccaggttcaaacgattctcttgcttcagcctcctgagtagctgggattacaggtgcccgccaccacacccagctaatttttatatttttagtagagatggggtttcatcatattggccaggctggtcttgaactcctgaccttgtgatccgcctgcatctcgctctcaaagtgctggaattacaggcgtgagccactgtgccctgtctggtaaggggaaggggtctgagggtacaattcccccaggccaaggagcttgtgaagcccaagatggacttgttcccagatcctctctcccagctttgtttgcaaggagtcttcaccttctagaatgctccctacttcagtgctgcaattagcaacccaagtgtggccctggatgatcatcttgattcagaaaatcttgtttttcaagttttcacaccacattggagcaagagtccgtatgtttggatgacagcaagcatcctgtgctctgcaattttagggtttaccaccatcccaggcctgccacatgtggtcagggtaattaatgtatgacctaactagggtgtagatgcagctggaacccaccagacccccagagatcatagggttgctggggacctttagaactccagtggctttcagcaactttagatcctgtccaacccagatgttcagtgttgggctcccttccttgtctgataatcctaaggcaggaaagacctagttctgctctctacaagtcttggaggcaagcatctccccggatgcccagttttttgttttttgttttttgttttttttcctgtgtgggcctggaatttgggctggttgctgactttttcagaaatcctattcttccaccttggtaagcataaaatgtggacaatctttcgtggcaccttcctgaaggaggattgttctgccccagccctgggatgcaagaattagctccagaaggagactccagtcacctgattggtaatctgggaaggtcacttaatctgtgcctgcttggggtgattactgagaatcatgcttcccctcacttggtcattgccagttgtgaggcagggtcagaaagccagctccgactcttcacccacagaagcaactccactgactcgctgcctggagttcttgtgccatttttacactaaaaaatagggaaaagccgtttttaactctctgctacccagtttctggaggggacacaaaaagaacaaagccgggttcagagagtgttcagttcatgtttaattcttgttctatcttggttctgatttctggttagaacagaggtttgcttctggaggtactccttctgcttggcttctgatgctggctctgtccataaaggggactgtggcattcatcattcaacacatacttctgttgtaggcactaaggatacaagcaggaacaaaacataaaatccctggccacgtggaggttacagtttagagggatatgcagaaaaaaaaatatatatgcacatatataatatgtacaaaagtgaccattgctaaggggaaaaagataatgcaggaaatgctgcagacatcaaatattagagaggtgactagcattcaggagctttctgcgtgcctctgtacgctgctttttgtgttgtcagaggggctgacgtctgtctggaagccccagagcccagcactaagcatatggaaggggcccaagagctatttttgaatgaaacatcaacgtacttcacacgtgcaaagcatgatgataatgatgacagtgatactttaaaggtaaactgcaggctggggcagtggctcacacctgtaatcccagaactttgggaggctgaggaggggggtagatcacttgaggtcaggagttcgagatcagcctgaccaacatggagaaaccctgactctactaaaaatacaaaaattagcctgtcatggtggcaggcacctgtaatcccagctacttgggaggctgaggcaggagaatcacttgaattcagaggcagcggttgcagtgagctgggattgtgccaccacactccagcctgggcgacagagcgagactctgtcccttccggcagaaaaaaaaaaaaaagtaaacagctaaactatagatccttgaattcagactcctcctttttcttcagatgaaaagtagccatggaatattccagcattcctcagtgccttcagtgagtcctgagtgttcttggtttgctcccagactgtaatttccctgtactattttttttttaaatagcactgaaagcactgttatgtaataaacctctgcatccaaaaaaaaagaggctggaagaaaagcagagagctttttttttttgtctctgtatttattggctgatcgggagctatgaagttctggttatactgcaacctcaaagcagtcctgggattatcttgttgtgtgtccttgggcaaactgagttacttttctggctttctttactgtatgtaaatatggctctcaatgataaacagttttggggacttgttatgcaaaaagaacaaaggagcaatttttttttcttgagtcccgttctgtcccccaggctggagtagagtggcacgatctcagctcactgcaacctccatcacgtgggttcagttgattctcctgcctcagcctcccgagtagctgggactacaggtgcccaccaccatgcctggctaagtagagggggtttcaccatgttggccaggctggtctcaaactcctgacctcaagtgatccgcccaccttggcctcccaaagtgctgggattacaagcaggagccatcacattggccaaaggaacaatttcaaaccactcatcaatgatgtcaaacaacatttaggagagagatccggcgggtccagcctggagagggtgagaggctcttggcctaagtgttctattctcaggaccagtattttcagatcaaataaaagatgtgaatttgactttgaatttcaaataaacaaatttcccatctggaatcttctaggattctagcactgacaagctagagactccttccagaccttctagccagggaaggcaaactcaaatgcctacagggataagacaggtgacacctagatttttatttttaaatgttaaccacacattcagttaaatcaacaaaaacccactgtgtggaccaaaggaaacaatctgctctggctactttataaactatagtgaggccaaaccctttcaaccattatacagatgaggaccccaaaagggacagatgtcagcaaggctgcatagctaaggtttctcaaaagataaccaaaatatcacgttggatgaaaggcaattgaaaatgctaagtctcaaagaggcagtcagagagccgttctatgcagtttgcaagatgttttcacctccatcaatttatcagactctgagaacattctgcaaggcaggcagggtggatgacactcatttacagtcgaggtcactgagggtcagaagggcaaagtgtcactctctgcataaagtcacataggtaagtctacacaggaaaatctagggctgttcttcactacacctctgattcagataacaggtaggcttcctctaagattttaataaagacaaactcaaaatcctgtatgatgccccatgaagagaaacaagtcaggaggccaggctgagcccccagacttctaacccagttcgcaaataaagaaagtggcaaagtagatagattccagcctgtcaccagggttgtgtcttctgtcctagcagctgtacagcttgtcttaccactggacatttgtttcatgtacattttcacataggaaggatattctaaaagatgttgataaagattttttaaagggtttgaaggggataggatgtgatctaaggttgtgcaaggagaggaaaggaagaagcacacaaaaagaacaaatatttattaagagcctagagtggcatgcgctgtgaaaggcgtggcatgtaattctttcccagttctttgcctgtctgaatatttctcattcttcaggtttcagctcagatatcacatcctcagagaacttgccttgccactctctctgaagagcctccccccgtccccgccaccgctactgtctcttgaactttctcagtctggccattctattaaaatctggaacgattttgctagtttgcggacgagtttcccccaagctgcaggctccataagggcagtgacagtgtctctttctcagatgaatgccgggttgcctatcgcgtacttggcacacagttaagtgctcgagaaattgctaaacactcaacgaatatttaccagaatacatatttatgctccaccgttgctgaaagaatttcgactaacccttctttaagtctctcttaccctcctgtactattaacaccattgtaagtaggcagtggagctacatttgcagggagagagaagagcgaaaaattggcgcgcagagctgtaaagcgtttttctccaggtcacaccgcagcctgtaaatttgtgacacttggaccgattatgggacagcttgcaaacaaattatctgcaaactaacgaagcctatttttaaagatccctgttcctcgcagctctaggcgatgacatcagagaacccggagttctacctccgagccaagcccagtggtggtcaaaaactacgaataccaggaagcaccgcggcgcggcggcccagagctccgcgcgcaggcctccccggcgcgccgaggccgccgccgctggaaccaggaagacgccagaaactcggcccgccacgccgcagggacccgcgcggggcctgccgggactcgtagtctctgcgggctgggagcgcccgctccggaatctcagccgccgtctgagggctgaggcagcgtggggacgcgtgcgcagtgcgcgggctggccgtcgcggacgccgctccgggcagccgagcctctgtgggagccggggccgcggcggcgcgggtgctccgggccgaggccgcggtaaagtttagcttgaagaacgcggccgcgctggagcaggggtggtggacggggccaggcgcgaggtggcggcggctgcggggctgccgggctgctggagcgcggttcccgctgtggcgagcggggaggcgtccgcagaggggcggtgggtgctggtgagtgcggagccggcgccccctctgcgcacgtccgcgccacgcgccacagcacctggaggccgccgggccggctcacctgccctggcttggggcagcgggagggggcggcgtcttcttcccgtgggtccccgattgttttcccgacgtcagccctcagcggcgcccggcgggggagggcgggaggcccgcggcggtcgcggggccgacgagctcctcggcgtctccgccccccgagaaatcccgctcggggcgcggtgcgcgcagctgcccggggattcccggtggcgccggtcggagcgcctccctccagggctgtgcccgcggggcgcgcgtccccgggcatcctttcctggtgtttaatgcattttggcttcaggacttgccgaggccgaagccggctccgccctgggccctgaagtcgggcggtgtccgcgatttacctccgcaccttcggggcaggtggccagaggcagcgttgaaagcgacttgcccaaggtcacgcaggtggcaccggggaggcgaccagacccaggtctttcgacgccgaggccagctgccaaccgcagagctttggggccgtcttgagtggtttgtggtttgtttcagatgctttctattgacctcctggaaagaggggaaagtgtgtcataatgaaagcggtcctgttgcttatagtgtttaccgcctttggtagaattctggtgaggctgtgcccccgcgcagagcatctaccgtggtctgggcgtataaataatgaaactcctttgctctctgggggcagtacaagaagaggt

SEQ ID NO: 4916 - DNA, 6000 bp, Homo sapiens
aaaaatctaattttctacatgggaaatcaaacaagagactgggaggaacttccaaaccatcaaacatgaaaacaactactatttatttgatagacaaagagtccttaaaatctgagaggaaatatgtaaaatcccaatatgaaaagggaaggaattgtttcattaaaaaagaaattcaaataaataatcagtagatgaaaagatgctctacttctttattgaccagagaaatgcaaattaaagtaatgacatatgaattttcagttatcggtgactggcagtatctagtgttggagcagatgtgtagaaattggctctcccatcctactgtggggggttttaagtgtttcaaccttttgaggaagcagttttatatacctattaacattgtaaatccacatatccagtgacctaaccgtcccactcccacaaaactgacttacagagataggtgcatgtctgaacaaagatacatctacagggcaccattgtggcaccttttgtaacataaatagttggggaaaccatttgaattgttcatcaactcaaaatagacaaattgtgaaatacaaaatgtagtatgtgtgtgtatgtttatataaattgtttttgaagtttggaagaatacacagaatacttacaaccatagtatggtacacactattgattagtaatcaatcccattcctaattcccttaatattttgacacattcacttaaaaggtctttccactttccagcccctcttgcacagaggagtggtgacattctaaccaagaatttaaaaaatctcagattttctggaagtttcttggaaagctctcattttcctgataaataggatagacaagagaagcacttctagaatggcaggataagaagctctgaaaatctgttcctccagaactgcaatgtgaacaccagctaaagtgttgaaaaatgaatggagcctcagagacctttgggacatcatcaagggtatctaacaggtacaatgggaatcacagaaagagagaaaataaggggacaaaaatactatttgaagaaataatgggtgtaaattccccaaatttgatgaaaaagatccatctacatatccaaaagcttaataaatgaatattcatttattgtcatttattcatttattctcaaaatagaataaatgaaaggagagccatacctgcacacactgtagtcaaacaatcaaagggaaactgggagtcctggaagcagcaagagtgagatgagtcgtcaggtaaatcagccctcgataaaatagcaggaacctgttcacccaaaactgaaatgagtcgtcaggtaaatcagcccttgataaaacagcaggaacctgttcacccaaaaccaaaatgagttgtcaggtaaatcagaccttgataaaatagcagcgcctgttcacccgaaaccgaaatgagtcatcaggtaaatcagccctggataaaatagcaggaacctgttccgccgaaaccaaatgagtcgtcaggtaaatcagcccttgataaaataacagcacttgttgaccagaagccatgggaccagcaggcagtgagatgacacagtcagggcactgaagaaaaacactgctaaccaagaattctatatccagaaaacattcttccaaaaagagagaagtattacagctctttagaatttgtctagcaggttttctggtaccctcccccattaatttattaattaaaatttaaaatatgtcagccttttggctaagatcaaatgtcaaaaagaaagagaaattaagacattcttggataaacaacaccgagagaattcacaagcctgtcataagaaatactaaaggaagtctcttgggtcaaagtcaaagaacactagtaactcaaatgcacattatacacagaattaaagtaagtgccaaaaagtattttagtaggtacaaaattaaaactgcaaataataaaaagagaattagcagaatctttccttctcaatggggtttaaaatatggaagctgcctttgtagggtgaatttgggactcgcagtttccacttcacccacttttgtgttgtttgcattcgttaaaaggagatattttacttccccaattaaaattatctttctaatctttataaacaattatttaattccagtaaatcttctctatattgctttactagtgagttctattaaaattttgaagcacagaaaattcccctacagtataaagtatccccagtcacagagaagacaggggttttgcaatgatttctagaatagtgcaatttttatgcaagaacctaatataacacaaaaattatagcccgattttatttgtgggtatagatgcaaaattactaaaaatactattaacaagttgaatccttagggtgttaaaagagtatcactccatgaacgagttggttgtgatgtggaactatgaggtacttttatgatacaatataaaaatttatggtaattttatggtacattgtgagacagtgttttcttctagcatcatactagcaggtctatggagaaaaatcacaggattgtctcaatcaaaaaaagatttcattaacccaactctcatccctgataaacactgttagttatctagagaaagaagaaaattgtcccaatacagtcacctctttgccacacccagccaacagcagacgtgatggaagcctgaagaacaccctgccacgggcacaggcagaggcacaggcaccctgtcgtcctgattatttcaccttgtcacgggcagaggcacaggcaccctgtcgtcctgattatttcaccttgtcacggacagaggcacaggcaccctgtcgtcctgattatttcaccttgtcacaggcacaggcaccctgtcgtcctgattatttcaccttgtcacaggcacaggcactctgtcgtcctgattatttcaccttgtcacgggcagaggcacaggcactctgtcatcctgattatttcaccttgtcctagagtgtcctgccaatgggacagatgcaaaacaaataaaagccccggcttctgaaaagaagcacacagaaatgtcattattttcaaacgaggtgttcccgtatataaaatttgatgttggttgggcatctaacagtattatggccagaggactcagaccacagctgcatccctgtgaggcacagactctccagggcacgcgggtcccgcctgggatgtgcacactcaggtgagctgcacagacaaggtgtcctcagcccaggggagccagaggcctgctctgcctctccaccctgatgcttcctgttctcaccccaccaaagccaaggcttcaatttcagtctgtggggagctgactctgctgctctcaagcactagaagaaggaaccagtaatcgaggaaacttgtggaccccaatgggtgtctgtcccggccaggcctggctgggcccacacaggacaacagggttcaggggtctggacagctgtttctgcccagggaattgtccctgccacctcacactggccactggaaaggaaagagaggaggaggcggcaggctaacccacccgtgagccagtcgagtctacattgtcagttctcacctcgaggggtgccaaaaaccagagggaagcaaaggcccctgaagcctctgccagaggccaacgccccttcttggttcaggagaggtgcagtgttaggtgcagcacaaccaatgacttgcttatgtggctaataaattgtcaagagaaaaactgggttagaatgcaatatatagtatgtagtctcatttttgtataaatacaagtatagaatggcataactcaaaatccacaagtgatttggctggattgtaaatgacttttattttcttcatttctcatcatattttctattatacataaagattcattgttaatataaaagtacaaaattgcaacctatgaattaagaacttctatatattgccagttagaagacagaatgaaaaacattctcttcattctaaccacacacacaaaaaagctccacaaaatacctatggactaccttcatagaaggtggaagagggtctgtatgaagaaaataattaatacatgaaagaagaagctagtcaatgtggagctctattgtgtcccgggatcaacaaagacaagatatctttaaaatcgtcttctaaatttaccctaatgtaaaacaaatccaataaaactctaatgtaattttttaagaatttaaatttggaataattccaaagaacaatttttcttaattttctacagccagaatatatacctttaaaaaaaatgaaaacagagattaactttctcagaattggttgactcactctttccttttatttttcttccatggaattttccagttaacttgagaaagtggaatcgaattccgatgttgaattttccttctggccccattcatgtggcaggtggtgattcaggtactactgggggctgctcagacaaacctcctcatcagacatcaagaggctgttgcaccaggagggccggtaccgtgtctagaggtggtcggcatggggttggagttgtattacataaaccctactccaaacaaatgcatggggatgtggctggagttccccgttgtctaaccagtgccaaagggcaggacggtacctcaccccacgttcttaactatgggttggcaacatgttcctggatgtgtttgctggcacagtgacaggtgctagcaaccagggtgttgacacagtccaactccatcctcaccaggtcactggctggaacccctgggggccaccattgcgggaatcagcctttgaaacgatggccaacagcagctaataataaaccagtaatttgggatagacgagtagcaagagggcattggttggtgggtcaccctccttctcagaacacattataaaaaccttccgtttccacaggattgtctcccgggctggcagcagggccccagcggcaccatgtctgccctcggagtcaccgtggccctgctggtgtgggcggccttcctcctgctggtgtccatgtggaggcaggtgcacagcagctggaatctgcccccaggccctttcccgcttcccatcatcgggaacctcttccagttggaattgaagaatattcccaagtccttcacccgggtaagagaaatagtgttgattttagggagaataactcagcaattggatctggtatgtgtgtattcaactcatttgcagacaaattgtggttgttcaataccagcctgttgtgaattacctgaattgatagcatcctggagcgacactcaaaatgtgtcgcctgtggtgcagctggagcccggagcctgcgtgccaggccccggaggcccccgccggtgccttgtcctggggctgatgatggggaggccggcgaggccgggctgctgcgacgccaggataaccgggctggcggccagatgcgcactcgctgggcgtccgcctgtgtttgccaaagcacgagttgaaacgtgaagtgttgggccagcccgtgtggcaccaatacctgccgcctacgactgttgtgaacactgaatgggccaacaaacctaaacgttaaatgaactgataacgccgtcagcacggagcaggcgctgggtgtttgcgctcttgcgcgtgcgctctgtggggcgcaggctgacggcgggcgggggtcgcctgctccagctcgggctcccgcgccagaaccgggtccagaaccttgattccggaagcgggcaacggggtggttggtgggcgcgcctgagggaagggacgtgaggagccggagtccgcggagttgccgcggagttgtccgcggagtccaggcgggtggggagcagagcagctggaaccccccgagcgccctgcagacgcagcagcctcttgaggggagggtctcccccacctcgggctggacaaagacagcttttccccacgtccctctgggttctctagagcaacagcaatacccgcccggcaggggtgtggcttagagcccc

SEQ ID NO: 4917 - DNA, 6000 bp, Homo sapiens
caattgaactcatgaagatagtagaaggatggttaccagaggctgggaagggtagtgagaaggtggggaggaagtcgggagtgttaatgggtacaaaaaaatagaaagaataagtatgacctagtatttggtagcacaacagggtgactgtagtcaataataatatagttgcatattttaaaataactaaaagagtataattggattctttgtaacacaaaggataaaggcctgaggggatgaataccccatttaccattatatgactgttatgcattgtatgcctgtatcaaaatatctcatgtaccccatacatgtatacacctatttacccacaaaaattaaaaattaaattaaaaaatcctgctctctttggggaaggtctagtttagatggtaactaggtcatagtattaatatttaacatatgtattgcattgtcattgtgattctgatttttcattattttctctctgacacttcacataaaatgttctgttctttcttctttctgacagatgaaaatagatgtttaaaagcaaatgccaaatcatgtggagaatgtatacaagcagggccaaattgtgggtggtgcacaaattcagtaagtaaggttgctcaagtcctttccatttgttctctggtcatttagtgtggctcagtgctgtatccttcagaagcacatattaatttttatgtaaatcataaaatgaataacctaatggtttggagctatgtggttcaacacagtagccactaggcagatgtggctattgagcacttttgtacaaattagaattgctctaagtttcaaagatatacaagatttcaaagacttagtattaaataaataataatggtgaaatgataatttttgtatatttaaaaataatgttataacagtgttaaaattttctctttttctttttttagtgtggctactaaacaattttaaaatacatatatttgtagctcatctttgtggcacatattagatttttatgggagaaccttcaaaaaaatcctagtcatttagtttgactgtttcagatttccccttttttgatggggaggtataaattaaccttcttaattatatttgagttaaactactggaattgatttgcatcccaatataagcttattgaggttaattagggtttggattttattcacttttgtcatctctatacttttgctaatatggtaccttccacaaagcctactaaatgttcagtgagtcaatgaatgaatgaatgaatatatcaaaagagaaggtaaggagaagtcattttgaggttgtatagtttattcacagaatgaataactaatatcagaagatcaaggggttactgattttgttttcatgcaggcatttgggcccaagtttcaagtgcctatttttgtatgcctaagtggtcaagtgtcagatatgtcgtatggtttgaccacatgaaagaaaaaatgagaggttttgttgtttttcaaaaattttctaatggtgttttctaaaagtggtgtgttgggattacattggcaacagtggaggaaatatggagtgttgtgagtttgtctcaggcaaggcttatgtaactgaagctcttggttttcatatctgaaaatgaggatgataatatccgctttatctattgttacaataattagaattgatgaacttaaagcagtttcacttaaaaacttctaaataagtggtagctgctattattgttaacatatccattttatggggactacagtttatctgtagttaaggattatcttagcctttgagctttggagcataatccttaaaattttaaaggctttctgaatatattcagtgaaattgtatttgggtgtcatgattgtaaatttcgtggattgattagtatttagaaatgtgtaattcactaggatcttgtgctttggtaggtagtagtttaggtttaataaatagtgcagctttgaattatctgattcttggtattcccttccagttgttgattacataaatactctcattagtatgatgtttctcttaaaaaatcttatgtaaaaactattgtgtattctttaaatttaaatatcttcacttactgttactttatacagcaccgttaaattgatatttgataaataaataccatatataatgtcactgtttcccccacattttcacatttcttgaaacacctttattcacagtctttatatagatctttaacagcagtgtttttgaattcactaaggcacttttcagttatatgattaaatttttatttctaagttgtttgatgtataccacatttaaaatctctgtcattactagaaattttactactgcaaatatccattcacctgccattaagaactttttttccttttttgaaatttacctgccattaggaccttttacccttgtcatatacttactccttttacccttgtcatatacttactattttgctttttaaaagttttttaaaaacttatttacaataatagctaatacttaaagttttttcaaacctgtgggaatacttatttaatcggtgctaaatttcgtgttgtccttttaaaaaatgcaataattaattgagatgtttttaagctcgtctgttttccctaaacatcgggttgttcagcatattgcgatggggagagtgccacataatatgagacgctttgtaaggacttttcaaagggaaattttggagaaatgatctgatatttgggtgtatgtatacattattagtagccattaaccatgctcaattagtgatttcactaaagaaattgcttttgattagatactctgaattacaagatagagcatttactgtgtacacttgggtcagttctgggaaaggtattactttcttggaaatgattgttttttaacaagaacacttaccacagtttggatgaagggagcattttgtttaaaagccagaattggggtacattagatgtgatttgatgttttgcaatttaattgcttatttgcaattattatgtaaaaaggtttgaccattacaattttcatttatacctatattttatatgtcatttagacatttttacaggaaggaatgcctacttctgcacgatgtgatgatttagaagccttaaaaaagaagggttgccctccagatgacatagaaaatcccagaggctccaaagatataaagaaaaataaaaatgtaaccaaccgtagcaaaggaacagcagagaagctcaagccagaggatattactcagatccaaccacagcagttggttttgcgattaagatcaggtatggaagcccaactctgtgaatacctgcgtgtttacttgaggcattcgacaccagctttatgcaaactctgaccagtttctgttgaaggctcgtttttacatgtggactggcactcaaaaatgtggaattgtttaaattttagaaaatttttgcagatataacaattgtaagacatatttacttggaataatattaaatgttgcctaatattcaaagtaaattttgttaaagattcagaaagtattaattagctttagtgagttttaaaaatgaaagtgttcatcctctggtctaattacataatatattataaaagcaacattttaacctgttcttttcctttgtatttgtttagtattattaaactgttaaggtttttgtaattatgtctgttagtcccacatctaaacatgaaggaaaaaacaagccctcatcctcgcttttctggtttccgacctttcttgtcaggagaatggtagagtggccctgtcccctgacttccctcccggcccctcctcaaccaggtcagccctctcctcctcatcctgctctagcaaagctccaccatcgccttcagcccgcagacccaggggacccttgtcaggattttttttaactcttctgtaccaagtaacactttgtactttttgaaatgctctgtccttgatcaatgataccactcctcggtttttctttgtgtctcttaccattgccttccaggcctctttttgtgtcttttttcttcctccctttttgcagtccacctaaatgtcagttttcctctcgtggctttaaaacccaattgtatgctgcagcaacacagacttttcttgagctccaaacccatttctccaattgcctattagaaatctatatagagaaaactacaagttaaaattttaattacattttcatccaaacctctctcctgtatttcctaagtaaattacattaacgtctcttgtatctctctcttctcctccttcatcatctctctctgggtttcttttgtagattagctagtctctttgcctcataatgataataaaaataaaataataaataataaataataataaataaataattatttttaaagctgtctgccaggctttctaaagtaaagatcggatcatgttattcacttgcagggagtggcatcccactacacacagaacagagttcacaacttcagtgtctaaaaagtcagttgtaccctatcacgtgttctgccttgccctctccagactaatttatggtgttctatttgttttcttctcttataaactgactttttgtctgttttgtccactgtggattgggaatatcttttttatctttgcatcctgaaggcctggtgtttaaagtatttgttgaatgaaactgaatacatacccattgagttacttatggaattcccaggtttttgtaaaaattatgacaacatgttttattttattgtgtttaccgtgtaaaccacatttatttggtttttctcgtttgcgtttgattgccaacaggcaagtttcattttctaatctcttgtctaattaggggagccacagacatttacattaaaattcaagagagctgaagactatcccattgacctctactaccttatggacctgtcttactcaatgaaagacgatttggagaatgtaaaaagtcttggaacagatctgatgaatgaaatgaggaggattacttcggacttcagaattggtaggaatgttgggaacattgaccattttcattataaagtcttggcaattctcaaatgttgttttatattttattcctttgttactcacaacatacttgtgagataaacaagccagttttttagccttttctgagtggaagttgatattccagtcacacgtttaataatcttttctgccaccttgttcctctgtcactggatgctactgtttgacacagattgtacctcatagataatgacttgcatgcttattttcatactaacttgatcatttatcttatgacttactttattttatttttaagagtttcactcttgtcgcccagactggagtgcagtggtgtgatctcggctcactgcaacctccgcttcccgggttcaagtgattttcctgccacagcctcccgagtagctgggattacaggcatctgccaccacccccaactaattttttgtatttttagtagagatgggggtttcaccatgttggccaggctggtctcgaactcctgacctcaggtaatccagctgccttggcctcccagagtattgggactacaggcgtgagccaccatgcctggcccttatgacttattttataaacatgtgttgaatacccagattttatctaattgctaattagtatgtctgcacctgcccgtacagcctgatctcatcttagacctggatttttcatatgatgatgatctgctttccaaaccttatttttcccatttcatgcatccccagcttaacctcttttttgcctgcttctctccactcctgttgctctagaggtttagcaacagaatattagaaagatttgacagttatgaggcctaagagctgcctttcaaaaattagccctattttagtggaaacatttaaaaatagcacttgcttaaaatgttcttttattctgtaagcataattcaaggaccatggcattagggagctcctatcaaattagtgttt

SEQ ID NO: 4918 - DNA, 6000 bp, Homo sapiens
ctcatttgcaaaatagaaataatacctacctcatagggctataaagaggattcagtgattaaatgtggataaacatcacgtggctggtagatgctcagtgaggggtagctgctgctgctattgatgaaggctgaaagtccttgggcttccttctgctctggaattgtgtctgtgtttctgcacagtctctgtgggattctacaccttgtgttttcatctcagaacaactttatgactctaagttctggcagaggtaacttaagggaaactcatacaagtaactcacttttttttgggctcagtgttttacttgataaatgagactggtcccttaattactttgtaggaatgatgtgttttacttgataaatgagactgatcccttggttactttgtaggaatgatgtaaggctgcgggactaatcatggtggaaacatttccagagagtggataattttcctcctttttctgttacttgccattggctatttatgtatgtatgtgtgtatttgataattccacctttggctatataagatatatataagatatggtaatcttattaaaagctaagtcttggtatgacatttatggacacctttggggtaccaagattgctttgtttctccatcaaaagagcctgttcagttcatatacactatgtatgtgatcatgtgtgtgcgcacacacaaatgagattgtccgtaaagtagtgaatgaaacattccacaaggaaagatcattctctatgttatagtcacatgttttatttatagctgctgtgatagccattccctgtgataattagtaaccaactttgagagaaagatgagagggactgaaggttaaaactacattgtgtcaggtggaaacatccctattcttggacagtcagaaggttccttattatttgccatcctttcttcagagtattgttcactggactcctctttattttatctgagatttttcttgattatcaccagcattcagtgaggtatagaatcgattatgcagagagttaaaaaaatttttcttgacttgactttttctatatgtgatcttaggaagacccagagaggtaacatcttgacatttacaaagaaaatggaatgaatctagctaaattttttgagtgcttttcctgctgaaatttcatcttgctgcctgaaaaccttggcacatttacagttccctgctgttctggcaatgtcccagcatttattctttaatgggtttatatgccttcagtacttcatttttcaggggcaggtggggagaaactgtttagactggaagtcattagaatgtcatcataatacaaaaattatatatatccatcaatttatgttgctaaaatgcttgtcagtaattaaaacaaaaatatttgttgattttttttaatgtaggaaaaaatgactacattaaggtgggatattatgagcatagcatttttgttttgaggaattaagtttaaaagtgcacctctattattcctaagatatttacttttctagagggcatattcagtattctctttttataaagtcatgcccttgtaagtttattcttgaggtactcataagattaggaaaaatgattctctaggttgaaactgttttgattttaagcatatttctgctcaaaggggaacaatgttttgtacgtctggaaaattggatttggttattggactagtattataccattaaaatttttgatgctaattaaaattttatacatcttttcgtgtcgtaaggattcaggtatattttcacaaaattgaatgatttttctcttatcctgtaaagaattgtattgtaactattctaaaatgcattatcaatattttaaaatgtaatattgttatttcctattataaaagaaatgtcattgcaaaaataagtggaaatagtgttgctttgtcactttggttttttgtattttaatatttaataaagggaaactttgaaatacatacaaaaatagggacaatactatatatagtgagtccccatgtactaacacccagtgtcagtaattatcaactcatggcctatcttgttttatttatattctcactttgtatcccccccttttattctgacatgaatcttagaccttatgtcatttcaagtgtaaatatttcagtatatgtctctccctgaaagataaatgtaatttcttaatatgatggaataattcagttaatgttcagatttaccacacttgcaatgacttctttttaaatatagtttgtttgctttgagatcaattaagattcatgaattgcttggctgaaatgtctcttaaggctcttttagtctatagatattctctctctcacttgcagtttatttttaaaacttaaacaatttctgtagaattttccagactctggattttgctgattatattgctgaagtgtcatttaaagtttcttcaagtggtagttagatctgtaggcttgatcatactcaagaatacttgtccaagaatgtttaacaggtggtttgtaagcttttatcaggaaagcacataatttctggttctatttctttgtgaagttagcagccattgatagttattgcctagctcaaataattcattagtggttataatattctaattctgttgttccttttatatttgttagctggaatacttccataaggataaccttcctttcatcaaccagttggtagccttggggtatagttcatacataggagaaacaggagagatgcttgattcttgcctttcattcaccagtttagtgaataaaagattcactaaaagattcgttcaaggatgactaggcatttgtgtgtgcacttaatattactaattaatggaaggttttcttttaagctttcaataatattgggctacatcataaattcctgaggccaatggagatttcttctctgacagttcaataaccaactgcattgtcctaaagagcccttagtaggttggtacaaaagtaattgtaaagctgcaaatacttttgcaccaacctatatttgcaataaagaaccatctagttcattcattcattcaacaaatatttaccaagtatcttatatgccaggcactcttttagacacaggagataaatattttacttaacaaaacaaacatccctgatttctggtgttttaagctctggttgaggctaattgttaaaaaacaacatttcaaaacttctgacccacttacctctctgtcctgtctattcccgcaaatatgtcatccctactaccaactacacagcttctacaacttaaaaataaaaaagaagctgtcagaaaatgcctcttctctagagcttcaactgctattgggacatggttccctgtccttccttaagagaattttcagtcacttctaactatttatctattggattttgggaagatatattgatttttactttaatgacctagaatagtatatcttcaaatcaaagaaggcatgttttttgatttaacaaccttttgccattatcaaattattcttgctttataagagatgtattttaattctgtagttactgattatacaagaaataattgctacttgattagacttggcgtatgatggtcagactcagtgtattatggtatcaggtgatttgcaaagcaaatgatacagttttagtaagttcagagagaatactaacataaggatattttctttaaaaaagaataactttccagagcatagagtatttagtgtttttaaatgatggatactgctctgtatgtatttgtttcaaaacatcttattttatctttgcaggagcgattggttacatgggaacaagtgcctttgtccgaaaaatctatactaatgtgaaaattgactagagacccaagaaaacctggaactttggatcaatttctttttcataggggtggaacttgcacagcaaaaacaaacaaacgcaagaagagatttgggctttaacacactgggtactttgtgggtctctctttcgtcggtggcttaaagtaacatctatttccattgatcctaggttcttcctgactgctttctccaactgttcacagcaaatgcttggattttatgcagtaggcattactacagtacatggctaatcttcccaaaaactagctcattaaagatgaaatagaccagctctcttcagtgaagaggacaaatagtttatttaaagcatttgttccaataaaataaatagagggaaacttggatgctaaaattacatgaataggaatcttcctggcacttagtgtttctatgttattgaaaaatgatgttccagaaagattacttttttcctcttatttttactgccattgtcgacctattgtgggacatttttatatattgaatctgggttcttttttgactttttttttttcccaatccaacagcatccttttttttaaaagagagaattagaaaatattaaatcctgcatgtaatatatctgctgtcatcttagttggaccaacttcccatttatttatcttaaaactatacagttacatcttaattccatccaaagaagatacagtttgaagacagaagtgtactctctacaatgcaatttactgtacagttagaaagcaaagtgttaaatggagaagatacttgtttttattaaacattttgagatttagataaactacattttaactgaatgtctaaagtgattatcttttttccccccaagttagtcttaaatcttttgggtttgaatgaaggttttacataagaaattattaaaaacaaggggggtgggtaataaatgtatataacattaaataatgtaacgtaggtgtagattcccaaatgcatttggatgtacagatcgactacagagtacttttttcttatgatgattggtgtagaaatgtgtgatttgggtgggcttttacatcttgcctaccattgcatgaaacattggggtttcttcaaaatgtgtgtgtcatacttcttttgggaggggggttgttttcttctgtttattttctgagactcctacaggagccaaatttgtaatttagagacacttaattttgttaatcctgtctgggacacttaagtaacatctaaagcattattgctttagaatgttcaaataaaatttcctgaccaaattgttttgtggaaatagatgtgtttgcaatttgaagatatctttctgtccagaaggcaaaattaccgaatgccatttttaaaagtatgctataaactatgctactctcatacaggggacccgtattttaaaatctccagacttgcttacatctagattatccagcacaatcataaagtgaatgacaaaccctttgaatgaaattgtggcacaaaatctgttcaggttggtgtaccgtgtaaagtggggatggggtaaaagtggttaacgtactgttggatcaacaaataaaggttacagttttgtaagagaagtgatttgaatacatttttctggaactattcataatatgaagttttcctagaaccactgagtttctagtttaatagtttgctatgcaaatgaccacctaaaacaatactttatattgttatttttagaaagactcaaaacacctgtatttaaaccttaatatgaaaatcatgcaattaatagttacacaagatgttttcattacaaaatatgtacctatctattgatggactctacatcctatattgtgacatgtaagtcctttaaaaggtgaaaagtatgatttcttaccacttaagtatgattgatatgatccaacaaatttgatcagaagctgtaggtaaatcctcttctgaagccaaaatggtatattaaatataatttattggtacttccattttctcttccttcttacttgcctttaagatcttataaaaaagaaactaaaagttaatatttagttgcctatattatgtaaccttttaactatatataaagtacttttttggtttctttctcaccacttttattcaaaagt

SEQ ID NO: 4919 - DNA, 6000 bp, Homo sapiens
cccccaactaattttttgtatttttagtagagatgggggtttcaccatgttggccaggctggtctcgaactcctgacctcaggtaatccagctgccttggcctcccagagtattgggactacaggcgtgagccaccatgcctggcccttatgacttattttataaacatgtgttgaatacccagattttatctaattgctaattagtatgtctgcacctgcccgtacagcctgatctcatcttagacctggatttttcatatgatgatgatctgctttccaaaccttatttttcccatttcatgcatccccagcttaacctcttttttgcctgcttctctccactcctgttgctctagaggtttagcaacagaatattagaaagatttgacagttatgaggcctaagagctgcctttcaaaaattagccctattttagtggaaacatttaaaaatagcacttgcttaaaatgttcttttattctgtaagcataattcaaggaccatggcattagggagctcctatcaaattagtgttttttaaaatggccagaattctagaatatttgtttattcatttgttcagcatgtcattattgagagctggtgtgccaagaaaatgaatgtgagttatttttaaagtagggaggcaaaataaaaagattgtcttaggtcttagtccatttgtgctgctttaagaaaatactataaactgggtggcttatgaacaacagaaatttatttctcacagctctggaggtgagaagtccaagatccaggcagattgagcatctggtgaggtccctcttctgggttcatagatgataccttcttgcgatgtactcacatagcagcagggagacagcagctctctggggcttctttgatgaggtcactgtaggagtctattcttacgttgctataaagacatatctgacactgggtaatttatgaagaaaagaggtttaattggtttacggtcctgcaagctctacaggaagcatggcgctagcatcagcaaggcctctggggaggcctcaggaagcttccaatcgtggcagaaggcaaagtggggagcaggcttctcacatggtgggagcaggagcaagagttggggagagatgccacacaattttaaataacagatctcatgagaactcactcactgtggtcagaatagcaccaagccatgagggattgatctgcccccatgatcgaaataccttccaccaggccgtaccttcaacattggggatcacattttaacatgagacttgggcggggacagatacccaaactgtatcagttactaatcccattcatgagggctctgccctcatgatctaatcaccttccaaaggaaccacttcctaataccatcatgttgggaattaggttttcaatgtaggaattttggggtaacacagacattcagtccatagtaacctacatttggtaacatagatgaattttttaaacaatgcaaatctctgtctttccatctatccatccattcattcatttatgtaccatttttttcttggcaggatttggctcatttgtggaaaagactgtgatgccttacattagcacaacaccagctaagctcaggaacccttgcacaagtgaacagaactgcaccagcccatttagctacaaaaatgtgctcagtcttactaataaaggagaagtatttaatgaacttgttggaaaacagcgcatatctggaaatttggattctccagaaggtggtttcgatgccatcatgcaagttgcagtttgtggagtaagcgcattcatttcctatcaggggatattgtttctattatgtgtgtgaattttaagtgtgattttactatgataatagaaaaattgaccttaattttcatagatttgattatcttagagaagtaattttaagtaaacccttaaattgcctgtatacataaagtgcctttataaaagcatatttaatctttatgcaaaccacacagttagtttattcatgcgggcttttaaaagacagaatgctaaccatttgaaacagcggggcaacctctctgtactgtagctggtggtctggattttagaaaagcccatgtgtcctaactttctggctttgtactagagatagaattgatgttattatctgaggcatcaccaggaaccttgaaattgctcaaagggagagtgtcttgtatcattttcctttggtcagttttcttctcactgtctttgaaagacacatctttctcctgtgtcttagtaattcaaaaagagagaactttttaagctctagtttttaacctatatgaatagatgtattttgagaagtgatacaatatttgtaattttaattgtaagattttcagtagcaagcccatccctattggttcaataatttgtattttatgatccatgtagcagctatgtattttgagatgacactttaatgatgtggctgaggctgaaactagaagacattgtcatgtcaagtttgtcctgcgtacctactcttgtctcatttttgttccctccagtgcccccattctctagatgaccttctttgattttagaggcctcttagtggttatttttcagtcaatttttgctaaggtgctaattgatgcccaaaataataagtgaaggaatatggatagtaattaagaatttttctatcaccactgatgctgggcaatttactcagcctctccagggctgttttcttctctttaagaagggatcatgatagtatctacctcatagggctcttgtgaagttaaaatgcatcaatctctataaagtaccaatgagcattcagcaaatactaattcctatattgttattactttcgacttttcactagagtgtttgcaatttaaggttagtccctgctgttatagccgaagcaagtagcattccaggtagtacctagccttacacctcttttcttactagccattgatgtgtgagcctgttagcagctcgttgtggggagggcattctctgggctgcctctaactaggccttaacctgtggtattaaacaagccataacacccttgattgtggctgtttttctgtgttggtcatgctgatccactcctctagatgcaaaagaatcagacattccacttttgaaagattgccagtattaataaatgtgattcccaccttaaagtattttactgtcttatgaagatctaaacagacgtattaaataaattaacgaaagcaggtaaattcctatagtcctatgattttataattataaattaccatagtgacaagaagattttacagttactttagattctttattggaaagggcaaggataaagtaaatgagtgcataaacagtactgattgaggagttagaatgggtgaaattatccttaaacaagatacttatttctgttataaaaaaaggaagcctcatatggtgggctgataaagaaggtgcatggcatagaacatagagcagagatgggtggatggggacaagacagcagcagtggggtaaagtaaggataggctcagacactttcatttattcagcaaatgctcatcaagggcttactgcttgccaagcagtgtgctggcttgctagctgctggagatatgatgataagcagaactaaaccaaaccaaacaaaacaaaaaaacagtttttaaaaagaactgagagattgagagatacggatggtcaggcaagatatcgttgtacatgggatggaagagcttcattcagtgggctttgtgtgtttctcagcaagataattaccattgtataaagagaagacacagaaaatacagaattaggttaaaaatacaatggtggcctatatgaaaattaaaggatttttgttgaattactgtgaatagtgttttaaaattgaaatccttttcttttcaagtcactgattggctggaggaatgttacacggctgctggtgttttccacagatgccgggtttcactttgctggagatgggaaacttggtggcattgttttaccaaatgatggacaatgtcacctggaaaataatatgtacacaatgagccattattatgtaagtgcctggttccttacatagtgaatgtgtttatgttggattttaatgtttaatactaagagcttgtgggtgactggcttggggtttctcagggtttgaggttttgctgttttggtaagtaggggtcctgattgaaagtgcaggaaagctagtgttgctgtttgtgaagatgcagctttgtatttgcttccttctgctcagacaagggcctcactggggtgggaaagggatgcccagatgccactttcactctttgcctcaactccccgcccacagcatttggtagcacagtcagtactctttctaaataaataatttatctagtctcatactctttgttttatacgatttttaaaagcagtcactctgcctttattgaaaataaatattggcaaagcattcaagttctagaagaaatccaaatggtaaatcttggtctttttcttaagttgtagataatagaatatttaattactgactattctttaatttcattgtccttatatttaatatacatagataaacttactatttaaaaccttttgaatatggaattttttattcatacatgaaagtaaagagaagaggattagcaattcatgtatacacacgactcacttcagcagtttatatttgatactgttatttgaaagcagtcttgtaatctagttatatgtatgcaactagatgtaatctagctatatatggattatatatgtaatctagttatctaaagcagtcttgtaatcgagttatgtgtaatcttgcatgtataactagattgaaaaattagaagagattataagggtgtatttaaatactaaattatattacttgatttcttaggattatccttctattgctcaccttgtccagaaactgagtgaaaataatattcagacaatttttgcagttactgaagaatttcagcctgtttacaaggtaaatgtgtgagataaaaagaacaagattctaaacatttttgattgttagaggcaaatcatgtctgaattgaaatgtgggaaaatgccaccagataggcaaaccgaattttacaaaagtggtttatattaatttttaatcacatattataaaactggtttctaggtttgactcctaaagttagttaggaggaaacatgggaactggcatttaaagataaaagttgctcagtggatcctaattggttgaatgaatagcagttgtattttacgtgttttatcttttaattgcaggagctgaaaaacttgatccctaagtcagcagtaggaacattatctgcaaattctagcaatgtaattcagttgatcattgatgcatacaatgtgagtacatcttaaataagatcagttttggacaataccctgttgagaatactttgtacaaagaaagtaaaacttccttcatacacactttagcgagcccaaagtactacagaaaaacttaaattctgtatgtatctagaggaaaaactttatacatattgtcttacaaaagcaagattcatggcctaaacaaagtgaaaatgtgataaaggcatgtggggagtatttccaaataactgtttgtttatcattaaggaatagatctccttgttagaaagcaattgtaaaacataacttacatttaaacttacaggatttctccaatctttttcctccccaaaatatcctttatagagtcatctattctgatgaattgtgctagaaaagtttttttttttgccaattcttctcttcccatatattcagaggatatgggtttctatttcaggaggtacacactcatatatacgtataccataaaatatataaaaatgtaaatatacatgtgatttgcctatttcaaaaagatttatagtgttgttttcccctcacagatgggaggaagttgaattgaaattaaagaggaattggcttatccttt

SEQ ID NO: 4920 - DNA, 6000 bp, Homo sapiens
tttctaatattctttgcatttccatataaagtttagaagcagcttgtcagtttctataaaaagtcttctggggttttgattgtgattacattgaatctatagcacaatttgggaaaaattgacatcttaacattattgagtcttttgattaatgagcagagtatatctctcaacttatttagatacctttaatttttctcagcaacgtttcatagattttagtgttcaggttttgttatcttctgttgaatttattctccagtatttcatattattctgttggtgaatgatattttttaaatttctgttcctccatctcccgggttcaagcgattctcctacctcagcctccccagtagctaggattacaggtgcacgtcaccacgcccagctaatttttgtatttttatagagataggctttcaccatgttggccaggcttgcctcgaactcctgaccttaggtgatccgcctgccttggcctcccaaagtgctgggattacaggcatgagccaccatgcccggccatttttaaatttcaaattctgatcgtttattgctgttacagtcatgcatcatttaatgccagggatatgttctgtgaaatgagttgttacacaattttttcattgtgtgaacatctcagagtgtacttacacaaacctagatggtatagcctcctacaaacctaggctatatgttatagcctaatcttacaaggctacagacctgtacagcatattattgtactgaatactgtaggcaattgtaacacagtggtgtttgtgtatgtaaacatagaaaaggtatagtaaaaatacagtcttataatcttatgggaccaacgtcagatacgtggtccatcattgaccaaaaaaaaattgttatgtggcacatgagagtacagttgacttttgaacaatatgaggtttggggtgctgacccctaccccctgcccgtacaactgaaaatctccccaaaaccttaactacgaataagcctgctgttgactggaagcctcactgatgatcacatattttgtatatgtattatatactgcattcttacaataaagtaagctagggaaaagaaaatgttattaagaaaatcgtaaggttagctgggtgtgcggtttgtgcctgtagtcccagttattcaggaggctgaggcagaaggatcacttaagcccaggagttgaggctgtagtgctctatgatcgtgcctgtgaatagccactgcatttcagcctggataatatagtgagaccctgtctcttcaaaagagaaaatcataaggaagagaaaaatgtatttgctattctttaagtagacgtggatcataataaagattttcattttcatcatcacatcgagtaggctgaggaagaagaaggaggggtgtctcagggatgctgtctcaggggtggcagaggcagaagaaaatccacttgtaagtggacttgaacagtttacaccctatttttgagtgttgactatatgtaggaaaacagttttttaggatattggctttgtatcctacaaccctgccaaattcacttattagttctacaataagtgagctagggttactttattcttacaataaagtaaaaactttagttttttacatagatcaaaagtttttttatttttaatttttgtgggtacatagtgttatttaaaaaaatagattatcaaattatttaaacagtttcacttctcttttttgatctgtatgtctgttatttctttttgttgtctgattgcactggctaaaacctgcagtataatgttgaatagaagtgtcaagagcagacatcctttctttgttcccaatcttggcaggaaggcatttagttttatgccattaattaaaataatagctattttatttgtagatgcccttcatcagcttgttaaagttcccttctatttgtagttcgctgcaagttttttttcttttaattttgaatgggtgttcgatcttagaacagcattttctgtatcttttgagatctgtgatttttcttttttaattctgaaaatatggtgaaagtattaattttctaatctttaatcagtcttgcattcatttgatgaacttcactttgtcatgatatattatttgttttatatatggttggattacatttgctaaaatttgtttttacatctaagtttatgagagatattggcctgtaggccagtctggaagcaaagatagaataagtaatagccaaattcttggtttatgtctgagattgagaagatgtgatcagtatgtagatctttggggtattaagcaccaataggcagtacttgattctaacttgttattgttgtagataagggaggccctcaacatggagtaaatctttcttctccccactgcctgctttcattctcctctgaacagtgactagaggaatagaggagagccccatattaatttgagttccagggttttcaccaatatattagaccctcttagctgctaaatttcattccaaaataatgtggaagcccagatagaaaacagatacaaggatgattttattagtatattttgcaaattaagtatttttaacactgaatttaataagagcaataaagttgtgatgaatacaaatctaatatcaaggggtttgaataaagtaagctattacttatcttcagcacccaatttatttagttatcagtattgagaaaaattcttcacaaatgagttcattccatgtgaatttttttttaacagcttgccttgcaatcttagagtatttttcaagtaacttcatccagaacttgaacataaaggagtagggaactggtttcacagcttaatcactatttctaacaaactgctcacattttttatcatatattaaaaagttggacaacaaaagggaaaatattgacaaatgctaagcaattgataatgtctttttgagactgtagattcctttattgactgttatgtgcacagaaggcaagatgtgccctcacttcagctgccactcaattgcctgtcacacacattgtgctgtagtagtacttttgcttatacaatttttagtgaacaaatatgtgcaggccttaattgggatgaggtgaaggagatagaataaaagaccaatatagcattacaagccttcctaatcaatgacaaaattcattcagttcagtatatacacagagataagcaggagaaactttattctgagatttgcatgaaaatgagttaacctggctgtgatatctccagtatactgatatttggtatagaactcctttgagctatatatatcttattacagttgaaagtgttttaaaaagaaactattttcaaaaggatactcaaatcaaatgcttgtggaatcccagaagctcttcagtaggacctgagagttctttggaacagtttgaaaaccattcttctagaccatgtaattcaacataggaatgttttcttcattttctctgtaattcttatttgaaattagagttctggtaaactaagggaaaaatatataggtctttattacaatgtgttaaggtttatgagtcttgtagttattaagaaagtaaaagcaaaaattgagatggaatttatcactccccatatttacgacatatgtatagttcataacataatgcttaaactatcttaaaaacacctgcttatttttcacatttcacgtattttaatatgagcataaattcatattattcataggcctaggcctaaactgaaacgcagataaattgagttcctgagtctgatgtttaaaatggtattatggagctctgtaattctcacatatttatatttgatctgaaaaggagatgacagtaccctttggcttgtttaaaaacacatatacacacacaaaaggatctaatgaagaatttttactaatattggttcaaagagatctttccttcttgtgcaatcactgtggatttcctaccccatacctcttcatttctctcaatcagtgtcttcacatgtttcattcagtttttctctcacttttactttctatttattataacctaaagtgtataatttaaagacatcttagaggtgattcaattctactccattttacagaagttcagagtgaaatgatcttaattagatggttggccggaaaagagctgattttataaagaaaaaaagtcacaaaaataaatgtttctaattggccactttggttctaaaatctccgtatggtcttctctgtaattttagactttgcactactaatgggcaggaaaatatttgtactattttactagtgacacatagatagcgatctccttctattaggattccaaggtagtgtaggatagaaaagagtgtgggctttgaggctggcagatctgagttgaaattttggtctggctctccactagctatgcaattatgggaagttacttatccttctctgagtctcctttccttcatttgcaaaataagaaaataacacatataaagctcttagtgcattttatgagctcaaaaagcatagccagataagtaagttggttataataatgaaagacaatggataaatatattaaaaaagcatgacagctgagagtgaaagaggagaaaaagggattgtggcagagatagtctggaagaataggaaagaatggaaaaccaaattggataagaactagttcaacttgtattcagtttagttctaatactttaaagcacacctttttgttttcattagtgtacttcttgcacaattttagctcatattgaacttaaacattttcttttgtggtcaaattgtgtttaaattgtgtctcttttatttgtttatattaatgttattgttctctgagtaatcacacatttttatttaatttacaggtggccgtttgttgcatctgtttttttgttattcttcctctaaatcttgttggtacaatacttggccgaaatctgtcaggtcagcccaactttccttgtcgtgtcaatgctgtgcctcgtcctataccggagaaaaaatggtaaagagaatgctaaatcttatgcgattgtttcacacaatatataagttcttaaggctgttgtgtacatgtaactttagaattggtatgtatttatgataatgacaatcttaagtttgagcctaagaagttcattttactatttcctttaacctacattgttaagagtaataataaattatacccttattccactttctgaatatcgtgccatttagagttaagtcaaatgcttttctatggtgtagaagtgggtgtgaactaaagctgcagttttactaatctgcaggccaaatctggcctgctccctgtttttatctataaagttttgttggaactcagccatgcccatttgtttacatattctctgtggctgcttttatagtacagcatcagagctggcagatcagtaatgtcagagatactatcacatgcagaacctgaaatatttactatctttccagatattttagtactgtacaatttagtgtacatttattacattccctatttataggaatagttgtatagtaagtagactgcatttttatgataacggagatatatatatataaagtctctgtccctagatattttaccagattataaatacagcatattcaggtgcttatacaaataggtgataattttgctctgtcccttctagacatggaggcatgtagacatttatagaaatggaggatgaataaaatagcccctatagtttgaattggccatattcttttctttccttagattggtgcttatgagagactttagttagaacttttgtagtttattattttatttatttatttattttattattattattatttttgagatgaggtctcactctgtggcccaggctggagtgcagtggtgtgatctcggctcactgcaagctccacttcctggattcatgccattcttccgcctcagcctcccgagtaactgggactacaggtgcccg

SEQ ID NO: 4921 - DNA, 6000 bp, Homo sapiens
agtagcaagcccatccctattggttcaataatttgtattttatgatccatgtagcagctatgtattttgagatgacactttaatgatgtggctgaggctgaaactagaagacattgtcatgtcaagtttgtcctgcgtacctactcttgtctcatttttgttccctccagtgcccccattctctagatgaccttctttgattttagaggcctcttagtggttatttttcagtcaatttttgctaaggtgctaattgatgcccaaaataataagtgaaggaatatggatagtaattaagaatttttctatcaccactgatgctgggcaatttactcagcctctccagggctgttttcttctctttaagaagggatcatgatagtatctacctcatagggctcttgtgaagttaaaatgcatcaatctctataaagtaccaatgagcattcagcaaatactaattcctatattgttattactttcgacttttcactagagtgtttgcaatttaaggttagtccctgctgttatagccgaagcaagtagcattccaggtagtacctagccttacacctcttttcttactagccattgatgtgtgagcctgttagcagctcgttgtggggagggcattctctgggctgcctctaactaggccttaacctgtggtattaaacaagccataacacccttgattgtggctgtttttctgtgttggtcatgctgatccactcctctagatgcaaaagaatcagacattccacttttgaaagattgccagtattaataaatgtgattcccaccttaaagtattttactgtcttatgaagatctaaacagacgtattaaataaattaacgaaagcaggtaaattcctatagtcctatgattttataattataaattaccatagtgacaagaagattttacagttactttagattctttattggaaagggcaaggataaagtaaatgagtgcataaacagtactgattgaggagttagaatgggtgaaattatccttaaacaagatacttatttctgttataaaaaaaggaagcctcatatggtgggctgataaagaaggtgcatggcatagaacatagagcagagatgggtggatggggacaagacagcagcagtggggtaaagtaaggataggctcagacactttcatttattcagcaaatgctcatcaagggcttactgcttgccaagcagtgtgctggcttgctagctgctggagatatgatgataagcagaactaaaccaaaccaaacaaaacaaaaaaacagtttttaaaaagaactgagagattgagagatacggatggtcaggcaagatatcgttgtacatgggatggaagagcttcattcagtgggctttgtgtgtttctcagcaagataattaccattgtataaagagaagacacagaaaatacagaattaggttaaaaatacaatggtggcctatatgaaaattaaaggatttttgttgaattactgtgaatagtgttttaaaattgaaatccttttcttttcaagtcactgattggctggaggaatgttacacggctgctggtgttttccacagatgccgggtttcactttgctggagatgggaaacttggtggcattgttttaccaaatgatggacaatgtcacctggaaaataatatgtacacaatgagccattattatgtaagtgcctggttccttacatagtgaatgtgtttatgttggattttaatgtttaatactaagagcttgtgggtgactggcttggggtttctcagggtttgaggttttgctgttttggtaagtaggggtcctgattgaaagtgcaggaaagctagtgttgctgtttgtgaagatgcagctttgtatttgcttccttctgctcagacaagggcctcactggggtgggaaagggatgcccagatgccactttcactctttgcctcaactccccgcccacagcatttggtagcacagtcagtactctttctaaataaataatttatctagtctcatactctttgttttatacgatttttaaaagcagtcactctgcctttattgaaaataaatattggcaaagcattcaagttctagaagaaatccaaatggtaaatcttggtctttttcttaagttgtagataatagaatatttaattactgactattctttaatttcattgtccttatatttaatatacatagataaacttactatttaaaaccttttgaatatggaattttttattcatacatgaaagtaaagagaagaggattagcaattcatgtatacacacgactcacttcagcagtttatatttgatactgttatttgaaagcagtcttgtaatctagttatatgtatgcaactagatgtaatctagctatatatggattatatatgtaatctagttatctaaagcagtcttgtaatcgagttatgtgtaatcttgcatgtataactagattgaaaaattagaagagattataagggtgtatttaaatactaaattatattacttgatttcttaggattatccttctattgctcaccttgtccagaaactgagtgaaaataatattcagacaatttttgcagttactgaagaatttcagcctgtttacaaggtaaatgtgtgagataaaaagaacaagattctaaacatttttgattgttagaggcaaatcatgtctgaattgaaatgtgggaaaatgccaccagataggcaaaccgaattttacaaaagtggtttatattaatttttaatcacatattataaaactggtttctaggtttgactcctaaagttagttaggaggaaacatgggaactggcatttaaagataaaagttgctcagtggatcctaattggttgaatgaatagcagttgtattttacgtgttttatcttttaattgcaggagctgaaaaacttgatccctaagtcagcagtaggaacattatctgcaaattctagcaatgtaattcagttgatcattgatgcatacaatgtgagtacatcttaaataagatcagttttggacaataccctgttgagaatactttgtacaaagaaagtaaaacttccttcatacacactttagcgagcccaaagtactacagaaaaacttaaattctgtatgtatctagaggaaaaactttatacatattgtcttacaaaagcaagattcatggcctaaacaaagtgaaaatgtgataaaggcatgtggggagtatttccaaataactgtttgtttatcattaaggaatagatctccttgttagaaagcaattgtaaaacataacttacatttaaacttacaggatttctccaatctttttcctccccaaaatatcctttatagagtcatctattctgatgaattgtgctagaaaagtttttttttttgccaattcttctcttcccatatattcagaggatatgggtttctatttcaggaggtacacactcatatatacgtataccataaaatatataaaaatgtaaatatacatgtgatttgcctatttcaaaaagatttatagtgttgttttcccctcacagatgggaggaagttgaattgaaattaaagaggaattggcttatcctttttgagcataattcagtgtactttaatcacaccgagttagccttcattaataatcatttaaataatctgaaggcggttgtaatttggtaggtaacccttgtgtgtctcgtgcaccactttcagcccccatccccctaaccctttggcagcttgaattttagacatttttacttcatgtcatgggggtaccataacgctttggaaaggccagcctaccatatgaggcttcccttttttatggggtaccataatggtttggaaaggcctgacttggaggggtttttataaaggtttttaatattttacttgttccacagcttttcccattctcccctgtcttagataattttcctaactcttgttctttcaggggtgtgaacaagagatagcttgccattgtacccttctccatttgtcctgaatagtctcatatgttaaacaagccctggcttgaatccttccttcttgggggattttgtttttttttttttttggctgggctacaatggttccttaagcaaatttgttcctagactgcatagttgattgtttaccctagtccatagttagctggagaggtaggactacagaaatgccattttgccgatggggaagacagcatttatttcgtttttttttggggggtttctgtttttgtttttgtttttgttttttagatggagtcgcactctgttgctcaggctggagtgcagtggtgtgatcttggctcactgcaacccctgcctcccgggttcaggcgattcttctgtctcagcctcccgagtagctgggattacaggtgcacactgccatgcttggataaatttttttttttttttgtattttagcggagatggggtttcactgtgttggccaggctggtctccaactcctgagctcaggcagtccacctaccttggcctcccaaagtgctgggattacaggtgtgagctaccacacccggcctattccacatttttaagactcctcctaattagtaacagccctctgcactgtgtgatcctgagtattttaactcagtgattaaaacaggaatactcttttcaattgtgtattttattttaaagatttgatccttattaattaaaacctgtttctctggcctctgtgttttctagttactcaattggatttggcttgtagatactttattgaaatatatttttttctgagcagtttatccattggttttatgcattcaagtagcattttgtttgacttttcctgtgtataattaggcattcttttagtccctttcctcagaagtcattttggaaaacggcaaattgtcagaaggcgtaacaataagttacaaatcttactgcaagaacggggtgaatggaacaggggaaaatggaagaaaatgttccaatatttccattggagatgaggtatgttgtataaagcattttctgtagaaaacattggttatttataagcaaatttagtttatagtttgagaaacattaaaataagtgagcaactttttgaaatattttttagtagatttaaattgtttagttggttgttaatcttttttttcccttcaaggttcaatttgaaattagcataacttcaaataagtgtccaaaaaaggattctgacagctttaaaattaggcctctgggctttacggaggaagtagaggttattcttcagtacatctgtgaatgtgaatgccaaagcgaaggcatccctgaaagtcccaagtgtcatgaaggaaatgggacatttgagtgtggcgcgtgcaggtaagctgggtgttgtcagacagtgacagagctacattggtttagagagtataggcaggtcatattttgggacatccagagaatatctctctatttggagcaaattattttttccaaccacggttgctcaccacaagatcagtttgatgatcttgtgtgtgatatttatagaaagttccttcctgcctttttttcttaaagtgattactctttaaaataaaagattttatagccatgaaagaagtatattcaacaaattgttaaggtagcgtttctctcatgtgagagcaatcaattttctagaacaaaataagcttgtgtaaaataacgtttataggaaaatgttttggaaaaacatcaaaccgatgatggcgatttcgtctgggaaatggaattatgaagcagtagaagatgtttgtcttgtactacatgtacttctgcattgttggaataatttttaaaaaataaatatgtgttgtaaaatacaaaagagaaaatggtattttcagtatgtagaatctagtactaagaaaactaacaaaattacttcagattttattttcacactgtggttactttttgtaattgaaaatgaaaa

SEQ ID NO: 4922 - DNA, 6000 bp, Homo sapiens
tcctcctttttctgttacttgccattggctatttatgtatgtatgtgtgtatttgataattccacctttggctatataagatatatataagatatggtaatcttattaaaagctaagtcttggtatgacatttatggacacctttggggtaccaagattgctttgtttctccatcaaaagagcctgttcagttcatatacactatgtatgtgatcatgtgtgtgcgcacacacaaatgagattgtccgtaaagtagtgaatgaaacattccacaaggaaagatcattctctatgttatagtcacatgttttatttatagctgctgtgatagccattccctgtgataattagtaaccaactttgagagaaagatgagagggactgaaggttaaaactacattgtgtcaggtggaaacatccctattcttggacagtcagaaggttccttattatttgccatcctttcttcagagtattgttcactggactcctctttattttatctgagatttttcttgattatcaccagcattcagtgaggtatagaatcgattatgcagagagttaaaaaaatttttcttgacttgactttttctatatgtgatcttaggaagacccagagaggtaacatcttgacatttacaaagaaaatggaatgaatctagctaaattttttgagtgcttttcctgctgaaatttcatcttgctgcctgaaaaccttggcacatttacagttccctgctgttctggcaatgtcccagcatttattctttaatgggtttatatgccttcagtacttcatttttcaggggcaggtggggagaaactgtttagactggaagtcattagaatgtcatcataatacaaaaattatatatatccatcaatttatgttgctaaaatgcttgtcagtaattaaaacaaaaatatttgttgattttttttaatgtaggaaaaaatgactacattaaggtgggatattatgagcatagcatttttgttttgaggaattaagtttaaaagtgcacctctattattcctaagatatttacttttctagagggcatattcagtattctctttttataaagtcatgcccttgtaagtttattcttgaggtactcataagattaggaaaaatgattctctaggttgaaactgttttgattttaagcatatttctgctcaaaggggaacaatgttttgtacgtctggaaaattggatttggttattggactagtattataccattaaaatttttgatgctaattaaaattttatacatcttttcgtgtcgtaaggattcaggtatattttcacaaaattgaatgatttttctcttatcctgtaaagaattgtattgtaactattctaaaatgcattatcaatattttaaaatgtaatattgttatttcctattataaaagaaatgtcattgcaaaaataagtggaaatagtgttgctttgtcactttggttttttgtattttaatatttaataaagggaaactttgaaatacatacaaaaatagggacaatactatatatagtgagtccccatgtactaacacccagtgtcagtaattatcaactcatggcctatcttgttttatttatattctcactttgtatcccccccttttattctgacatgaatcttagaccttatgtcatttcaagtgtaaatatttcagtatatgtctctccctgaaagataaatgtaatttcttaatatgatggaataattcagttaatgttcagatttaccacacttgcaatgacttctttttaaatatagtttgtttgctttgagatcaattaagattcatgaattgcttggctgaaatgtctcttaaggctcttttagtctatagatattctctctctcacttgcagtttatttttaaaacttaaacaatttctgtagaattttccagactctggattttgctgattatattgctgaagtgtcatttaaagtttcttcaagtggtagttagatctgtaggcttgatcatactcaagaatacttgtccaagaatgtttaacaggtggtttgtaagcttttatcaggaaagcacataatttctggttctatttctttgtgaagttagcagccattgatagttattgcctagctcaaataattcattagtggttataatattctaattctgttgttccttttatatttgttagctggaatacttccataaggataaccttcctttcatcaaccagttggtagccttggggtatagttcatacataggagaaacaggagagatgcttgattcttgcctttcattcaccagtttagtgaataaaagattcactaaaagattcgttcaaggatgactaggcatttgtgtgtgcacttaatattactaattaatggaaggttttcttttaagctttcaataatattgggctacatcataaattcctgaggccaatggagatttcttctctgacagttcaataaccaactgcattgtcctaaagagcccttagtaggttggtacaaaagtaattgtaaagctgcaaatacttttgcaccaacctatatttgcaataaagaaccatctagttcattcattcattcaacaaatatttaccaagtatcttatatgccaggcactcttttagacacaggagataaatattttacttaacaaaacaaacatccctgatttctggtgttttaagctctggttgaggctaattgttaaaaaacaacatttcaaaacttctgacccacttacctctctgtcctgtctattcccgcaaatatgtcatccctactaccaactacacagcttctacaacttaaaaataaaaaagaagctgtcagaaaatgcctcttctctagagcttcaactgctattgggacatggttccctgtccttccttaagagaattttcagtcacttctaactatttatctattggattttgggaagatatattgatttttactttaatgacctagaatagtatatcttcaaatcaaagaaggcatgttttttgatttaacaaccttttgccattatcaaattattcttgctttataagagatgtattttaattctgtagttactgattatacaagaaataattgctacttgattagacttggcgtatgatggtcagactcagtgtattatggtatcaggtgatttgcaaagcaaatgatacagttttagtaagttcagagagaatactaacataaggatattttctttaaaaaagaataactttccagagcatagagtatttagtgtttttaaatgatggatactgctctgtatgtatttgtttcaaaacatcttattttatctttgcaggagcgattggttacatgggaacaagtgcctttgtccgaaaaatctatactaatgtgaaaattgactagagacccaagaaaacctggaactttggatcaatttctttttcataggggtggaacttgcacagcaaaaacaaacaaacgcaagaagagatttgggctttaacacactgggtactttgtgggtctctctttcgtcggtggcttaaagtaacatctatttccattgatcctaggttcttcctgactgctttctccaactgttcacagcaaatgcttggattttatgcagtaggcattactacagtacatggctaatcttcccaaaaactagctcattaaagatgaaatagaccagctctcttcagtgaagaggacaaatagtttatttaaagcatttgttccaataaaataaatagagggaaacttggatgctaaaattacatgaataggaatcttcctggcacttagtgtttctatgttattgaaaaatgatgttccagaaagattacttttttcctcttatttttactgccattgtcgacctattgtgggacatttttatatattgaatctgggttcttttttgactttttttttttcccaatccaacagcatccttttttttaaaagagagaattagaaaatattaaatcctgcatgtaatatatctgctgtcatcttagttggaccaacttcccatttatttatcttaaaactatacagttacatcttaattccatccaaagaagatacagtttgaagacagaagtgtactctctacaatgcaatttactgtacagttagaaagcaaagtgttaaatggagaagatacttgtttttattaaacattttgagatttagataaactacattttaactgaatgtctaaagtgattatcttttttccccccaagttagtcttaaatcttttgggtttgaatgaaggttttacataagaaattattaaaaacaaggggggtgggtaataaatgtatataacattaaataatgtaacgtaggtgtagattcccaaatgcatttggatgtacagatcgactacagagtacttttttcttatgatgattggtgtagaaatgtgtgatttgggtgggcttttacatcttgcctaccattgcatgaaacattggggtttcttcaaaatgtgtgtgtcatacttcttttgggaggggggttgttttcttctgtttattttctgagactcctacaggagccaaatttgtaatttagagacacttaattttgttaatcctgtctgggacacttaagtaacatctaaagcattattgctttagaatgttcaaataaaatttcctgaccaaattgttttgtggaaatagatgtgtttgcaatttgaagatatctttctgtccagaaggcaaaattaccgaatgccatttttaaaagtatgctataaactatgctactctcatacaggggacccgtattttaaaatctccagacttgcttacatctagattatccagcacaatcataaagtgaatgacaaaccctttgaatgaaattgtggcacaaaatctgttcaggttggtgtaccgtgtaaagtggggatggggtaaaagtggttaacgtactgttggatcaacaaataaaggttacagttttgtaagagaagtgatttgaatacatttttctggaactattcataatatgaagttttcctagaaccactgagtttctagtttaatagtttgctatgcaaatgaccacctaaaacaatactttatattgttatttttagaaagactcaaaacacctgtatttaaaccttaatatgaaaatcatgcaattaatagttacacaagatgttttcattacaaaatatgtacctatctattgatggactctacatcctatattgtgacatgtaagtcctttaaaaggtgaaaagtatgatttcttaccacttaagtatgattgatatgatccaacaaatttgatcagaagctgtaggtaaatcctcttctgaagccaaaatggtatattaaatataatttattggtacttccattttctcttccttcttacttgcctttaagatcttataaaaaagaaactaaaagttaatatttagttgcctatattatgtaaccttttaactatatataaagtacttttttggtttctttctcaccacttttattcaaaagtacttttaacataccaatacatagtctgtctgatgggagtataaattggacagtaaggttttgtcttaataaaatgaaatttgtttctcatgatatgaatcttgcaggtaagatgtagggtttattgaaaatgtgtgggttaaatgctttcaggtacaccaattctttctactaaattgagctctatttgaagttctttggaatctgtggtgaaaaataattttctgatttccaaatacattaagagcattaaatgaatattaatcacctttaaagtcttttagaaaaggacttgtattggtttttggctgcatagaggggttgaataagtgtatgtatgtgtgtgcgtgtgtgtgtgtcttcttaaagaagatgtaattcacaaatagtttagctccctagcgctcagttgtagaatagaaaatagaacattattcaagttaattgaaaggtgaggtt

SEQ ID NO: 4923 - DNA, 6000 bp, Homo sapiens
atgcctgtgatttttgcacattgatttttgtatcctgagactttgctgaagttgcttatcagcttaaggagattttgggctgagacgatggggttttctaaatatacaatcatgtcatctgcaaacagggacaatttgatttcctcttttcctaattaactgatgggcttccctttgtgggaatattgttatgtgttatttctttctcctgcctgattgccctggccagaacttccaacactgtgttgaataggagtggtgagagagggcatccctgtcttgtgccagttttcaaagggaatgcttccagtttttgcccattcagtatgatattggctgtgggttgatcataaatagctcttattattttgagacacatcccatcaatacctagtttattgagagtttttagcatgaagggctgttgaattttgtcgaacaccttttctgcatttattgagataatcatgtgttttttgtcttaggttctgtttatatgatggattacgtttattgattgcctgtgttgaaccagtcttgcccagggatgaagccaacttgattgtggtggataagctttttgatgtgctgctggatttggtttgccagtattttactgaggatttttgcatcgatgttcatcagggatattggtctaaaattctctttctttgttgtgtctctgccaggctttggtatcaggatgatgctggcctcataacgtgagttagggaggattccctctttttctattgattggaatagtttcagaaggaatggtaccagcttctgtttgtacctctggtagaattcggctgtgaatccgtctggtcttggactttttttggttggtaggctattaattattgcctccatttgagagcctgttattggtctattcagtgattcaacttcttcctggtttagtcttgggagggtgtatttgtccaggaatttatccatttcttctagattttccagttaatttgcatagtggtgtttatagtattctctgatggtagtttgtatttctgttggatcggtggtgatatcccctttatcattttttattgcatctatttgattcttctcttttcttctttattagtcttgctagcggtctgtcaattttgttgatcatttcaaaaaaccagctcctggattcattgattttttgaagggctttttatgtctctatctccttcagttctgctctgatcttagttatttcttgccttctgctagcttttgaatgtgtttgctcttgcttctctagttcttttaattgtgatgttagggtgtccattttagatctttcctgctttctcttgtgggcatttagtgctataaatttccctctacacactgctttaaatgtgtcccagagattctggtatgttgtgtctttgttctcactggtttcaaagaacatctttatttctgccttcattttgttatgtatccagtagtcattcaggagcaggtcatttagtttccatgcagttgagcagttttgagtgagtttcttaatcttgagttctagcttgattgcactgtggtctgagagacagtttgttataatttctgttattttacatttgctgaggagtgctttgcttccaattatgtagtcagttttgcaataagtgcggtgtggggctgagaagaatgtatattctgttgttttgggatggagagttctgtagatgtctattaggtccacttggtgcagagctgagttcagttcctggatatccttgttaactttctgtctcgttggtctgtctaatgttgacaatgtggtgttaaagtctcccattattattgtgtgggagtctaagtctctttctaggtctctcaggacctgctttatgaatctgggtgctcctgcattgggtgcatatatatttaggatagtcagctcttcctgttgaattgatccctttaccattatgtaatggcgttctttgtcccttttgatctttgttggtttaaagtctgttttttcagagactaggtttgcaaccactgcctttttttgttttccatttgcttggtagatcttccttcatccctttattttgagcctgtgtttgtctctgcacgtgagatgggtctcctgaatacagcacactgatgggtcttgactctttatccaatttgccagtctgtgtcttttaattggagcattttgcccatttacatttaaggttaatattgttatgtgtgaatttgatcctgtcattatgatgttagctggttattttgctcattagctgatgcagtttcttcctagcatcgatggtctttacaatttggcatgtttttgcagtggctggtaccagttgttcctttccatgtttagtgcttccttcaggagctcttgtaaggcaggcctggtggtgacacaatctctcagcatttgcttgtctgtaaaggattttatttctctttcacttaaagcttagtttggcttaatatgaaattctgggttgaaaattcttttctttaagaatgttaaatattggcccccactctcttctggcttgtagagtttctgccgagagatctgctgctagtctgatgggcttccctttgtgggtaacccaacctttctctctggctgcccttaacattttttccttcatttcaactttggtgaatctgacaatcatgtgtcttggagttgctcttctcaaggagtatctttgtggctttctctgtatttcctgaatttgaatgttggcctgccttgctaggttggggaagttctcctggataatatcctgaaaaatgttttccaacttggttccattctccctgtcactttctggtacaccaatcagacatcgatttggtcttttcacatagtcccatatttcttggaggctttgttcgtttctttttactcttttttttctctaaacttctcacttcatttcattcatttgatcttcaatcactgatatcctttcttccactggatcgaatcggctactgaagcttgtgcatgcatcacatggttctcatgccatggttttccgctccatcaggtcatttaaggtcttctctacgctctttattctaattagccattcgtctagtcttttttcaaggtttttagcttctttgcgatgggtttgaatatcctcctttagctcggacaagtttgttattaccgattatctgaagccttcttctctcaacttgtcaaagtcattctccgtccggctttgttccgttgctggtgaggaggtgcatttctttggaggagaagaggtgctcaaattttagaattttcagcttttctgctctggtttctccccatctttgtggttttatctacctttggtcttccatgatggtgatgtacagatggggttttggtgtggatgtcctttctgtttgttagttttccttctaacagtcaggaccctcagctgcaggtctgttgggagtttgctggaggtccactccagaccctgtttgcctgagtatcaccagcggaggctgcagaacagcaaatattgcagaatggcaaatgttgctgcctgatccttcctctggaagcttcgtctcagaggggcaccgggctgtatgaggtgtcagtcagcccctactaggaggtgtctcccagttaggctactcgggctcagggacccacttgaggaggcagtctgtccattctcagatgtcagactccgtgctgggagaaccactactctcttcaaagctgtcagacacggatgtttaagtctgcagaagtttctgctggattttgttcagctatgccctgcccccagaggtgttgtctacagaggcaggcaggcctccttgagctgcaatgggcttcacccagttttagcttttttttgctttgtttacctactcaagcctcagcaatgggggatacccctccctcggcctccctgctgccttgcagttcaatctcagactgctgtgctagcagtgagcgaggctccatgggtgtgggaccctctgagctgggcatgggaccctctgagccaggcgcgggatataatcttctggtgttccgttttctaagagcattggaaaagcgcagtattagtgtgggagtgtcctgattttccaggtaccgtctgtcacagcttcccttggctaggaaagggaattccttgaccccttgtgcttcccgggtgaggcgatgccccgccctgcttcggctcacactccatgggctgcacctactgtccagcaagccccagtgagatgaacccagtacctcagttggaaatgcagaaaccacctgtcttctgtgtcgctcacgctgggagctgtagactagagctgttcctgtttggccatcttggaacctcttaaattatttttgttttgtgtgattgcaattttggcatgtttcttcaggtgcaatgaagggcgtgttggtagacattgtgaatgcagcacagatgaagttaacagtgaagacatggatgcttactgcaggaaagaaaacagttcagaaatctgcagtaacaatggagagtgcgtctgcggacagtgtgtttgtaggaagagggataatacaaatgaaatttattctggcaaattctgcgagtgtgataatttcaactgtgatagatccaatggcttaatttgtggaggtaagtaaagggcctgaagtggttgtaagatgtgatcccatctaatgccacgaaaaatcttgagtttagttggtgcataagtagaaaaggggtagcttgagggtcagtctcgcccctaggtatactttctcacatgttgttgcttattttacttttcagtcaatactgtgattgtatatttttaccattttgagaaatgatatgcttaattgcaggaaatggtgtttgcaagtgtcgtgtgtgtgagtgcaaccccaactacactggcagtgcatgtgactgttctttggatactagtacttgtgaagccagcaacggacagatctgcaatggccggggcatctgcgagtgtggtgtctgtaagtgtacagatccgaagtttcaagggcaaacgtgtgagatgtgtcagacctgccttggtgtctgtgctgagcataagtaagtatttcctaattgcttgaaatagttgatacttcctcttggctctcctaagcctgtattgtttctagaaccagaacagtgccaatattaaaatatactgtaaataaaatgcctgccatgtggaagcctactctttaattcttaaaagttctttctcaacagctagtatatattacatggtatgaagtgtgtcatgtgagagttgtactattattttgatctgaatgtgctagataattgaatttacatggtaacctttattttggcaattaagatttaatttaatttaatttgtcattaccaatttcttaattactgtcttttgacaaaactaagccaaattaaagatttttcctcttgaaggattattatactagtaacatattatttaaattattatgattttggccgagcacagtggctcacacctgtaatcccagcactttggaaggccgagacaggtggatcacttaaggtcaggagtttgagaccagtctggccaatgtggtgaaaccccatctctactaaaaatacaaaaattagccagatatggtggtgtgtgcctgtaatctcaactacttgggaggttgaggcttgcttgaacccgagaggcagaggttacagtgagccaaggtcacaccactgcactgcctggatgacagaacaagactccatcgcaaaaaaaaaattattatgattttatgttacatatttaatatgtgatagggctaatttattttactatcttttatttcttaatagggttttaatttgaactgtaataaatctttaattttattatggaaattagcatctttttacataatttttctatccacaaatgtaatgttcctcttcatttattgaaatcttccttcatagctgtttgttcaatttggtcacaagagtttag

SEQ ID NO: 4924 - DNA, 6000 bp, Homo sapiens
aaaaatatgacatagcattaaaccagtgaaaacataatgtgttcagggtcactaagcagcccagtggtgtcatcagagacctggatcagccgacagacaacagcaaccacgacagtgggcttccatctccatcaatgatgctgtgttctgattaaacgatactgtaggccgggctcggtggctcatgcctgtaatcccagcactttgtgaggccaaggcaggaggttcacctgaagtcaggagtttgagactagcctggccaacgtggtgaagctccatctctactaacaatacaaaaaaaaaattagccgggtatggtggcaggcgcctttaatcccagctactcaggaagctgaggcggaaggatcacctgagcctgggagctcaaggctgtagtgagatggaatcacgccactgcactccagccagggcaacatagtgagaccctgcctcaaaaaaaaaaaaaaaaaaaaaggaaaagttcactataagctaaaccttgagcctagagcacgtgcagaaccctggagaagttcctacccccaaggcaggagttcgtagctaatagcttcttgggcttttggtgcagactggctggagattggagaagctacatcatgagaaaggggcttttgttctcttttctgggccgaatcaggcagcagcaacttgtaaccatctggccatctgctggtatcttgtagggcagcttatcttgcaaaagcactaggtgctgacgcaggagagttgcaagcaaaagaagactctgcaaaagggtccttcagggcttcgcacaaggggacaagttggtacagggtcctcatcttgcttaccctgcctcgaacacccaccgttctagtccttcaatgagcccatcgcatgctttcatcatggcgcctgcaggtgcgtgttctgctgtgataacagcattatgttcgtcatcactgttagcacaagcaccttggttcagaaccgttttgccattgttcatcatcggtcaatgaacgaacaactggagccacagtatagatgttaaaaacctgtatatccacttcgtccagcatgctgacacactctgaaggtatattttttgcctgcatagggaggtcagacatcatttttttcccacttcacatatggaatacttccatgtcatcaccttgttcatcatcatcactgaacatagtcgcagaccagaggttgtgccatgcacgcatggctgtgtcgttagtcactgagttccaagcattggaaacagcattggcatccttcatgctaaacaccttttgaaaacttccacacccacccctctgttcactgctgctagcgtgcaatgtttccatatttactctccattgatctccattgatctaaggataccctggtcacatggctgaagtaatgaagtcacatttggaagaaagcccatggcataaacattatttttaatgagagtttcagctggaggatgagcagaatggttgtcaaagaaaaacaaaatcttgcagtcatcatccagtccaccctccctacagtgacacaagccactggtccaaaatgtttgtgagactaatcagaaaagatgtccctgattatacatgtaatctcagctactcaggaagctgaggtgggaggatggcttgaggccaggagtgtgagaccagccttggcaacatagtgagacctcatctctagaaataaataaatatcagccaggtgtggtggtgcacacctataggtgtgctgtgttgcccaggctggtctcgaactcctgagctcaagtgatccacccaccttggcctcccaaagtgctgggattacagacgtgagccactgcacccggccaacattttcaacatcattagaccagagagcagagaataagcaaaaatagcacagtgagaagtgcacagaggcggggcttggctccatatggggaattgtcgggacctaccatgggtgtgttcgacctgcacacaggccattttaccaccttttgtgtgcgtgcttgcatgggggaatctgggcatgcacagaaaagatatctctcagctgaaggcggctgggagagtcttttttccccttggggatgctgaataaacagtgtgttatgtgcctgtgttttgattgccacccaccccacgagatcaggtgtggaattttccacttgtggcgtaatgtcagagctcaaaaagttttggattttggaccattttggatttgggatttggagatcaggggtgctcaatctgtatggtactgttcatatgaattttttttttttttttttgagaccgagtctctttctgtcgcccaggctagagtgcagtggtgtgatctcagctcactgcatcctccacctcccaggttcaagcgattctcatgcctcagcctcccaagtagatgagattacaggtgcgtgccaccacaccctgctaatttttgtatttttagtagagatggggtttcaccatgtaggccaggctggtctcgaactcctgacctcaagtgatctgcccacctcagcctcccaaagtgctgggattacagtcatgagccaccacacccagccttaatcacatgaatttttaaaaatgtaagccatcctgtccgttgcacatggacatacacatggaaaaggggcctaagaatgcctgggaatgatgagtaccagtttcaagaaacatttacctgcgagaaagtggaagacggaggaagagaaagatgcaagaatacaaaggggcttcaactttatctgtaatttttttattccaaaaaatatctgaagcaaacattgagcagacatattaagttttgacaggatgaggcagtaggctcatggatatccactatatttattgattgctatagttcgaagtatatttgaaatttacattatttaacaacgtatatatatgtaatgaaatagagttctttaagcataccaaatttacaattttattttcaaattttaaaatttacttttggtcagaatgcagtaaaatgggtactttaacacaatcaatgctagttagaaggtatattgatacaagacttttggaaagcaagatagaaatatttgtttaaaagagaaaaagcctttaaaaatattccctaccagttgactcaatagttccactgtaggaaatctattctaagcgatcttaaattcacaagattttgtagaaagacatttatgacaatgttatctttaatattaaaataatagaggggatgttaaactatgataatttgcagccattaaaaacttttacaaagagtctgtaataatggagaaatctctacttcataaatgtccatagaataaaaaatgctctattgtatacatgctatgcttagcctgcattcaataaaccctcaatatatttgagaatattaaggaatattgttaatttttaaatttgatcttatcatcttgagatttattattaagtattgagagaaattgaataatgtgggatttccccagttggagtaagggtggctattcctgcttagaaaaaaagaatggaccttgtgtggtcactgccggatggtaggttcattattctttctactttttttttttaaatttaagagacaggaactggctgtgttgcccaggctggagtgcagtggtgcgatctcagctcactgcaacctcagcctcctgggttcaagtgattctcctgcctcagcctcctgaatagctgggattacaggcgcccgccaccatgcccagctaattttggtatttttagtagagatggggtttcaccatgttggccaggctagtctcgaattcctgacttcaggcgatccacctgccttggcctccgaaagtgcttggatttcaggagtggccaccgcgctcggccctaaattcttttatttaacttttaagttcagggttataagtgcaggtttgttataaaggtaaacctgtgtcttgggggattattgtacagattatttcgttttcaaagagaatttgcaagtatgtcacaaaagcctcataaacacgttgtgagattttaagaggcaatgaccgaggcttggagatgtctcgtcctgtccaatgtcaccgctagacctgagaatctgcacttgggagcttacagacccggttctcaggcttcacttgagaccccaagaaagaaaaaaacccaccagccaaagaggaggatggcagcctggaagaacctaaggaagcgaggctcagaggtgaagcactgtggctcctctcccccttctcccccctccgccccctctccttctaagatgaggcattttctaggggagcaaagctgcagcaggaattcggcgaagtggcggagctggggccccagcgggcgccgggggccgcgggagccagcaggtggcgggggctgcgctccgcccgggccagagcgcaccaggcaggtgcccgcgcctccgcaccgcggcgacacctccgcgggcactcacccaggccggccgctcacaaccgagcgcagggccgcggagggagaccaggaaagccgaaggcggagcagctggaggcgaccagcgccgggcgaggtcaagtggatccgagccgcagagagggctggagagagtctgctctccgatgactttgcccactctcttcgcagtggggacaccggaccgagtgcacactggaggtcccagagcacgacgagcgcggaggaccgggaggctcccgggcttgcgtgggtaaggtcctgggtccccaccgggcacggcccatgcgtcccggggacaggggtggctgtgcggtgccgcggcggccggcggggctccttccccagcaggggtggggacgctgagtcacggatctgtcaccgctttgcacctctccgagccctcgggggccaaagcaaaagcgaaagcgaatgcgactggcggggcggcaggtcccagagcagcgctcgccacctccccccggcctgggcagcgctcgcccggggagtccagcggtgtcctgtggagctgccgccatggccccgcggcgggcgcgcggctgccggaccctcggtctcccggcgctgctactgctgctgctgctccggccgccggcgacgcggggtagggagctgggagcaggggcgcccgggcgggacttggaagggggccgggacgtggagctggagggaaccgggcgccccatctccccgggccgtgcgggggcgtcggtgccctcgggagcgcggtgcgcgcaggcccaggccggggaggggacgcggcgccgggcaggagggacacgtgccgggagccggggtcgcagggagagcgccgccgctgcgcccgggtcacccacgtaagggagcgggcggcctggctggggtctccgaggccgaggtcaggagcagttctgagaagcccgttttggccacgggagcgcggagccggcggcgtccagcagtttggagacacgggcgagtgcgcttctcccaggcgcctggactgcagggcgggtgttgcatagcacgcggtcctcggaggggtccgggagaaactactcctcccgactcccaggcaaaagtaaattatgtcagtgggagctgggagggtggggaggagctgtgtcccagggggaaacgcgtcgggcaagttgcacacctggggacctggaaacaacttccaattcttaagcgatcaggaaaccagcagaggcggtcgggaccggatgggggtggggagtgggggccagcctggagtctacactcgcagaaaaagggggaagagatctgtgatcgcttggtgtattcgagaagaaagcgggtcgcggagctctgatctcggcagggaggacggaatgagcgattcctaggggttttgtcccggcagccagaggaaggaggaaaacagtagcagggtctagctctatccttgtcagcgcttctttatctttttatagtcagggagctcttggagggtctgatgaaagctatgaacccccggcccccagaaaaatgcatgaatgaacatagttacaaa

SEQ ID NO: 4925 - DNA, 6000 bp, Homo sapiens
cagattcaagtcattctcctccctcagcctcctgagtagctgggattacatgcgcccaccaccacgcctggcgaatttttgtatttttagtagagacagggtttcgccttgatggccagtgtggtctcgggctcctggcctcacgtgatccacccacttcggcctcccaaagtgctgggattacaggcgtgaaccatcgcacccggcaggctctttatttaatagactttcttttcctgatctcactgtcttcagggagagcccggatggcagtcctctggcttcttccagctcaaaggtctatgatttcacgttgttctatgaaccaggttcttctctgttcctgagaccatctgcagcaggtggtgagaattttaagaggcataataataataataataataataataataataataaatgtttagtgttttactgtagcaggataattggcagagggaaggctgaggtttatggaattaaattttcatgtatacacaggagagtatgcttagctttcaaagcatttcacttaccactagggagggatttaggagcccttgctccatcagtgactatcgaaacatatgtttacatgaaaccgtcagtccctgaacatctgaagacattattatttttaaaatttttaatttttgtgggtaattaataggtgtatatattatggggtacatggtgtgttttgatacaggcgtgcaatgtgtgatagtcacatcatgggaataaagaaataattttttgtaaataattagcctaattaataataaaaatctagttatgataaaaggaagcattataggcaaaatatgattttaaattaatgctggagcagattaccttacatggtaacatttcagtggattaatttttacatataaccttgagatacttaagaaaagattatggagatagacaatttaatatttttagtaggccaggtgtttatttgacagtctaaaagggtatgaaattctgagattggagaagcattactaatgcatatctctactgccatgtcaataggtccccaaagatattgctttaaaaataaatttatcagatcacaaaggaatttatagtcattataggaaattgggaaaatgtagaaaaagctagattaaaaaatcctaaagtatatcattattactaatatttggtggtattgatttcctgtcatcgctccttgtatatttattttattttaatattcgaaggagattattcagtacatactaacccataatgacttttttcacctaacaatagcttgtgactatttccccatgttatttattatgtcattttcaacattgctcatcccatcatcacaatacagccaccaattcctgttgtgaaacacttagaatcttttcaaatcttcaccattagaaacagttctgagataagtatctttgtagttaaatgttttcccacacccatgattggacaatgatttaaaaaataaaaagactcaaattgtggcttctaataggagtaatatatagaaagcagaataaaaatgtaaattctagtaagagcagacagcaactagccaccacatagaaaggaaacgctggtttttatatgagacagacctgtaactcagggtgacaccaagtaactcaaaatgtggtatttcgatgggttttttgctctcatgcaaagcccaacattatgagtaattgttacttttagatgatatttcatatttcctgccccaccctgtcagcacatggcaaggcggctttttctgtgcctatgtcagggagcatgctatgagtggccatgtgccttatggaggggacttagcctcccaagggccatcttggagtcggctgggatcaaccatgctctgcttatcagccttcctctacatttgcctcatttatccaccatgatttgattttgcatttgcccccttgggctttgcttatccacaatggaagcgctgtatctcctctgtgattcttattatttatttatttatttttttttttgagagaatcttgctctgtttcccaggctggagtgcagtggtgcgatctcggctcactgcaagctccacctcctggggttcaagtgattctcctgcctcagtcttccaagtagctgggactacaggcgtacgccaccacacccggctaattttttatatttttagtagagacagggttttgccatgttgcccaggctggtcttgaactcctggcctcaagtgatcacccgcttcggcttccctaagggctgggattacaggcgtgagccaccacaaccagcctctgtgattcttgctttgcaatttctactgttgttacaggaacatttcaaagcccttcaaatttaaagtaacctgaacttggataaagttccaagtttttccaggagatgtgagtgcaaacctcagcaacaacatttttaacaatcaccctaatgaggcctctccacagatcctgctgtggtggttgtttggggtggggaacatctgagcagatgccctgagaattccctaggtcccatccttctggatctccagtgattcagcagcaggaactacagggctgggtaggacccaaaggggaagggaggctgcaacaggaagagatgctgctcacttttagcatgagagccactttgcttgccagtggactctatccacctcaccgtggcagccttaacagcctctggtttcctaactctctttgctgctgtcccctgcatgatctgtcctcccgcaatcccttccacacacacagcatgcttatctccaccccacacaggatgattcgccttggtttctgcatggctgtccgggatgcctcagtctccacaatgcccaagttgtcatagcaacacactgcgaggattggcctccacctcctcactgaattcatcacttccccatctgccctaccagtgacgatttctgtgaactcttttatgtgagtcagctcctgttctctaatccccaacatctttcttttctcatagctattttgggtggtttctctggaaaaaaatgttgattccctttgcctctgacaaagagttagagtaacaatttgagcacattccacatgccaggcctcatagcaaaccttttacgtggtttatctcatttgctgttggcaacaatattatgagataagtaccattatggtgccagatttatagataaagacattttagcttgaagaagttcaataattttcacaaaattgtgttctctaaattttagagctgggctatgaacacagagcctggctctggccacattgacattagtcaagtacattctacaataaaattgctttcctgcttgtgattgaaatataatcttctattagtgacactcacttcaaaatgccactctataaactgattgagtatagttctcaaaaattgaacgatcatcttttcattgagtagaatttttattctatagaaagaataggggattctctactacacccaaaatttctcctcacagcagatgaattatttcaattacatattaagctctaaagaatagaggttttatggaatttgcaaagatttataattggaaatggaccaaattattctccagaagtttctccatgttttaatgatatcatcctaaagaaactcttgagttgctttttctacatgaactatatttaattaattcttaaaattgatctcctataaaaaagaattttcttccagaagaccttccaggaaataaaagaaacaacatttacaaacagtatgaattagatgtcaatctaaaacagaaagggctgagttttaattgtcactcactgtgattctaaaatgagtttggggctgggcatggtggctcgcacttgtaatctcagctctttgggaagccgaggtgggcagattgcttgagcccaggagttcgagaccagcctgggcaacatggcgaaactctgtctctacaaaaaatacaaaaaaagtagctgggcatggtactgcatgcctgtagtttcagccatcaggaggcttaggcaggaggattgcttgagcctgggagggtgaggctacagttaaccttattgcaccactgcactccagcctgtgcaacagagcaagatcctgtctcaaacaaacaaaaaaatagttaagaaaaaaagttaatctctacatcccaagctcatatatataagataattacttgtaattttaatttattacagttttaaatttttagccatgaaacaatttagcaagcaaggcacttgaaagacatatttttgttcttggagatcctgcagttcataaagttgatttctactgaggggacaggtggggtgtctgggtctctgctcacttagaacttgactttcagtgactcctaagtaccctcaatcttacaaaaaaattggatctctatcagtgattgaccacacgtggtgtctttagtgttatatcctcccctttgttatgggtccttcctatttagaagtccacggatcacttcctattgcaactggagtctgaattcactaatggtattgtaaagtatgtgccaaattatcaaacccgcacaaaggaagtagaaactggtaagtatggctaaggcaagagatttccttcctctctgagtgtgtcaagaggagttgagatatttgggggtagggtgggggtggggggacctaagccacgaaaatcctaaatgaataatctctttaagagaataacaaaagatttcacagaggaaggttttgtaatatacacatctccgcatctgaagatatatttaatggccaatttgaaaatgtaagcattattttagtaatttagaaaaatacccctaaacacagttatagaaattagatctgcatattcaaggtgagaatcgcaatctttcttagtttttactagtttcctttctgtaactcaattagaacttcaagtattgttcactctgagtagatcttcaggctctctaaaagcagggccactccagcttgcttgtcagtagttgcaatgagtcacagctggaacgtcctgtggttaacattctgctctgaaaacagaatcagaatcagtgagacggctttccatggtaacctgtatttgtatactttgaaaaatgactgttcctttttgtgtggttttgggtggtcaatttgcgcgggaatgaattgtagaggtgacgttacccatctgtgtgaatataaacaaaaaacctgattttattaacggcaaactttaaaaaacgaggtatgagtttttttttttttccttttcgagacattgttctacacatttattactagattggacattatatttaagcattttcataaatgtctatttgatgcttattttaatgcataattttctccccccaaaggcaaaaagaaactaattgtcattcatcagtgttgccccccaaacctactgcctagcccctccacccccacccagtacttttacaatgtgttattaaagaccactgaacagctgagatccaggggtctccttcaatgcgtaatcccatccagaaggaaggaaaaaaaagaaatctctttaagtcacgtgaaaatgccacatttcttaatcttgcagagctgacaggcaaaaatgctatgctgttcatgaccttgtgcaggattgaaatataattccgcaacatgctgcgacctagtattccgtaagacacatcgagcttagggtgattatagttatggagaaatcttacctatgttttgttggataagggttatgatgacttagcctgggctcagaggcctgacagaaatgaaataatttatgctttggtcactaaattacaatccaaaggttaagatttggggagtgaaagatggtagagcatttgcttgctaattactccactacttgggagcagtatgtttgtttctgtgctaattagtttagaactgtacttcatgccctagaattaagaaaaactctaaagctgagatgaatctcctgcagggaagcagggattta

SEQ ID NO: 4926 - DNA, 6000 bp, Homo sapiens
aaaaaaaagccaagagtaatggcacacacctctactcccagacacttgggaggctaaggcagggggattgcttgagccccagaggtcgaggctgcagtgagccaaggtcaagtcactgcactgcacaacctggatgacaaagtgagaccctgtctcaacaaagaaaaaaataaataaatatgtaaatacaaaaataaataaatacatgctatactcatgttcaaagcaatatattttaaaaaacacagggagatgaaagaagagttaatttctaaatgaatacaagttactagtaaactttagataacctggaaataagtgcaagtggttactgtgaatatctgagactcaaatatgtaatttgattacttgaatttttaagtaataatttggagaagtcagtctttacctgtggatgattccatgtctgtgaaggtagtctagagccagtgctacttcagaaatatatttcacagccatctcttcatcaaaataaccatatatatgtaggagagacttgacatctcccccaataagatattccattacctttcaaaaaagaatttaatattgtgaaataaaaacaatatgattactttaaaaatctagtatttgggcattacagttacaatatttggcatggctctgtaatgaaacgaccttttcttgctattactcgtaatacattaatactaggtttattcatgttgccataacagtttttaattaaaaattaaactgtttaggctgggcacagtgactcacgcctataatctcagcactttgggaggccaagatgggcagatcacttgaggccaggagttcgagactagcctggccaacatagcaaaaccccgtccctactaaaattacaaaaaattagctgggcctggtggcagctaatttatacaaaaaattagctgggcctgtaatctcagctacttgggaggttgaggcacaagaattgcttgaacccaggaggtgcagagtggccaagattgcaccactgcagtctagcctgggcaacagagggagactctatctcaggctggggtgcaattatgtgcaatggtatctctattagctagctgcataccaccatgcccagctaatttttactttaatttttttgtagagatggagtctccttatgttccccaagttggtcttgaactcttggcctcaagtgatctttctgtctcagcctctcgaagtgcttgaattacaggtgtgagccatggccccttggcctgtctctctatgtacatatacatacacatacacacgcaccgtatgcatatatcttattggttctttttctttggagaactctaactaatataacaggtaaatttgccaaggcagtgagtgcagccagaattcaaatgcaagcactctgaaccaaaacatggttctcttaaatcactaggttcaatgactgcttaatggataaagaaacaacataaaaattatttactcaccaagtagacattgtttgcagactgcagtgaataatacaaatggacaatgaatgggcttttgcttagtgccagtgcatctctctcagcttggacctgatgagtcatatttttgttgatcatgtctgcttttttaacaacctgtaatagataaaataaaagtgatatcatgttattttattttgagacagagtctcattctcttgcccaggctgagtgcagtggcatgatcaaagcttattgcagccttgatttcctaggctcaagttatcctcccacctcagcctcccaagtagctgggactactggcacacatgactacatctggctactttttaattttgttgtagagacaaggtctcactacgttgcccaggctggcccaaaatgagcctcaagcaatacccctgtcaaagtgctgggattacacgtggaagccacagctccctgccttgtttttaaattacagagtgatctcaggtttcaaagttgccatcatgaaaacgctaacagagagaacacatatagatgtcatgtggaccttacactgctatcaggaaagcacgtacaaaaaatagttaagacggtttaaaaaaatcttcaagatagaattgcttatcttggtattaaatggcagaagtatcataatctctttcaagaaggaaaaaaaattaaatattcccagactgccctgcatattaatagaaaaaaaattctgttccactgttctgataacgaagtcaaaagacagttacattcctcataagcccacagataactagcacctgggcgtggagtaactacttaatttttttttttaacttctgattttttgatagatggggatagaatcagaaagaggaagaatgtcggaagtttgcctagaaaaaaaaaatcttaagttggaatgattagaactactgaaatttaacagtcccaaatgctgtcttacagaaaactaattactcttttcaagtttcaaggtaatctgtacagaaacagaactattaaagttggagcactaagaaaaattaaaaatacataaataaataaataaaaataaagttggagcactaaactgaatagtcagtaacactgggatcaattctcaggactgctataagaaaaaaaggcatatttctttcaaagatttattcgagtacttaataaaatcattagtacatgataaattcctgccttaactcctttctttaagaaaactgagggaaactgacaaagcaagctggtaacatgatttttcctatcattccactggctatgagggcatgtgtgttttgttccccattgttgtccagttcgtagacacaaagagggtgggtgctaagcaaatactgactgaacacatggattggtgttttcatttcaactgatcatgactaagtactgtagaaggaaaagtaaaaatctcaggaacatataaagtaaccaattcaatcagatcttccaattctgaaagattagggaaggtgtgaaggggagctaagatgaatcttaatacatgaataagacaggtggagaagagcacaaaagggtagaagaaaagcacttaaaaaggaaccagcataaggccaggcacggtggctcacccctgtaatcccagcactttgggaggctgaggcgggcagatcacctgagctcaggagtttgagaccagcctgcccaaaatggtgaaaccccgtctctactaaaaatacaaaaaattagcccggtgtggtggcgggaatcccaactactcgggaggctgaggcaggagactcgcttgaacccgggaagtggaggttgcagtgagctgagatcacgtcactgtgaaactctatctcaaaaaaaaaaaaaaaaaaattcatagcagggcagggcgcggtggctcacacctgtaatcccagcactctgggaggccgatgtgggcgggtcacctgaggtcaggagctccagaccagcctggccaacataaccaaaacaacctggctaaattcaatctcggctaaaaaaaaaactacacaaatcagccaggcatggtggcgcgcgcctgtaatcccagctactcgggaggctgagacaggagaatcgcttgaacccaggaggcagaggctgcagggagccgagactgcaccacagcactccagcctgggcgacagagaaagactgtcttaaaaaaaaattattaaagacttctcagaaaatagtaatctttcttctggttaagaataaaacttaaaaagttatcagtgcctacagattaatcactcttctgtggtagaaaaatttcgacgattctgcacgtcaaagcaaacaaggtaaacaaaaccactaattactaaaaaccttttggatttagaaacctaactcgccgggcgcggtggctcacgccagtaatcccagcactttgggaggccgaggcgggcggaatacgaggtcagggaatcgagaccatcctggctaacacggtgaaaccccgtctctactaaagaaaccccgtctctactaaaaatacaaaaaatcagccgggcgtggtgacgggcgcttgtagtcccagctcgtcgggaggccgaggcaggggaatggcgtgaacccggggggcggagcttgcagtgagtcgagattgcgccactgcactccagcctgggaaacagagcaagactccgcctcaaaaaaaaataaaaaagaaacctaactcaagccagggtgagactacgaatcacggctttggctttaagtgcctgttgtactaagaccgatgtaatcacctcggtcaagtccctttgcctttggcctcagtttcctcatttgctaacgctgggcagggagaagagagtcaaactttgctgttctcactgggcatctgagatatggagggaagggcggaacagaggcgagacacccgacccgaccgctgatgtcgccccaaaaagaagtcagctcgcagggctctggaggcttcagcaagccaggccacccagactcctcgctccagcaaccccggggcctgcccaagccggtggggcaggaaggagggccgaagggcctaaccccttccttgctactcgttgacttcctacctttactgcatacaatttgccgcctttctgccccagatacactttcccgaaggcgccccggctaatgggcttcactatgctgaattcctcaatggagggcggttttggcactgcgatcctattcacgccctcctcagtcgccgcgcctcctccaggctccttcttgcttcccgcggtgggatccatcgctggacagcatacagcggccccgcagacactgcccctccgcgagcagccactcccgccaactgggttcaaagtgaggctccgcccacgccgcgcgcggccgtgacgtcaccccgccgccgcgccccgccctcgtcacctcccctacgcagacgcggacggagggggcgtcgggaaagccccgacttcgcagccttacactcttcgtgggcggcgaccgcggccccactgacatcattcctcatgagggaggaggcacaaacagttctgggccgaccagaaaaaggacgactgggacttgactctgaatcgcaggatttgaagagatttctcctggcttcccaacgaggctggtgggaagcggtcctcctcccatacacgacctcccaccctcgcgaggcgtagaaaccagttctgactgtacagtaaagcgagggccagggctgaggtctggaagctaatgaaagcacagaaagtgtcgaaactggatgagcaggaagcgagtggcctcccctgtcatctgacgttttcccaggatgtaatttgcctgactgaaacagatcaggaccaacagggagagttttcgatttagtgtgaggaaaagagcactaaattgtagcaaaagaccttattgctcaaggcccagtcagaagatttcataaggaagctgtagaaagtcttaagaggaaatcagccgggcgtggtggcgggcacctgtaatcccagctactcgggaggctgaggcaggagaatcgcttgaacccggggagcagaggttgcagtgagccgagatcgcgccactgtacgccagcctgggcgaaagaacgaaactccgtctccaaaaaaaaaaaaaacgaagaaaaagtccaaagagggtaaaggctgttctccccttaaaaaacagctaaagacctttgggggcgctgctccttgtaaatgtcaactacttccgcgggaaagaacgcgcaggcacttggccttgtgggcgctcacttgccccggaagtactgttgagttagcgcctcgccttccggggcggattgtctgtcgttgcagtagctgtaggaaggggaggccattttccgtttctgggaggagtgaggggcaacgggtcggagaaaaaggaaaaaagaagggctcagcgcctccccgccgggccgtggacagaggggcacagtttcggcaggcgggtgaggtcgctgagggcccgccggagatgttttccttgtcgagcacggtgcaaccccaggtaagccagg

SEQ ID NO: 4927 - DNA, 6000 bp, Homo sapiens
agcgtgatgcctccagctttgttcttttggcttaggattgtcttggcaatgcaggctcttttttggttccatatgaactttaaagtagttttttccaattctatgaagaaagtcattggtagcttgatggggatggcattgaatctctaaattaccttgggcagtatggccattttcacgatattgattcttcctatccatgagcatggaatgttcttccatttgtttgagtcctcttttatttcgttgagcagtggtttgtagttcttcttgaagaggtccttcacatcccttgtaggttgtattcctaggtattttattctctttgaagcagttatgaatgggagttcacccataatttggctctctgtttgtctgttattggtgtacaggaatgcctgtgatttttgcacattgatttttgtatcctgagactttgctgaagttgcttatcagcttaaggagattttgggctgagacgatggggttttctaaatatacaatcatgtcatctgcaaacagggacaatttgatttcctcttttcctaattaactgatgggcttccctttgtgggaatattgttatgtgttatttctttctcctgcctgattgccctggccagaacttccaacactgtgttgaataggagtggtgagagagggcatccctgtcttgtgccagttttcaaagggaatgcttccagtttttgcccattcagtatgatattggctgtgggttgatcataaatagctcttattattttgagacacatcccatcaatacctagtttattgagagtttttagcatgaagggctgttgaattttgtcgaacaccttttctgcatttattgagataatcatgtgttttttgtcttaggttctgtttatatgatggattacgtttattgattgcctgtgttgaaccagtcttgcccagggatgaagccaacttgattgtggtggataagctttttgatgtgctgctggatttggtttgccagtattttactgaggatttttgcatcgatgttcatcagggatattggtctaaaattctctttctttgttgtgtctctgccaggctttggtatcaggatgatgctggcctcataacgtgagttagggaggattccctctttttctattgattggaatagtttcagaaggaatggtaccagcttctgtttgtacctctggtagaattcggctgtgaatccgtctggtcttggactttttttggttggtaggctattaattattgcctccatttgagagcctgttattggtctattcagtgattcaacttcttcctggtttagtcttgggagggtgtatttgtccaggaatttatccatttcttctagattttccagttaatttgcatagtggtgtttatagtattctctgatggtagtttgtatttctgttggatcggtggtgatatcccctttatcattttttattgcatctatttgattcttctcttttcttctttattagtcttgctagcggtctgtcaattttgttgatcatttcaaaaaaccagctcctggattcattgattttttgaagggctttttatgtctctatctccttcagttctgctctgatcttagttatttcttgccttctgctagcttttgaatgtgtttgctcttgcttctctagttcttttaattgtgatgttagggtgtccattttagatctttcctgctttctcttgtgggcatttagtgctataaatttccctctacacactgctttaaatgtgtcccagagattctggtatgttgtgtctttgttctcactggtttcaaagaacatctttatttctgccttcattttgttatgtatccagtagtcattcaggagcaggtcatttagtttccatgcagttgagcagttttgagtgagtttcttaatcttgagttctagcttgattgcactgtggtctgagagacagtttgttataatttctgttattttacatttgctgaggagtgctttgcttccaattatgtagtcagttttgcaataagtgcggtgtggggctgagaagaatgtatattctgttgttttgggatggagagttctgtagatgtctattaggtccacttggtgcagagctgagttcagttcctggatatccttgttaactttctgtctcgttggtctgtctaatgttgacaatgtggtgttaaagtctcccattattattgtgtgggagtctaagtctctttctaggtctctcaggacctgctttatgaatctgggtgctcctgcattgggtgcatatatatttaggatagtcagctcttcctgttgaattgatccctttaccattatgtaatggcgttctttgtcccttttgatctttgttggtttaaagtctgttttttcagagactaggtttgcaaccactgcctttttttgttttccatttgcttggtagatcttccttcatccctttattttgagcctgtgtttgtctctgcacgtgagatgggtctcctgaatacagcacactgatgggtcttgactctttatccaatttgccagtctgtgtcttttaattggagcattttgcccatttacatttaaggttaatattgttatgtgtgaatttgatcctgtcattatgatgttagctggttattttgctcattagctgatgcagtttcttcctagcatcgatggtctttacaatttggcatgtttttgcagtggctggtaccagttgttcctttccatgtttagtgcttccttcaggagctcttgtaaggcaggcctggtggtgacacaatctctcagcatttgcttgtctgtaaaggattttatttctctttcacttaaagcttagtttggcttaatatgaaattctgggttgaaaattcttttctttaagaatgttaaatattggcccccactctcttctggcttgtagagtttctgccgagagatctgctgctagtctgatgggcttccctttgtgggtaacccaacctttctctctggctgcccttaacattttttccttcatttcaactttggtgaatctgacaatcatgtgtcttggagttgctcttctcaaggagtatctttgtggctttctctgtatttcctgaatttgaatgttggcctgccttgctaggttggggaagttctcctggataatatcctgaaaaatgttttccaacttggttccattctccctgtcactttctggtacaccaatcagacatcgatttggtcttttcacatagtcccatatttcttggaggctttgttcgtttctttttactcttttttttctctaaacttctcacttcatttcattcatttgatcttcaatcactgatatcctttcttccactggatcgaatcggctactgaagcttgtgcatgcatcacatggttctcatgccatggttttccgctccatcaggtcatttaaggtcttctctacgctctttattctaattagccattcgtctagtcttttttcaaggtttttagcttctttgcgatgggtttgaatatcctcctttagctcggacaagtttgttattaccgattatctgaagccttcttctctcaacttgtcaaagtcattctccgtccggctttgttccgttgctggtgaggaggtgcatttctttggaggagaagaggtgctcaaattttagaattttcagcttttctgctctggtttctccccatctttgtggttttatctacctttggtcttccatgatggtgatgtacagatggggttttggtgtggatgtcctttctgtttgttagttttccttctaacagtcaggaccctcagctgcaggtctgttgggagtttgctggaggtccactccagaccctgtttgcctgagtatcaccagcggaggctgcagaacagcaaatattgcagaatggcaaatgttgctgcctgatccttcctctggaagcttcgtctcagaggggcaccgggctgtatgaggtgtcagtcagcccctactaggaggtgtctcccagttaggctactcgggctcagggacccacttgaggaggcagtctgtccattctcagatgtcagactccgtgctgggagaaccactactctcttcaaagctgtcagacacggatgtttaagtctgcagaagtttctgctggattttgttcagctatgccctgcccccagaggtgttgtctacagaggcaggcaggcctccttgagctgcaatgggcttcacccagttttagcttttttttgctttgtttacctactcaagcctcagcaatgggggatacccctccctcggcctccctgctgccttgcagttcaatctcagactgctgtgctagcagtgagcgaggctccatgggtgtgggaccctctgagctgggcatgggaccctctgagccaggcgcgggatataatcttctggtgttccgttttctaagagcattggaaaagcgcagtattagtgtgggagtgtcctgattttccaggtaccgtctgtcacagcttcccttggctaggaaagggaattccttgaccccttgtgcttcccgggtgaggcgatgccccgccctgcttcggctcacactccatgggctgcacctactgtccagcaagccccagtgagatgaacccagtacctcagttggaaatgcagaaaccacctgtcttctgtgtcgctcacgctgggagctgtagactagagctgttcctgtttggccatcttggaacctcttaaattatttttgttttgtgtgattgcaattttggcatgtttcttcaggtgcaatgaagggcgtgttggtagacattgtgaatgcagcacagatgaagttaacagtgaagacatggatgcttactgcaggaaagaaaacagttcagaaatctgcagtaacaatggagagtgcgtctgcggacagtgtgtttgtaggaagagggataatacaaatgaaatttattctggcaaattctgcgagtgtgataatttcaactgtgatagatccaatggcttaatttgtggaggtaagtaaagggcctgaagtggttgtaagatgtgatcccatctaatgccacgaaaaatcttgagtttagttggtgcataagtagaaaaggggtagcttgagggtcagtctcgcccctaggtatactttctcacatgttgttgcttattttacttttcagtcaatactgtgattgtatatttttaccattttgagaaatgatatgcttaattgcaggaaatggtgtttgcaagtgtcgtgtgtgtgagtgcaaccccaactacactggcagtgcatgtgactgttctttggatactagtacttgtgaagccagcaacggacagatctgcaatggccggggcatctgcgagtgtggtgtctgtaagtgtacagatccgaagtttcaagggcaaacgtgtgagatgtgtcagacctgccttggtgtctgtgctgagcataagtaagtatttcctaattgcttgaaatagttgatacttcctcttggctctcctaagcctgtattgtttctagaaccagaacagtgccaatattaaaatatactgtaaataaaatgcctgccatgtggaagcctactctttaattcttaaaagttctttctcaacagctagtatatattacatggtatgaagtgtgtcatgtgagagttgtactattattttgatctgaatgtgctagataattgaatttacatggtaacctttattttggcaattaagatttaatttaatttaatttgtcattaccaatttcttaattactgtcttttgacaaaactaagccaaattaaagatttttcctcttgaaggattattatactagtaacatattatttaaattattatgattttggccgagcacagtggctcacacctgtaatcccagcactttggaaggccgagacaggtggatcacttaaggtcaggagtttgagaccagtctggccaatgtggtgaaaccccat

SEQ ID NO: 4928 - DNA, 6000 bp, Homo sapiens
tggttggaaaattttctttttaaaaaagaacatttatagaacacctactttgagtcactaaagctgaaagaataccattcatattatattactacttccttgtgagttaagcagatttttttgagtttcatgaaaaactagccaatttttctaggagaatgccttccatagaaaatgtgctcccagctcaaatttttaacttacgaaattatcaaaacaataacatgataacaacagcttctctggtcagcttagtcgtccccgtcaatttttttctgctctccaggcactttcggctcctctcctccactgtcattcttactcaaaggtacgacttacttcacagagaaaaccagagtagagagaaattgccccccacacccacccactgaaatgacaaaccttcttgtaatcacacccatcagctcctctttccccactgctataacagaggagctgtccctcttccaacttacggtaaatctgtccatctgggctgtagattgtatcccttcctgccttcccaggcaatcaacacccggattatcttttcagtagtttaatctcaacatatcccccaatactggattctatccattggcattcaagaatgttcacaagtaccctatcttaaaagcaaacataaaataaaataaaaagtcaacctccctccacatctcctccttccagagctatcgtctgtctcctcccctttagtagaaacttccagagagaattttatctttatgtgttctctctctttctttaccttctattgactcttcagcccattgcaatctgacctctagtcctgttcctccatcgctccactgaatgactcttggaagagtcaattctcagtaaccatgataccactaagtccaattgcattccagtcctcatccgagtggaactcttgatggtgttccactcttgtccagagcttccttttagaaattccccctctccttgacttttatgacaataggctctcctggttttccacctaccacccagctgctcattctcaaggtattttgttagctcactgtgacaatccaggctttaaagggtccttaacttcctatcctgggtctcctgaaatttcctcagcaattttatccattccttccactttgattgccatcatctacatgtcagtgactcacaaacttaaaatctccaatccaaacatctcctctgaattcctaactcatttgattgcctcaaagacaccagaaactgtacctaaccccaatcaaattcatgatcttccttccaaattagccttttgctagtgtccctttgcttacatgaaggcaatcgcacccatcagtgatgagggcctgaatctttggtaacaccctctccttcattggcttatccaccaccatctgtccagttggactttctcaatacatctggaaagcatccttttccaatctccaccgccagatccttgttgaagttctcctttagattctactatggttacttcaaaactggtctcttcatttcttcccttgctccgcccataacccattctacaggcaactgccagagtcatctaataaaaatgcaaaatgaaattacatcctttgagaataaattcaacaattcttaactgttgtggccattgtttgatatttttaaaaattattttttattgatttaaaattttagctatttacataaaactatgattaaatattaagaggcagccagttttctattctggttgttcaaattatattttaaagattgccctatttaaaacagtcctttcaaattttgaatatgttctctctaatgatgtctctattgatttgaagagtgtttctgttggttataattattttaattttcccaatttaaaagtaatccaatgaaggcaaaatcatttaatattattatctcagaaaaataatacagttttcaaatatggctgtaacctctactctagcaaatgttttgaatctagtgtgattcaaaatttagcattatctttcttcatcttgttggttagtaaatatactgtatcacaaaaacttcacattgtaactttgtgttaacgttttagttggtagtcgtttctccaatatttgaggaattttcaaggtaacttttaaaaggctaaaaaggtagaatcagaaagtgaagattcatttgtttatttccttccttctctgtcagtacaaatcaaggagatggccaaaaatgaggcccagatgacacctcttgcatgacacagtcacttgacagaataaccactaataggcttattttaaacattagttaattaaaattccaacttttaatgtttttccagtttcacttcatctattcatacatctcaaaactaggttagctcctactaaaaatatggagcttgtattgcttttctgaaatttatgggtttgatgttttcaaaaaacttgactagatatgatgcagtttgaactaccaacccgaatctccatattgcatgaatctgaagtactttgagggagttagtggctcaaatggccttctgggagcaatcgatttcatctatttctgacaaagggatgagagcttgatgaaaggaatcgagcagttaccatccagtctactcttactgatgggccacggttccaatccgactcagggagccccagctgaaggccttatttctgcagcacctcctaagtgggagtccaggaaactgggctttgcccactcacagcctctgcagggcgttctgggggtgcggtagaggactcttcccttccctggaactgggtcctaccaagtccagggatttgttctatcaggaagaataatgtgttcaagagaccaaaataaaatcaacccgggaacactgccaaattcttcctctgcctatcacttattctcgtatagagccggcctgtctccacgctggggaattgcaaaaatctaaaactgacccctctcaccacttagtggaatccaacagcaaaggaaaaaggttgttagcaaggacaatttgctctgtaccaacccactggccggcaattctcaatcagtgcggtagggctccattacccagcactgtgagtggaaactaaggagtctagaaaaaccttagatcagctaagagcagagaaatcagaggcagaacttaaatatgacatttccttctgagtccatagtgcatcccttattcactggttggagaaagctggcaaaagcgctcagctggaggcaggcgttttctgtgcgttgaggcgccggaggagccattcccttcgggaaagacaaggtcggggtgggggcagtcgctccggagtgcacgatccggtggctttatttgctggcctggcgggtctaggctggaaaatgcacactcagcagggaaaggggaagagagattggcggcagttttctaaaaacaacacagctcaagtctccctcgtgtgccccctcgctcaccccgccgaggctcagagctatccaaacgggcgctccggagcgagcgcggaggtcgggtccccccaggacgcaggcgggcctccgagactccaggccgccccggccgccgctccctcccggttccccttccctgtcaacctgccaggtcctgagaggcgcctctccctccgagcctggaccgaggtcgctccgggtcaccctaaatctgatgatgccgctcgcccggcgcagccgggggctgggactggcggggctgcacctggggaggcggcgaccgcgcgcgggtagtagccgagagcccaggctgcctctgcggcgctcactcccccggggtctgcgctgggcgcggtcggcgcccccgcctcgcctcccgcctgcccgcctgcccgggcgcagggctgcccatggcttcgacagtgctccttccgctcaacttaggcatttaactcccagcccttcggtgcccacttcccaccccgcgcctcccaggggtccgacagctgagaagaaggaggaaactggcagaggaaagaggcgctcgggggggccgagtttccaacttggcgactgggaatcccgaggcgcgtggggaggagaagacaggcttgacccggggcaagagagtggcgagtgcgggctccgtgggtgcacctcccactggcccgggaacggcctgcaccccgaggggcgcacgtcactgctcccagcccgagtcgcgagcgcgcagtcctggcctggggcccgcgcgccttgggctttctccctgcccgcccctttttcttccgccaaaacctttgaccagagtctccttgccagcattcctacctccctttggccagctatttgtgccaggtaggaatcaggctgtactttggctgtgtgtgtagacgccaatccccaggaggcgtgtgaccttttcaccttacccacaaactccctgggaggtgccccgtgggcactgacccttctccggggcctgatcggtgaccgcaacctgtttcttcccagaaatgtccttgcttttcgcatctacaaacgcttcctgcagcacttctcggaaaaccctcggggacgggcctggggggcatccagcgggctgggggcacgagccgctgtgggaagtgggggtggcaggagctccagggccggcgtgcacgttgtctgtggccgggagcggacactgagagggcgcagcgaagagcacccctcccccgccactctttccctccctcgggatgcacagagaaacgggggccgcccgacccctgatttccacacccctccctagcacctgggctcccagacaaggttgggcggggtcgggcggcgattgcccccctgcttggaaggcgcagcacctcccaccctccggtgttccctctgccccagaggaacgggcaccaaatctcgggaaacaatgaagcctccgcggcgcgcagagggcacccagccgcgcgccctgatgcgggccagggaggccgcgtggggctgcagcccggcctcgcccgcccaggcggtctgtcttcgcttcacaccacagcgacactgctgcccctcgcccggcttcgcggtgcggctcccactccagcccggctttcccctcctcgccctccagctctgggcaggggcgtccaggggtgccccgctgctccccgccacaggtctcaggatggcgcgatgaggagtggcagggggtgaccctgcgttcctcgccgccgagggcgcgggccccgggatttgaagttgcgagaagcagccgccacctcccgggcgctccgcactgcgcggcggcgggatctgcgcctgcaggagctgcccagctctccctctaggggtgcagagcgagcacgcgaggtgggctggccagaccctgcggctggcactgacctccgcgccccttcctccgacgcccgcacccacgcgaccggggcgcagactcccagcgccttccttcccgcggagatccctgcagggtctctgggaaagacagacagacggacggggagagcactcggagggaaagttgttcctcccagtctcctgtcaggcaattacaggcgagcccaagcggggagaggggcgggaggaagcgagggaagggctccggagtggggggaggccgcaggaggggaggcgggggtgcagttggtgaaactcctctgtctcccgctcatcttttcattgctcgttcccctccttcccgcagacacccggacctcccctgggcgccagctccgcggctccaacgggtccagaaacaagccggattttttttttttcttcctggaaattggctttggtgtgtgttgccctacctccctcctccccctcccacccacagcccccccccggccttttttttttttttttttttttttgagacatggcccgggcagtggctcctggaagaggaacaagtgtgggaaaagggagaggaagccggagctaaatgacaggatgcaggcgacttgagacacaaaaagagaagcgttcctctcggatccaggcattgcctcgctgctttcttttctccaagacgggctgagg

SEQ ID NO: 4929 - DNA, 6000 bp, Homo sapiens
aggtgggagtccacatcacagccccagccctcaagaaaggaatctggcaaatcccctccctccctcactctctcagcccttcctctcactgggggacagttgtccagcaggttctcagccacctttggaaatctgcgtcttagtctgtcaccactctttggagtttgatagctaatttcttcatgtcttaaccgacacatcaatttagcatattaatacatcaaaaaacaaagtctttccgccctcttatggctcattggatgcatgcctggtgactgagcacattgctgttcctgaaaaaaaaaaatgtgggtcagttgttagcacagaagctggcggaggggcaggagtgagccatggaggctgagcagtaaattaattgttgtttgccacaaatggcccttgctgaaaagaccccatccctaaggggggtcaaaaaactttaggacagctgagtgcccagaggtgacgattgaggaaggacaagccttgcctcagttcctgacttctgctccatgctgaggggcagccttggtggtcaagagactgaagctggaacagctgatgccaacgccggctcagctccttgctaacacagtggccttggcgggctcactcccctctgccgccctctctctccacccctccaggggcaggggctgcatgcagcaggatgcaggggctgccaggacaacataggtccccacctcagcacctgtgctggctccatcctctctggctcctccacgtggggctttccatggccccagacttagctccttctgctcaacaactcctgccagaaaggaggtgtctcttccccagtacatcccacaaaattccagtgttgatcctgattagcctctcgcgggggcagggggtggggtcacagggacatccctgaacctatcactgcagccagaaatgaactaggctgagcagccaggcctgggtcatggacaaagcgctagaataggggtgagtaggggagtgccaggtactgtgtggacagggaaggggaaggaagttgttccctccagagggaaggcagagttctggtgctggttgagaggaggcaggggagcaggcctgccaggcaggggagcagcagggcaggaagcagaaaccacgcccaggggcaggagcgagccacaggcccaagcccaccctgccagtcggagtgactgtctgcaggaggagacacaatttggagccagcatgtttcagtgggggacgagaagttctgatccaacaaggaaagatactccctccaagctcctcaaaagaaggggctggaggaaattaagtctgaggccgccatagcagaaccaaagagcagacaggatgctggcaggggaaccctccccctcctcacaaagaaggacctgggctgacctggtgcaatttgcatgaattgagaaacacagtcttccacatgcttctcagcgtggcctttatcctgctatggcctctgtgttcctcagtgatgagagatgacacttccttagacagggatgattcttaaggttaattgaaagtggcctttctcgtaatcatctgctgcaatgaattattaatcacctgcaggcatttgcaggtctttaaactcttggacttcctgcagccctccttggaagtgcttttgccatggaaataaaacttccgcttggccatgaaagacagaacccatgtctgctgctgtttccaggcttcccagctccacagacacggggaagaacaaggtctgaaaacaggaagcagagccagagctgctgccagaccctggatgcctttctgttctggggagctggctccaggccagccaggtctcagagcccccgggcagtggatggaggggaggctgcccaaagtgcctgtggctctttgcctgattcacggtcagcgccacaggagagggtctcctgggtccttgccctacagctgctcactggtgaagaaggaacgagggagccaggtgccaggcctagatccaccacttagtgggtgggccaggaaacctctttgattcagtttcctcatctgaggaggaggtcatgaccctgcagggcagacatgaggcagggctccatgggatcgtgtacatcaggcctgcatctcaatgctcagaacatcaggagcagcaagaaggatgagctccctcctgccacctgcttttatcttcccgtggaggaagattgactcaaaactcagtgggctggctggcagtgtaaggattttgcagatagagctgacaacgtgattttgcagaccccagaagctggtctgcaggaccagggcagggagctcctgttgggccctaaattgtgagcccaggatgtgtatgatgcatggacaatgtgggcagaagctggggcagctcatcccaatggcaagagcccttcatctgccattcagcacagcctcagccctggaggtggatagtggcgatgccaagctgaataagacacggccccctgccttcatggaggccctcggctgccaggaagagtgaggcagcagtctcaggcacagagtcccatattcggcatggtagctgcaaggaccatgaggacaaggaggggatgatgaagggtttcacagaaggcaagatgctgggggttcatcttgaaacatgagcagtggagaaggagggtgggaggggcattgagtatttcagacagggagagagcagcatggtgggagagcccagtgcatacgcagagccgtggaagtagctgcatcagtctgggcacaagcactgcatagagatgggtggtgggggggatgagaatgggaggggagcctggaagacaacagctgggaaggggagtgggtgcagcatggaatctgaagagctgagaggaggcccatgcagagctccagatgagaggtgatggagggctgggcaaggttttttgccatgatagagatggacagaggaggaacagctgtcaggacttggtgacacagagaaagatggggactttggaaaagcacagcatgggggtcgagagatggcagctctgggcctggcactcaggaagtgccagaagggattcccttttcaaaaaacatcccactacccaactccacccccagaacagcctgagtacagctcgggcgcaatcatggaggcagctggtgtggatgccatgccccattggggtggtcaggtgggggtgcatggcagctgggggaaggggtcaagatagctgacgggttccatgtaggggtcccctgagccttgctagctgcctgagtccagtgttgaggcacactgaactctagacagaggaaggggaaatgtaagccacccctcccagggtactgcatggacaacatggtccacacaatggtcctagagatatcaagtcctcatccccaaccccgtgactacatagcaaaaggggctttgcaggtgtgattaagttaatgatcttgagatgggggtggtggttatcctggattatctgatgagcctcttatagagaaacgccacactctgagatgaattcagaagtcctttattagccggcaaccgagagacggctagtgctcaaaattctctcggccctgaagaaagggctagattttcttttatactttggtttagaaaggggaggaggagcctagctgaagcactcttacagaagcaaaacaggcaaaaagttaaaagacaaatggttacaggaaaacaaacagttccaggtgcaggggttttaaatccatcacaaggcgatagatgcgggggctttgggtaccatcaaccggacacaaatgtgggggcttagggtactatcaactgggcaaattcctgggaactgcggatatagcttgccacagtatcttatccattaattgcattctttgatgtgctgggagtcagcttgcacaagttaagtccttgaggaaggggggtgggtaaggggctgcaagtgaaggagccaaaatggagtgtgtctggctctctcagctaagggacagtcaattcaggttaaaacaaggtagggtatcacacttacaagagggaggcagaaagagttgatgtgaaatgacctggagtgggagaggttagaaaaggctgtgctgccggctttgaagacaaaggaaagggccactagctagcagcctctaggagctggaaacgctgggaaacagctcccttgcctccagaaggcacaggccctgccaacccagtttagattcccgaccccccgaactgtgagataacatgcatgtggcttaaactactcaatctgtggtactttgttgcaggggcaacaacaaacatacagacatctaactcagacccgaggccttgggtgggacccaggccccatttcctgagacacctgctcccacagcgacctggggtaagcagaagtgggggaggattctccagacaccccagactgtctccaagtagagcggagatctcgccagttaagcgcacagctgaggacagttactgggtgaagtggcctgggtctccgccttctcatgcccccaccgcccagaccctagaaggggagtggctgcggcctctgcaccctggcgctgagggctcccagacccggcccagtggggcaccccagttcaccaccctcctcgccttaggtgagccaaagcccaggcagggtggagcctcacgcacactgactgccccctaggacaggcacaggtgacgcgggggtgtgggacccaggctatgactctggacataaccttcaaggctgtaaaacgagaaggtccatccccccaaaacacgcactcccccacaaccaccccctccccccccccacacacacacactcccctgcaccacagatacacacattcctttcgctccccactcagacgcctcgaggcctcggcgggggaaccataggggcgcgaccagggcgcgccgaggtgtgaccagagaggacacgcagcgaccttactcccgcctttcccgcaaggcgcgttcgccagcctggactagtgggcacgggccctgcgttctaataatcaccataataataggcgctgggtgtacagaggggacccaggcgacgctggcctccatccgataaccaccgtaacaggggctgggccgcgccgctcctccgctctaagtgctctttacatgcttcttaagttaccggcaggccagccgcccttacgagagcccctcacggacattaacccaattgagaagactgaacccagcttacgaacgttaagttgtcccaaatcgcagggctggcgagtgaggagcctgaattggaacccaggagcttctggaacccgctccagaattgcgctctcgaccggtttgtccgctgagagcgaacgggtgcgcgagcgccgcatccctgcccaaggccatcaggcaggcagcgctggggccggggacccgcgcggagactccaccccgggatccgggaaggctcccccgagccggggtcggagctgcggctggaggggcctcggcttgaggaggatctgggagggcgggggctcagtcctggccaccaggtgtgaggggtcgggtgcggagccctgtgtcagacgcggcggtgaaggctgtagccctgctctccgggatgggggtggtactctcaccccaccctgccccaagccgcagggagcccctggcgcccctggcgcccgggacccgccctggctggagccctgcggtttccgggagctcacggtcggctctgcgcccctccaccgccgggcctgggcctgggccagggacgggctggggcgggactgcggcctcggggcgctgggtccctgcccctgccgtgcactgcgcggctccccgcgccgcagctgggcaccagcagcaccacggaccgcccctgtgctcgcccgacggcgccccgcggcgctttaagagacggcctggcagcccagccccagccgcccagaccggcgagaccagcctgcgggagcagccccatggcgggtaagcgagcctcgcctccccagcccagccccggcccctct

SEQ ID NO: 4930 - DNA, 6000 bp, Homo sapiens
gtacatctttttatctattcctcctaaattttcttaacttgttcattggctatagttagtgtaagggtaattgggaaatgtttaaatataatttgaagaggcatatcattaagatcattgttatattttagtactgttgccataattagtaatcataaaacatcgggttgtttaacagtatctctactactgctgcagagcttgacacagcacgagtgggcccacaaaatgctaatcactgtccagacagactctgtggacattttaaggatgctagtaccatcctggcatctgccatggaagcagatgctatttgcatctgtttgctatgacaatcactgatgatggcagaaaaaaacatctacattttaagacaatctgttcaaatattcaagaacatacttggcttgtcaaggcactttttaaaagttgttgtaagaaatgagatttataggaaatataaattattaagctaccaatacatttttttctgagtttactactacttgtgaataaatatgttgagtatggtttctaatcaattgctctgttgaattctgacacagtttttgagagagagagagtaaggacattatttttcttttgacttacactagaactattgactatatttgccatgtactgtgaatttgaagcttattgtttctataagtttatatatatatgtgtgtgtatatatatttatatctaagaaaatgagtttcattatttttataacaaaagcaggttataagtggaaattcaatactatgtactgtcctgtaaatttaatccatcaattagtattaaaatgtactttattatgtgtattaaaccaaggttattttcactattttagaagagaaaataaataaaatatattaattatcttgtagaagagaaacagttgttagtctacacagtactacaaatcttgtttctttgacttgtcaaggcatgaaaaaaaacaaaaaacaaaaacaaaggcaaggacgtgcttaggttacataaggcagctttgctatgattgatcgcaaacacacagtaagttgatccttctgggcatagtcaagggaagttcctttcctcggcgcttttggaaacgtgatcctatgagccctggattgtcagagtccacgctaactgtgtgctagttagtacccaccctgctgtgaccctaaggtcgactgttacccggggagtcgggagggggaacaggagcaagcaggagccacggagcgagttgggatggagagaatcggcctcctgggaaggaagcaggaacagcaggtgtgccgacctcctccttctactggcgctcttgggcaccgcgcggggaaggcagtggcgcaccagctgcagttcccggcgcgcccggaagcgctgggggagccctaggcccgcgtttggccaccctccgccggtgctccgggctcgcggtctggtggaagtcgcagggtcgcccagagccctttcgctctgttcgactggcgaagccgccatgactgagcggaaaacacttgtttccggacgccaagacttgcgcgctccggccgcgcgcttttctgcctaggaattggtgacgagggccgagggccgccgtgctgggggaggttgggcagaggctggggtgccggggctcccctccctgcagctcccggcttcgcccagtcccgggccaatcgaaagggacagcagaggatgaggtcctttccgcatccttttgagtggaaaccgattacacggggagggaggtaacagttcttggtagaaaatctcccacgagcgattctgcttttgttggtgtcgttcctcctttgggaaagcgcgtcaacgggtcagtgtagatccagacagagttttgttcccggagactggatgtgtgggtgggcgcggggctgaccctgcgggacagggaggggtcaattcggccaaggagtaccctctccacccaccatgtgaagggcgccgttcgggtctggccatggagtccccgagaatctgatctccaagggattggagtgaccccttcatcctgatgtcccagtgatcacaataccccactagcctcctgagcccgcccggcaccgcaggctcagggctagaaggtggttcttgccgcgcgccgtctgcgggtgcgctggttgcgtccgcctttgcatctcggttcctgtccgcgctcgctccgcacccaggctgagtcaggaatacaaccgaagatttccgactatgctcccctgagctggccaagagtaatgttccctgaaatcatgccctcccaaaaagcctcaaaaatcaaggacatgggaagtggggtttggggtggtgggttgtggtcgcggaatccaggaaagccctccccctcaacccgaaagcattttgacagagtgctaggcttggaagacctgagacttagtgagagcaaggagtgtgagcgtcaaccaagcaaattaactgtcccctgatttcttagaaaatttcaccggaaacatttctatgaagaaaaattaaagtcagtttatgttattgacgcttttccatagcccttcaatgtttttctccccatccccactcccgacttctttctgaaccttctgggcgtattcttcgcagagcaaaaatgccgtaactgttgccagtttccgaagtttctaacgccttttgacagtcctcttcgtcaagtttggtcagactctcccagttcaggaccaacatcagaggatgctctagaagtggcgcctgagagcctaccggtgaatggccctggctaggaagagaaggaggttacacaggagagcctacagatatttgtaagctctcttagtgatcaaccttcccaacataaacgcgccagcgcacacacaccaagtgaaagagagagacagactccttgaccgccgctagagggagggccgctgggcagttgtgcaaaaatgaataaatatggaccctgctgtctggcagaatttgtgtttatgtcactttaaaaatactatttttatttgacaaatcataactgttatatagttatgggatacattctgatgttttgatatttgtatgcagtgtggaattattaagttaagctgatgtcactgttgaaaggcttcaagtgactaagcaaggaagaccctaccttggttaggctggaactaaacaaggaaaaaacgtacagctataactgcctttcacgggttcctttggtcttgagattctctattctgtttaccgattcttcactacttcctacacaacaagtctcaaggtgctcagcacagaacctgggctcctaatagcacagacaatattttatatatacatatgatatacagataatacacacacacacacacacacacacacacacacacacgtatttcctcaaaggaattgtaggaaaggaccacagtaatgtgaattccgtttttttccacctctgtttgatactgtggctttaagtaatagctgatataccatgcaaaaacgtaaaaataagttggaaacataattgatcactttagacaggaaaaaataaatccactttccattatatttctgagttttagaatttaattcttcattgtctatctggaaatagttgcagaatcctcagaaaatatcacttatagaagggtattaatataagaaatacaacttccttgtgcaaaggctcttaaagttactaaagggcgtctaagtatgcaaatcgtcttagaatgcagggtaatggtcatttgaagacatttgaatactttcatccactgtgactctgagttaggaagtagacagtgggggttaaggaaagattgagtattatcttgattggaatttcaagacaggaaagtctaatccctttcttgtaaaagacatctcgatggatttcaactaaccttgagaaacgaatcagaatacctactcaaaccagagctaaagagaaagtgttttttttttttttctttctaaaaaccaggtgttgagctccttggtaacccaatactgggtgcgcgcgcgcagagtggccagacccctctccacgcagctctggctctttttaattcggcaagtgcactcacagcagaactgccaccagtataacgtcttgacgatgggctccagggtttgacactccgcagcgccaccagctctgttttctccccaagtaagccactctacctcgcgagcagcagatcgccctgtgcgcgctacaatccgtggggcggggagacctggcgctcacccagcgagctcgactggtgctgacgtccattcaggcctttaaatgtctctgtccctgcgcaggagggaacggactttgtagcagtcactttgcccgaagggcgacgcgtctctgcttttgcaggcggcagctcggactcccctcactcttcccagcgttgcgtttgcctctgtctttgcctcgagttccccgcagcctctccagcgggaggcgcttttggtattcgtaccctgggcatgaaccaacaggactccccatgccctgtgctttttcagtgggttcgaagatcagagattgcgaggtgctctgggtgatcgctcaaggagcagggagcttcctccccctgattttggtagggggtgattttttttttaccccgaaaagcgtcctccccgctcctgaagctgcaacttgttttggtttcttctcagtcctgtgtgtggttacaacatcaaagtttttctcccttacccttccaaaaatctatccttttaatccaccctcctccccccgcgctatctccgccaggccttctcgctgtgcggtgagtggatagcgggcgcgcagtgtggcagtggcggcgaagattggcgctatcaggaggagcaaaagggaaggatctgctgctgggggctcgctgggtgaccctttgccagacgaaaagagctgggtaaggcgcagaagaggagccggaaccttctgggaccctggtgcctgacactggattttgatcaccatccttgtgtgtctctgacccttttttttctcaattggtaactagtcgagagagaagcgcttggcaggagctctctgcgggacctaagctccgtggctgctcgggatccctacgtccgctgctgctgaaggagcagaggggaggacgccagcggttgcttactggagcctggaggtaggcaagggggtgggatcctgattctcagcccagattccaaaagggtttctggtttcatggaaacattcttctcaccctcatttgtcatcgcacaccccacccccgcttttcagattcaggttcaggaacaaccaaatccgtggcaccctcacaaggtggaagtacctttcaaagctcatcgcctgaatgtctcgctccttacatgtatgtgtttgtgttgggggaatgtgagcttctcggggaagttgataccttgcagattttgagaatgtccaacttgattttattcagtttcttaaaggttgtgtttcctgtgggcaagaattatgggaaataaatgtcagtgtcatatacaactgcagtagcagctcagaaatcaccttcatttccccccaaaagttttccccatgcaagttttcttaatgtccacatgtagtgaatggagacttggcttgttccattatatgtaaacggggagggggtggggggttacatccttctcttttaagttggaggatatcaaagacattagagtttctctcctttatctctctcatcgttatctctagctctagctctctttctgtctctcactttcctaccatcctgacttctttccttctttatcttctcttccttctctccttccttctttctctctctctcattttctttctttccatgtgctgctcattaataaatataatgtgaatttagagagaatggaacacttttgcaatatacagggatgataaaagacttctttcctaccttgcctaaagtttttatttaagtatctgatcctttttagttgtgaggtaatttgaaggatgactgaactagtatcttg

SEQ ID NO: 4931 - DNA, 6000 bp, Homo sapiens
gttaggcaaggcctctttcaggtgtcattttgtctaaatacttggaggggagagaaggaggaagttacgaggaatatctagcagtacaggcagaagacatagcacatgcatagtccccgaaggaagcatgtttggtgtttatgaaaaacaacaaagaggccagcatgactgaggggagtcctagttgtggaggtcagagatttagtaggaattcacaaagtcattgtaaggatttcagctttctctatgtggaatgggaagccatcagagggggttttttttgtttgtttttgtttgtttgagacggaatttcgctcttgttgcccaggctggagtgcaatggcatgatctcaggtcacagcaacctctgcctcccaggttcaagcaattctcttgcctcagcctcttgagtagctgggattacaggtatgcgccaccacgcctggttgtggctcatgcctgtaatcccagcactttgggaggccgaggcaggcacatcatgagatcaggagttcaagaccagcctggccaacatggtgaaaccctgtctctactgaaaatacaaaaattagcatggcatggtggcacgcgcctgtaatcccagttactccagaggctgaggtaggagaatcacttgactccgggaggcggagattgcagtgagcagagatcgtgccactgcactccagcctgggcgacagagcaagacttcgtctaaaaaaaaaaaccatagttggagaccgggcacatggctcacacctgtcatcctagcactttgggaggctgaggtggtattacttgaagctaggagttcgagagcagtctgggcaacagagtgagaccttgtctctacaaaaaattaaaaaacaggctgggcgaggcggctcacgcgtgtaatcccagcatttcaggaggccaaggtgggcagatcacctgaggtcagaagttcaagaccaacctggccaacatggtgaaaccctgtctctactaaaaatacaaaaattagctgggcctggtggtgggcgcctgtaatcccagctacttgggagactgaggcaggagaatcacttgaaccctgaaggcagaggttgcagtgagttgagatcgtgccattacactccagcctgggtgacaagagtgaaactctgtctgaaaaaaaaaaaaaagaaatttaaaaacaaattagccagacatagtggtgcatgccagtagtcccagctacttgggaggctgaggtgagaggatcacttgagctctggagtttgaggttgcagtgagcagtgagctgtgatcttgccactgtacttcagccagagcaagagaccttgcctcaaaaaaaaaaaaaaaaggtggggggtgcggggctgggggcagtgattcatgcctgtaatcacagaactttgggaggccaaggtgggtggatcacctgaggtcaggagtttgagaccagcctgaccaacatagtgaaaccttgtctctactaaaaatacaaaattagccaggcctggtggtgcatgcctgtaatcccagctacctgggaggctgaggcaggagaattgcttgaacctgggaggtggtgattgcagtgagccgagattgtgccattgaactccagcctgggcaataagagggaaacttcaactcaaaaaaagaaagaaaaaagccatgaggttgggtgagatctctaagagcaaataaaatcatagaagagacccatagactaagctctgggacactagaacatctgcaaatgcacgttttgcagaggcacatgcacagaaaaagaaagagatcagtatctgtaaagggaaggctggagtaagtatttagaaaaaatatgataggtaatttctgaaagggaggataaaagttcagtacaactttggtcacaaagattgggaatgagttttgtccaggctggaagtgatgtggggtccacagtaagagagaagtgcttgtaaatggtggttaacaaataagagtcttggatacagtgggaccagggagatgaacctggaagtttcctcagagtttagggcagagacttgaggttggtaggaagcagagcacagtggaatttgtaaaaagtaaaatagaggttcctcttcaaagactttcctcctcgtctaattaggaataaataataacttctctttttttttttttttgagacagagtctctctctgtcgcccaggctggagtgtagtggtgcgatctcggctcactgcaagctccacctcctgggttcccaccattcccctgcctcagcctctcgggtagctgggactacaggtgcctgccaccacgcccggctaattttttgtatttttaatagagaaggtgtttcaccgtgttagccaggatggtctcgatctcctgacctcgtgatccgcccacctcggcctcccaaagtgctgggattacaggcatgagccaccgcgcccagccaacttcttttaaaagcaaaatttattcaaagacctgtgctaacattcttaaatatctgctagccataataaaaaaatcaatgtactttatgtttttagctcccacaatttagtctaaatatttgccctggcatgctggtccaagcaagcattaggtcataacctgtttctcttccttatttaaaagtgtttttacctttctcaacattccacaagttacttcctccttcccttgttcccctctacctttgcctcttttaaaaagttctaagttactagccaatcgaaacaaacaaaaaatgtgaggtcctgttccagccaatggaaaccggacacagcagtggggtagacgcgtcaggtcataaatgaccctgtctcctttgttcggtgtactctcctggcaaaactgctggcgagtgtaccctttctgcaaaaagtaaaaatggccttactaaataaattaaatttatgttcaagtgctatttatttacggcaccaaaaaacaaatatttcaaacaaattggagaactgagtggaagacagattcaggattgcctggaaaggcagaactatttgtgaaatgtgtagggccgaaaagaaagaatcacctgctttagcaaatactatatatatgtgcatattatatatgcatatatgtatatataatatatacatatatgtatatataatatatacatatatgcatatataatatatacatatatacacacatatatacatatatatacacatatatatacacgtgtgtgtgtgtgtatatatatatatatatatatattttttttttttttttttgagacggagttttgctcttgtcgcccaggctggagtgcaacggtgcaatctcagctcactgcaacctccgcctcccaggttcaaccgattctcctgcctcggcctcccgagtagctgggattactggcacccacaggcacccacaaccacgcctggctaatttttgtatttttagtagagacaaggtttcaccatgttggccaggctggtctcgaactcctgacctttggtggtccgccagtcgtggcatcccaaaatcctgggattactgcatgagccaccgccccaggcctggttgtgtgtgtttttttttttttttttttttttttttgcagaggtggtaggggaggaatggaagcttagtgggggatttagggagggcagaaattggtgttcagtgaggagctctgacaaggcagagctgatttggtgggagatggaagcaagtcaaaacatgcctgaaaaagcgagaagccgcaggttagaaaggctgcatcttggccgggcgccgtggctcatgcctgtaatcccagcactttgggaggccgaggcaggcggatcgcgaggtcaggagatggagaccatcctggctaacacggtgaaaccccgtctctactaaaaatacaaaaaattagccgggcgtggtggtgggcgcctgtagtcccagccactcaggaggctgaggcaggagaatggcgtgaacccgggaggcagagcttgcagtgagccgagatcaggccagtgcactccagcctgggcgacacagcgagactccgtctcaaaaaaaaaaaaaaaaaaaaaaaagaaaggctgcatcttagggaggtcagaatacagctccgagagcagggcgcagaggctcacgcctgcaattccagcactttgggaggccgaggagggcggatccgatgaggtcagcagttcggaccagccttgaccaatacgttggaaaccccgtctctactaaaaatacaaaaagtaaccaggggtagtattgcacgcctataatcccacctactagggaggctgaggcaggagaattgcttgaacccagggggtggaggttgcagtgagcagagatctcgccactgcactccagcctgggcaacagaacgagactccgtctcaaaaaaaaaaaaaaaaaaagcgcgataggcgattactggtcagtggtcaatataggtcaagggacgagacaggagagagctttctaaggttgtgggcctttttattttttatttttttgaggcgtagtctcgctgtgtcgcccaggctggagtgcaatggtgcgatctaggctcactgcaatctccgcctcctgggttcaaccaattctcctgcctcagcctccccagtagctgggattacaggcgcccgccctcacgcctggctaattttttgtatttttagtagagacggggtttcaccatgttcgcctggctagtcttttttttttttagacggagtctcactctgtcacccaggctagagtgcagtggcgctatctcagctcactgcaacctctgcctcctggattcaagtgattctcctacttcagcctctcgagtagctgggactacaggtgcccgccaccccgcccggctaatttctgtatttttagtagagacggggtttcaccatattggccaggctggtctcgaactcctgactttgtgatccgcccgcctcagcctcccaaagggctgggattataggcgtgagccacggcgcccggcatccaggctagtcttgaactcctgacctcaagtgatccgtccgcctgggcctcccaaagtgctgggattacaggcgtgagccaccgcgcccggccaggttgtgggttttaatgggaccatctcactgcctaccgtttcctttttccgtccgaacagaaggggcctgagcagtgaactgacagtggcaacgccgggtgaggcgggatggaggagtttacgagcctgggtgacgccctgttccgcgtcctggccccgcccctcccggcagagccccttggcgcgtgacacaggccccgcccttgctgtacgccatcagccggcgccgcgccgccgggtgttactttgccccgccggcggggcggtcagcctcctgtcaccgcctgttccggctatggtcccgtccggtgttctgtaagttggcaacctaggctcctgacgcgaccctggtcctgatggcggcggcgacggccgcggcagccctggcggcggccgatccccctcccgcaatgccgcaggcggcaggggccggagggcccacaacccgcagagacttctactggctgcgctcctttctggccggaggtgggtccatgccacgaagagccagccgcgctctgagtggcgggggcaggactgtgggcaagtgggatgcaagcggcctctatgacattcctggactctggctgcttcaatgttctgttagatgtctgccctgacctgctgtaacctctttctagtaatcacttgactaatgacagctaggttatggggagtgggacctttggcactccggcagaggctggggaggtggaaggtctgaatcaggcacccattcttcagggctggataacagggaaaagaggaggatcccttacagagaccctggggttttagtgagacatgctgggcactcctttcttttataaaaaccgtgagtgacccagtgtagacttggattttgctgtttgcttaaaggaaaacaaatattggagatcagctt

SEQ ID NO: 4932 - DNA, 6000 bp, Homo sapiens
gcacttcagtctgggcaacagagtgagaatccatctcaaaaaaaaaaaaaaaaaaaaaagcaaaaggaaacagtggccgggcacggtggcttatgcttgtaatcccagcaatttgggaggccgaggcgggcagatcacctgaggtcaggagttccagaccagcctgaccaacaaggtgaaaccccatctctactaaaaatacaaaaattagccaggcttggtggcatgtggctgtagtcccagctactcgggaggctgagacaggagaattgcttgaacctgggaggcagaggttgcagtgagccaagatcgcgccactgcactccagcctgggcgatggagcaagactttgtctcaaaaaaaaaaaaaaagaaaaagaaagaaacagcttagggaccaagatgagcagcagaggggggcaaggagaagaatgcaaaaataaggcataaagggcccctaccacaagcagcccgcttctccacatcgttactgatctggaccctgccaatcaagccaaagcactgacccacaatttaaataggactttgtcattttatatgaattgtaggaaaagagaagggctcacccgtcagtagttggccagtcacaatccagttccctaacacaagaaaatgacagactttcttttctacttgattgccttcttcacagtgtgaagtagagtcatgcaccacatcataacattttggccaactacagacagcatatatgacaatggtcccttaagattataatggagctgaaaaagtcctattgcctagtgacattcatagccatcataaggtcatagcacaatgcattaccttttctatgtttagatacacaaatacttcccattgtattcggtatggtaatgttctgtacaggtatgtaacctagaagcaacaggtcataccttaaaccctaggtgtgtagcaggctataccaacttaggtttgtataaggactctatgatgttcgcacagtgataaaatcacctaacaacacttttctcagaacatatccctgtcattaagtgacacatgactgtatcttgtagtcagcaggagaagacaggcctcatgataggaaatggaagaggatacttcatgattcttagcaggagacaggaagatggaaattgtcgtgctaggtcaacaaacctcagagaggctgtttgaaaaggatcccagcatttatccatggacacattagggacctatcaatttgtagagaacttaaatttctccaagtgtaggactgtcttatcaaggagggtctgtaccaggccagcatggagtcgtaagggtttgcattggaaagggaaaaatgggaatggaaaggaaggttggatgtgaaagaattttccaaggagcatgtatagctgaggaggccatgaccttgcttctttcttatgtgtgtatttatttattgagacagggtctgactctgtgcccaggctagagtgtagtggggcaaccatggctccctgcagcctcgacctcccaggctcataatcctcctgggtagctgggagtacaggcgcatgccaccacacctggctaatttttgtaattttttttagtagagatagggtttcaccatgttggccaggctggtcttgaactcctgacctcaggtgatccacccacctcaccctcccaaagtgctgagattacaggtttgagccactgcgcccagccacctttactctcttgaatccattcctgttgggttttcacccctaccacacactaaaagccattttatggtcaggcacagtggctcacacctgtaatcccagcactttgggaggttgaggtgagaggatcacttgagcctagaagtttgagaccagcctaggcaacacagtgagaccccatctctaaaaaaaaacttaaaaaaaaaactagccaggtgtggtggagcactcctgtagtcccagctattcaggaggcggaggtgggaggattgcttgagcccagaaagttgaggctgcagtgagccataactgtgccactgcactccagtctgggtaacagtgagaccctgtctcaaaaaaataaaatgaaatagataaaagcaattttgtcaaagtcaacactgccctctacactgccaaatccattggtcatttctcaggcctcacattgcttggcctctccacaggatatgacgtttgaccccccctccctccttttctaaaaaaactgtttgtagagaccgtgagggggggcggtctcattatgttgcccaggctggtcttgaactcctgggctaaagcgagcctcccacctcagcctccccaagtgctgggattacaggcatgagccaccatacctgacctactcatttccttacaacctgcttcttcacattctcctttactggattttcttcctcttccagatctttaaatgttgggatttcgtgaggctcagtaatcagacttctctgctcttctccatctacactcacttccttggtgcatatatatatatatatatatatatatatatatatatatatatatatatatatatatatatatcacagctcactgcagccttgacctcccatgctcaagtgatcctcccacctcagcctcctgagtagctgggactacaggcgtgtactaccacacccagctaattttttatttttttgtagtgatgggatctcactctgttgcccaggctggtctcaaactccttgcctcaagtgatcctcccacccctggcctcccaaaatgttgggattataggagtgagccactgtgcctggccccaaagttatatttccaggtcctttttgcctaaaccctacgtatgtacaacatcctagtctgtatctctgcttgattctaaaaagcatcataaactgaatcaaacccttaatattcccccaccaaactgcttttgtagtcttttccatttccttgttttagtaaatagaaattctcttcttccagttatcaagccaaaaacattggaatcatccttgaatcttctttctctcacagcccacatccattgcgtcattctgtcttcaaaatatatccagaattttactactactcaccacctccgccatcacccttatccaagttaccattaattttcacctgtattataatagtagcttcctgactctcatccggattactgtagtagcatcttaccaaatcctgcctgaaaggccaagcaatgtaagggctgacagatgactcggggattcggcaacgtggaggtcactggcaaccttcacaagattgctttcactggagtgatagccctcgaagaacgggataatgatagaactggattacactctgtagtagaatcttttttttttcttctttttttttagatggcgtttcactcttgttgcccaggctggagtgcaatggtgtgatcttggctcaccgcaacctccacctcccaggttcaagcgattctcccgcctcagcctcccgagtaggtgggattacaggccatgtgccaccatgcccggctaattttgtatttttagtagagacggggtttctccatgttggtcaggctggtctcgaactcctgacctcaagtgatccgcccgcctcggcctctcaaagtgctgggattacaggcgtgagccaccgcgcccagcctgtagtagaatctttacgctccctagaatgtattcgccttcctgatctgttataactcaccaagagaattcccttttcagagcctttgcacttgctgttccttcggcctgaccacccttcctccagacagtcacatctacctgttatcgttcctgaattctggtacctgttaatgacagcttctgagaggtttcttttatcgcgctatttaaaatagcgcctcccactctctatccctgtgttttccataatttttcttcagagcttttatcactatctgaatctatctggagctcccccagcctacacacactggaatgtaagctccatgagagcaggagctttgttttgctcacccctgtatccccatcataaaaccatgcctcacaaacagtgggcactcaatatctgttcagtgaataaataacctttgtctgaaacgtatgtagttacattacgtatatagatcaccacttagtaaaccgtctgggaataacaggcactccgaaggccccagtctcatcccgacggctaccacgtgaccttcctgagcttgggtttcctcctccggaagattagagggttggcgcatactcaactctaagacctccggaacatggaatctgggcgtgcaccattattgacacctacaccagccgtccctttcttagaagacatacggtagcacttccaccctcgctcaaaactcgggaaaggaggggcggagggtggatgtcatcactccgcgcccggctgcccgcgacgcgccggcgggtggcgcagcccttcgctcgcccggcctccccctccctggttccgcgttctggttccgccatggaatccaacaaggatgaagctgagcgctgtatcagcatcgccctcaaggccatccagagcaaccagcccgaccgggcgctccgcttcctggagaaggcacagcggctgtatccgacgccgcgagttcgcggtgagtgtgaggtgccggagagactggggacattagaactgatggggggaacacgggaacggaccgacgggagcagttgggggagggggaggggtggcgaggcgcggctacgcctgcgcactgaggcgcgcggtggctgctgggaggcgtagtttttccctcttgttcctctgcgggatgcgagccgtctggagactcgggcggccgggacttcagctttcggggtgctggcggagcccgctggggtttgaggtctccgagaatgaaacgcgctggcagccgggacgaagggaacttacctggaagtgaactcgaactacttttcccaaggggccgttcggtagcccaggccagtcgccggcctgggaaatattacagttcaggaaaataaacataactcctttaagggagagaatgggcgctagacagggagacatttctgttcttcgggcgccagggaaaggcgcttccgtatcttcactccctctcacctctcgggctgagggtcagggaccactctcccaaaatgcaagccggcctttgcacccaccccagtccgccgcctcggactgtcctgaagccgggcccctcactcctcccgatgatgagattcggagcgggtggcctggtgggaggtgctgacctcagccaccgccagtcctccatcgcccgcaagagtccagcggcggtcagccatgtggacgccgaggctgctgagttgccctggacaggagcctcctgagccagggagggaagagtgaagctggctttacaactcatcacctcgcttcacccgggaaccctttcttttttctttaacctaagttttccaaggagtttttcttaatccacgctagaggggagagagacaccgggtggtgcttgtgatcaccactcagtaaaccgtctgggaataacaggcactccgaagggcccagtctcatcctgacggctaccacgtgaccttcctgagcttgggtttcctcctcgggaagattagagggttggcgcagataatgtgattggcaataatacccatagggctttgcagtttaggaagctccttcacctgtgccttctcacttgagcctgccagtcagggatgcagagcaaagatcattatctttattctatgggtgaggaaaatctctgaggtaagggatgcccaggatgacacagctagaaagtaaaatgttctgtgactctgtaaatgtttatgaaggaaaagaaatgaaattgaggaacagcagtcagcctcctaaccggccctgcccgcctgatgagattgagaaagcggaacgctggtggaagaggtagcctggactgctgaactttcctccctccggactcttgcaggttgatctttggcctgtttgcctcccct

SEQ ID NO: 4933 - DNA, 6000 bp, Homo sapiens
gattgacctgactgctctggcaagaagaagaggtgtccttacagaggcctctttactgaccaactgaagtatagacttactgctggacaatctgcatgggcatcacccctccccgcatgtaacccaaaagaggtgtccagagccaaggcttctaccttcattgtccctctctgtgctcaaggagttccattccaggaggaagagatctataccctaagcagatagcaaagaagataatggaggagcaattggtcatggccttggtttccctcaaaacaacgctgcagatttatctgcacaaacatctccacttttgggggaaaggtgggtagattccagttccctggactaccttcaggaggcacgagagctgggagaagaggcaaagctacaggtttacttgggagccagctgagaagagagcagactcacaggtgctggtgcttggatttagccaggctcctccgagcacctcatgcatgtcccagcccctgggccctagccctttcctgccctgcagtctgcagtgccagcacgcaaatcccttcaccacagggtttcgttttgctggcttgaagacaaatggtcttagaattcattgagacccatagcttcatatggctgctccagccccacttcttagcattcttactcctcttctggggctaatgtcagcatctatagacaatagactattaaaaaatcaccttttaaacaagaaacggaaggcatttgatgcagaatttttgcatgacaacatagaaataatttaaaaatagtgtttgttctgaatgttggtagacccttcatagctttgttacaatgaaaccttgaactgaaaatatttaataaaataacctttaaacagtccattgtgttactgctgttggaggtttacggccagaggcgtagattttagcagcctggcttaccaggttggagagagtacctcctcctactccctttgggtacttttgagaataaaacttcctcatgcctgtaatcccagtactttgggaggccgacgcgggcgaatcacgaggtcaggagttcgagaccagcctggctaatatggtgaaaccccgtctctactaaaaaatacaaaaaatttagctgggcatagtggcgggcgcctgtaatcccagctgctcggaaggctgaggcaggagaatcgcttgaacctgggagggggaggttgcagtgagccgaggtcgcgccactgcactccagcccaggcgacagagtgagactccgtctcaaaaaaaaaaaaaaaaaaaaaaaaaaaaaaaaaaaacttctcataaacagcctccaaacagcgctcggtgctgcgcaggcgacgcggggcggggagggagggtgagtgccctgggagccggctgagggcctcgccccgcccctggtcccgcctccggttaggccgctccgcctcttactcctcccctcccccgagtgggccggcccggctccccctccgcggggctgagtggatgagcccaggcctgagcccgcccctgctccgaagtcgtggtccccgacgctcggccggcagtgccatcgcgcggagaggagggggtgcgcttccgcgggcggggcgcggagcccgccgtctcggaggccgcggctcggcccggcactgcggagggccgcttgatttcccggaacccaggtcgcgcggctgctagggccggagccggtggatccgagcgggtgccaccagcggcggcgcgccgcctcccccggtgggagcggtggttgggccaggctgcggcagagcgttcgctcggagatggcggagcagccgcgacgcggcccgtggccccgaaagcagggaagccgggcagccccgggacgcggcggagcccggggacagcggggacgccgcccagtcctccgggtgagccgcccctgaggagacccccccgcccacggtcgcgctcaggcccccccaacagactcccttggatgttgccaccatcaccacccgcagggtcgtcccgggcggcccagcgtgcgccgcgccccgggtcctttccgccggcctccctcagaaccgcctcgctcccctccggaccgggcgggctcccttcttcccgcagggctctcccagcccagaggctgtctcgatgtcaccccggagtcgccgccgcgcgcctgtggccccttcccctttggtgtcccacatccggtgcgctcttcgcatccacctgtgcccccgtctcctctcggcggggcccctccacccgccagccccgggccccctcggcgcccgcagcctccgcgccgctgctccggccgtcccggcctccccaagcccgggcccggccccggcccccgtctggcttcgccgtcctcagagatctcccgcacacacccaccccgcccagccctgctggccctcagtgttcactggcccggcctgcggcgctcccggcgccccttccctaaaccttgctgcttcttccaggtatgaagctaaaatgcagcggctaagaacgcggctctggagcttgacaggcctgacgtcgaatcccagccctcccaccaactgagctgtgtgatcctgggcaaggttctaagcttctctgagttactcatatgtgaaatggggataatggagcatgtaccttttccctacctcttagggctggtgtgaagattaaatatatgtgaagctcttagaagaatggctggcaagttgtaatttctcaaatacgggatgatacaccctgagtatcaacttcccgtcagtgacctcctcactacaatgttttctctaaagttgcatcacattcttagcattcaccccttcccgtcaccattttgatcctctcccccagctgtcttctcgtgtcgttttacctaggccaaagctgaactgttttatttttatttttatttttatttttttttgagctggagtctagctctgtcacccaggctggagtacagtggcacaatctcagctcactgcaatttccgcctcccacgttcaagtgattctcctgcctcagcctcctgagtagctgggactacaggcgcccaccaccatgcccatctaatttttgtatttttagtagagacggggcttcaccatgttggccaggctggtctcgaactcctgacctcaagtgatcacccgcttcggcctttcacagtgctggaattacaggcgtgaggcaccacgcctgtcctgaactgtttttaaatcatctctgtcaattctgaaggacctcagctctgccttatcacccctgagatgtgtgtttgggggtgggtggtagagagggattgccagccttacaaggaggctgagtggggatagtgacaataaagcttacagaagcagtcgatttaagaaaaagaacagactcaggaggctgaggccggaggattgtctgtctgaccccaggagttcaagaccagcctgggcaacgtaacaagacccccatctctaaaaaaaattaaaaattagtagggtgtggtggtgcaaagctgtagtcccagctacatgggaggctgaggtgggaggatcacttgagcccaggagtttgaagctgcagtaggctatgatcacactagcacactgtatcctgggtgacagagcaagactccatctaaaaataataaaagagatccccaaaattagacctccttaaaactgttttctgatcacactgtcctttttccttctgtcattggttggatgtgacttaagctcctgttgctctctgtcatccagtccttactcaagttgttctgtttgtgtaactggactcaatacctcatgtctctccagactagctcagggactcttctgagctgtttaggaatagggttgtagaactacttaggctaagttaggaaggagaagtagagtggactcagctgtatggcttttctcagcacccagtgtgtggcctgctcaggggttacatttttatctcctgactggcaaagttgaggtgaaggtcaggggcaggtaatgtttcacaagcaacgggtaagggagtccctaatttctgggtttggaaactggtagaatgattacctatcatgaggattgctctttccttttgaactcccccaccatagtgtccacctgactgcaagttcgttaaagctgttggctgtgatattgggtttgattgatgagaagattaacagactcatgagttccttatctgatattttgttggagcatgggacttctgaagacttccggggctttccgtcccttcctcacagaaagatcagagctgttgctggctgccagctgctcggtcatgggctaggaactcctttcagagcaggcctgtttttagccttctaggatatttagcctcttgttgatgggagatttgttcctatcatttgcatatactgctccatctctgagctttgcttagagaggagaatttggacattcatttgggtattctaagaaagggaaagggaacaagctgtgaagctaaggtataggactcagcttgtagattctcctagaggaaacttttttttttttttttttgagaacagattatccagtaagcaggaggtaagagagatgggatggggaggagaatggattaatgacaatttcagagggaggagtaacccactgatttctctgtcttacaggtagaggggaagagattgaactttgctgacctttgatgtgaggcgctcagccagggccaaggggagagcctggcaagatttgcagcctgaagccatgggccagggggccatggtgacctgagacaagtggactctgtatagttgccccctgcttccccttctacctcccctaccctatgctaaggggactcgtctccacctcgtaaaggaaactccccaagggaatccctgtcccctattttcctatccttctacccttccaagacagtcctagcctatagaactcctacctcccatcccctgaggtggtccccattcctccctcccttcctccccccgccatgctccagttgtggaaggtggtacgcccagctcggcagctggaactgcaccgcctcatactgctgctgatcgctttcagcctgggctccatgggcttcctggcttattatgtgtccaccagccctaaggccaaggaacccttgcccctgcccttgggagactgcagcagcggtggggcagctggtcctggccctgcacggcctccagttccacctcggccccccaggcctccagagacagctcgaactgaacccgtggtccttgtgtttgtggagagtgcatactcacagctggggcaggaaattgtggccatcctggagtctagtcgttttcgttatagcactgagttggcacctggccgaggggacatgcccacattgactgataatacccatggccgctatgtcttggtcatttatgagaacctgctcaagtatgtcaacctggatgcctggagtcgggaactgctagaccggtactgcgtggagtatggtgtgggcatcattggctttttccgagcccacgagcacagcctactgagcgcccagctcaagggctttcccctttttttacactcaaacttggggctccgggactaccaagtgaatccttctgccccgctactgcatctcacacgccccagccgcctagaaccagggccactgcctggtgatgactggaccatcttccaatccaatcatagtacatatgaaccagtgcttcttgccagccttcggccagctgagcccgcagtgccaggaccagttcttcgtcgggcccggcttcccactgtggtacaggacctggggcttcatgatggcatccagcgggtgctctttggacatggcctttccttctggctccacaaacttatcttcgttgatgctgttgcatacctcactggcaagcgcctctgcctggaccttgaccgctacatcttggtagacatcgatgacatctttgtgggcaaggaagggacccgcatgaaggtggctgatgttgaggtcagtcttgtta

SEQ ID NO: 4934 - DNA, 6000 bp, Homo sapiens
tgaacattggacatgtcacatgttccctccctcagtgcctgacttactaaacagaaaatgcccagtgaaaacttaggtaagatgtcgcacagtgtttggcacttgataccttgttgctaatatggtggggaccccttccagcactgaaaaatcccgcagcacttgtggcagctcaaacagagaatgtaccagtcactggctcccctgagtttcttcagaaattgtttaaggagtgctggatccatgagggcagaggcttgtcccagtcactacactgtctctacctgctggaacaggtgcttagtatgtacgcctgctctgtgctgggcccatgactgcacaaggacagctgacttcagaggattgctcaggatcactgagaaattcatttggcaaaatattgtgaatttaatggcctcttcaatttgaaataaagccacccggctttttgaaatagagcttcctttgggagcttagaactaaattcttggcttcatagaatgccctagctgggtggacggagaatcccaacatatagatgtatctagaatgtcagaagtgaagtgatctgtctctccaaatcattggtgctagggagaaagaggtgagcatgctgtctttttaaaggattcaactaactctcagagctttggaagaaagaaaaaaaatccaaaatgtgtactaggtcagtttttatttggaagatggattttattgttatatttttaaactaggaagtctcttaccactcccattctccttccctggcctagaggggtgggagttcagatccctgcaacattttaacccaaaaagctcttacctgtttacctttctttgatagagttgccaagtggtcttggttttgttttgtttttcttttagaagagaggatctagctatgttgcctaggcttgtctcaaactcctgggctcaagcggtcctccagcttcagcctctcaagcagctaggattacaggcatgtgccgccacactcagctcaccgagcggtcttgaacaaaaaacccaaattggtccaagtatggattatacactaatgatatttatcaccatcactatcgttgtcattatcagttttattatagtgacttccagttcggtatctattgtgggtgcttggagcttttgcacatgtaatcttatttaatcctcacaccaacctaggaggaaggtattattattattgcccttttccaggtgggaaaattgaggctcggagagttgtaagtggcttgcctgatgacaaagggtgggtgagtggtagaggcaaatttgaactcagtgaagaaagagttcaggctttgctgtcagatggactgaagttcttctcttggtgtccatgggggtgccagagatgtgggggttcttctttctccttccaaatcagacgcaactgaaagtctgaggactcagcttcaatctgagctctgatttctctagagtatccaggatggaaaaggggatggtaagatgaagtttgcagggagggcttcctggaggagagggctctgaaacatgagagcattcgggcaaataggaagggcaggtattttggtggatccagaggcaggtggattcagaggtgggtggctcaagagtacgggcctccgtctcctcgtcttcctaagcatatttaactgtgaatgaagcaagacaagaggtgtatttctccatgtaagggaaatgctatgaagaaaaggcatttctggtgtcagaatcacgattgtcagtgggagtgtcaggaagaaacttcgtgactttttctctcttcccaggcgcccccagctgttaggtttcatggcaacccaatgtggtagaaggcagtttcttttccattcttgctgttagatttttatgttgtgtgaccttggggctgccttagggcctctctgtccttcatgggtctcacctggcagaggagggggatacacagggtgatttccatagggacttacagctctaaaatgctcgagtgtatgatctaatcatgatgacacacagtcagccacagtgaaatccctgacacatctcaaatttgaactgcatctttatgagtggaaaaactgtttcctgccccacaggacattttgatttaactaggacacacctgaccctggtctgctcacagacagagagaatttgttctgtggcccaaggcctctgcctgcccctgctcccaccccaccatgggtagcagtggccacgtggtacttgaggacagcatcctggaacttgcccaggagtccgctgcatgctggctttctctcttctgcagagacgaggggcccagatcgggtcagcctctgctcagctctgcagtcttgccagggggaggaggaatcaggctggggggcagggatagagggccgtgtgcatcagggaaggaggccctgagatgacaagctccatgagtcactcaactggccgctccagccagagagcatcaaggaggggtttatgacactgcctcatgcagcagtgatcagccatgaggtggcatccatccattgtcaggggacagtccatcctcctcaggcacatgcacagaggattgggtgcagaggagttcaccctcaacacctctgggtgttgggaggcaggagagcagtggggctggaggcacagctctgccaagcattcctgaaccaaagcaagccatcaatgagtgctcacaccgtgcaggcactgtgagcctgtgtccacatgatctcatcttgtcctcagggccatgccaagaggaggcactattcttcttcttctcagtttatggatgatgataatggaggcatagagaggttaagcaacttgtttgatgtcacccaacaatgctgaaatggggcaggatttggccctggccctccagagcctatgggcttaattgttgccttggtgggtcttagccttgagcctgcattagaacaacctggagggcttggccccactccagagtttctgatttcggtcaggtctgcgataggtctgagaatgtgtgtttttaataagtttccatttgaggtaaagcccagggaccacactagtctgtgctgtactgactcatcatcccgtctcagtttccaacctccaaaaccagagggttgagctttctaccagttctctccagttgaccagttaacgcagaaattccagccttctaatcacccataattatgtttagttttggacaacttaatatatgagagagcaatagtacttcagtaaactcctctactgctactgggtttctgtcacttgtctcctcttatttttgacaatttgatgttttgtgttgtgaggcttcctttgtgcctaaaagtcattgacttttagatactcactttggattatctccatcaatgtgaaacctcctgtgttgccttatttaatgtcttttgccttgaatttcacttgcttggataccattgcctttaacttggcatcactccttagcttgctttttacagtttggtagagatggtgtctcactatattgccctggctggtttcaaactcctggcctcaagtgatcctgccacctcggcctcccaaagcagtgggattacaggtgtgagcctcacttgatttttgcctggcatattctggtttattcttttacttttaaccttattttgtcacttggtttagggtatatttcttataaacagtgtataattttatatatttatttattatatattattgcatatagttaatactatatataatgtgtaccacacattttgattgtaataactaatatgttttggcctttctgttttttaaaaaatgctttttgcagtcttttttgtctatctgtaatagatatttaaattttttattttatacttttctttattaaattggaatgtctacccatgctgcctctcaagtatttaaaactattgttcaaccatattttgccaatggttaatgtatagagtgaaatagcctcttactccttgccacgtaagataaataatttttcttcttttcattcccccattccataatattacactcatgcttttatggtataatctgatatttaaaacttctacttattattattatatttttcacattttatcttctcttccaataaattttagttttcattttcattttgatttgtaatcacagttgtaacaattatttaaacctaatagatcttagggttcattgccagatctttattaccatggacatctcctgttgttgaattccttgttttgattaatgtcttaattacaaatatgaaaaatttaacacctgtttaatcttcttgaacaacgtattctgctttatcgcactttgcactttgtttcttttaatatgaatgacaacttggccctgctgttgggttttgcagaggagacatcagatatcagcttgatttttctctttttttttcatagataatctgatatcttctgtttggatgctgataattcttcaccatgaaattaaaatatatgtatgtatgtgtatatatatatgtgtgtgtgtgtgtgtgtgtatgtgtgtgtgtgtatatatatatatatatatacatgcctactgagcattttgactttcagacttgggtctgtcttctgtgttaagaaacttttttttgttttcgtcttttcagttaggtttattctgaattggctgcctgtcctctatatctgtcatctttttgtataatctgtcttagacctcacagtatttctgcttctgtatttttttcctcttcattttgagagtgctttctaaatgtgcccttcataacacatcttgtttcagaaataagttctcttgacttttactgcagacatagaatagatggtttctccaagttcaattatcacaatatcacacgagttgtttactgagcacagactgtcctctgtgcactgtgctaagcactttgtgtgcattacctcagaacaactccaaggggcatgtgctttgtttgtcctcattatatagattggggaaacgcatgtccagagggttgagccctactcagcctcatctgggtactgactgggggccaggactcaggtccagccagtttcacagcagagcctgtgctcttggccatgatgataatggcactttcccacccagtccttttttttttcaaatttatttattttgagtgctgcattctctaccttttatagttaagaatgttttcaaggtctggtgggaggttttcgtgttttgcatccatgaatgcagtcagtgtttgcctgtaaatagggagggtcaattctcttgggctcctctgctgtgcacctcattgcccatagaatgctactctcggatcttgcactagagcactggatgatgaagtgaagccttgcagagacctgtgagtctgggtgagtgagctggaaccatgaatagttccagaaggggaacttaatcctgtgatatttcttctctgtgtttggtaaagccactgcaccttgtgccaactgtttgcatctggcttgctgtttaacctggccaacatgccaggtacaaactgtgcttggacttgtcctccttcctggagctgccacctgctgtgtcagggacaagcccctgccctggccagttttcttctggatgtatctgccatgtgattcccagggcttctcagagctgctgctgctgctgaacactgctgtgatccatagtgaccagggagtcccggtgcctgatacttggctcacctccctgttcagccctactgatgtaggcagctctgatgtgaggttcttcaagggcctcactccttgtttcacaaccatcctgccgcttctcagggagcaaagctgcccaaggggcctccctgccttctctttttctgcataactgatttttttttttcagattcctttaggtttttggcacattgatggcacctgttcctagtttgctgagctgtggcaggttttccaggcatactggatttgttttgattttgaagcaggaatctgggcaggaggg

SEQ ID NO: 4935 - DNA, 6000 bp, Homo sapiens
tggaatcccagcactgtgggaggcagaggcgggcatatcgcttgagcccaggagttcgagaccagcctgggcaacatagtgaaaccccacctctaccaaaaagacaaaagttagccgggagtggcggcaggtgcctatagtcctagctactcaggaggctgaggtgggaggattgcctgagcccaggaagtccaggctgtggtaaactgtgatcgtgccaccgcactccagcctgggtgacacagtgagaccctgtctcgaaaaataaaaataaaaaaaaaccttactttgcaaattatctgtatattttacaaaagcaatcataaatctaaagttgaaattcattagactttatatcacagtaaataatttctaactaaatggaacaaatacttaaaatactccttggaatagtataaatagtataactttggagtcagatacacaggtttgaatcttaccctatttacaagcttggtgatcatcaacaatttgtttggtttctgtgggcctcactccctgtttttttttttttttttgagatggagtttcattcttgttacccaggctggagtgcaatggcgcaatctcagctcactgaaacctccgcctcccaggttcaagcaattctcctgcctcagcctcctgagtagctgggattacagggattcaccatcacaccaggctaattttgtatttttagtacagatggggtttctccatgttggtcaggctggtctcgaactcccaacctcaggtgatccgcccgcctcagcctcccaaagtgctgggattacaggtatgagccaccacgcccagccactccctgcttctaataaatcaggaattataatacctacagtgtgaaaagaaatactccaaatattcactaaatgggggaagagatggataatttcattctgtttttctaaaatctatttctgctgttcatatttttttaacaacttgtatgtaattttaaaacataatgaccaggtgcagtggctcaacacctgtaatcccagcactttcggtggccaaggcgggcagatcatttgaggccaggagtttgagaacagcctggccaacactgtggaacttcgtctctattaaaaatacaaaaaaattagcctggcatggtggcgggcgcctgtaatcccagctgctcgggaggctgaggcaggagaatcactggaacctgggaggcagaggctgcagtgagctgagattgcaccactgcactccagcatgggcaacagagcaagactgtctcaaaaaaacaaaacaaaacaaaaccatgatgattttaaaaataaaaacatctgttttatagggtactcatgaagccagtttgtaaggcacctacacacaggagattctcaattaaaaaaaaaatagtaatttccacagctctattcctcacctcttccaaagcttcttcaattctgcctttccttttttgagatgaagactcgctctgttgcccaggctggagtgcaatggcacgatctcggctcactgcaacctctctccctggttcaagtggttctcccaagtagctggaactacaagcactgcccaaccccctccccgccaccacgcctggctaatttttgtaggccccccaccacgcttggcttatttttgtatttttagtagagacaaggtttcactgtgttgcccaggctggtctcgaactcctgacctcaagtgatccgcccactttagcctcctaaagtgctgggattacaggcgtgagccacctccttaggcccaattccaccttcttgaattcaggtgaacaagtcacagaagaagcaaagttaaacatttatttttctgaaggctaaggttataaagaacaacaaaaacaataaaactaagcttttaaagatttttcctcagaacataaacaaataatttaatccaaaaagaaaaatatttccatgtttactgatgctaatcattttattctgaaactccgtgggttttttgcaggagtgggggattgcaatgtaagagagtaaaacgataatacatccagaaaaaaggaaatttgataccttaatcttttgaccatcaaggaaaattcaggattcaggtcagagtacatttttcactgaaaaacacagtgcaaatacaattaatgacaatgacttatttagcaagtaaggtaaaatataagttccacctgtatgaaaagataattttgactttgagagtacacttagatgaatgtcatttaacagatccaggttgtcaccttatattttacacaatatttcgagaactaagaactttctcttccatattctaaaagatgaataacatgaacatatcgggaagcaccatcgttttgcaggtccaatgggtgtcattttaaaaccacccaagtacactgagaccgctaacgctagtaatgtggtgtttggcagctagttttaatgactgtcattagagctttattttttattttctttttatagagacgagcccaggctggtcttgaactcctggcctcaagcgatcagcctgctttggcccccaaagtgctgggattacaggcgtgagccaccgtgccagcctcgttagtttgaaaagcaccaaaagctatccataggaatgtgaactttagcatttcctatcaagtatgtataaatacataactgaaccctcatacagcataaagcttataaatcatatactgaggccaggcgcggtggctcacgtctgtaatcccagcattctgggaggcctaggcgggcggatcacttgaggtcaggcgttggagaccagcctggccagcacagcgaaaccccgtctctactaaaaatgcaaaaattagccgggcgtggtggcgcgggcctgtaatcccagctaccccgaggctgaggcaggagaatcgctagaacgaacccagggaggtggaagctgcagtgagccgagatggtgccactacactcccgcctgggcgacagagcaagattccatctcaaataaataaataaaataaaaaataaatcatatactgaaccatttaacaaatacatatattcctgagaaagaatttcctgggggcattatcgcatttctagtttccttattttagactatttcagagggagatagggtctccctctgttgcccaggctggggtgcagtggagctatcgtagctcactgcagcctcgaactcctgggctcaagccatcctccagcctcgacctcccaaagtgctaggactaaaggcgtgagccaccgcgccgggccggagcctctgtctgcaaaggtgaagcagtcagtactgtggggcgacacaaccacgacgtgcgtaactatgcgatctccacactgcggagcagttgaacgggacaataaaagctcgcgtggtgagagcttgtgggcgagtgactcccttccagctcacgccagccacgcataatccaactccgggtgccacgccgctctctgcagccctggctggtgacgccgagccctcagcccggccttacgcggcggcggctctgcctcgctttcctgcccacgtgtcagcccctgcacgcccggccccggcctgaggccgccagaggacaggccagggtgggccgcccgttccgagggcgcgcgggcggaaaggaggggcgcccgtgactcacatgacccggtccccgaccagaccgccaagcctcacccacgcggcgctcggggggactcggcctctgagcgccctacagaggccagcccccgaccccgacctccctgggctacccccaacccccctgagggacccccgcggcgcacatacctgagagccccgccggaggcgggtgcggcctccgggcaaatccggccgcccgtgggcccgccccgacccgccccgacccgccccgaccttcccctccctgcccctcccgtccgttcccctccactctcctccccgcccttcctctcccctcccctcccttccccactggcgcgcgagcgtgcgcgccgagcccgcccgcgcctgcgcgcccccgacgccccgccggcgcgcgctgccgccagcgaggcccggggaggccgcggcggaggcggaggcccggcgccctgggcggcgccctgtccccgaagtccgtcctccccgttaggtggcgagcgcccgaggggaggggacagccgggcaagcaggaagctgcggcttaaaagggcaacccgcgcgggacccttcctccctagtcgcggggagtctgagaaagcgcgcctgtttcgcgaccatcacgcacctcccctccgcttgtggccatgtaccgctacctgggcgaagcgctgttgctgtcccgggccgggcccgctgccctgggctcggcgtccgccgactcggccgcgttgctgggctgggcccggggacagcccgccgccgccccgcagccggggctggcattggccgcccggcgccactacagcgaggcggtggccgaccgcgaggacgaccccaacttcttcaagatggtggagggcttcttcgatcgcggcgccagcatcgtggaggacaagctggtggaggacctgaggacccgggagagcgaggagcagaagcggaaccgggtgcgcggcatcctgcggatcatcaagccctgcaaccatgtgctgagtctctccttccccatccggcgcgacgacggctcctgggaggtcatcgaaggctaccgggcccagcacagccagcaccgcacgccctgcaagggaggtgagcgtcggccgggccccgtcccgccctccctgcctcccctgcggccctcccctccggcctcctgccggtgcggggccgctgctcagcccagcccagcccagctggagcgggccgggtccccgcccgggtcaccccgcctcggatgtggccggctctgtggatggtgatttttccgccttaaaatcatcatgcgattggcctgccccctcccccgcgccgtcaccccgggcctctgtatatgctgatcttgcatgcagagtagacgctgcaccggtctccttttggtcccggtgtctgtgtcacacacggcgggtcctgccgaaatgcacttctaggaaagggaatgacctgcccgtgtgataatgcctcgtcagtgttcttgggcttttgtgagtctcccctaaatgcaagctgtcaaattattttctggtatttgttcactcctgttccaatagtgacagatgatatccgaacatagaaaatgacttggcttctaagtttgaaatctagacagttttattaaccaaaggaatttactaatcacgcgttaatcgtttcaattaagtaattttcccattctgacaagttctgttttataccaaaaaaaaggaaaaacacaaaaaaatcacaagcaatgtaatatctctgacaaataaacacctggcgtcctgacagtaaatttacaggttgtaggctgcggatggccagccagccaatggaatgaaatagctctgggggtgtgtactggtcctggctagccctgaatttgagcttcaggaaaaatatagtacgtgaagaaaggggtcagataatgtttggtagtcactgggttatcctgtggtttaaatcatttaatgtctgtagatttggcctctgtagtcagattgctttcttcgagcaaataagagcttttttccccccaatacattgcatcatacctctttagtaacataaaatggaaaggacaaaccacttttgtctactgtaaaaaagaaaaattatatggaataaagagcccagggaggcgaggagtcttgttggaggtggattggctgagaagcacagaggatgttgggctagacccatgtctcagtaaacctggttctgtggtctttcagttatgcccgctgacttatgaggatttttagaaatcctctctgtaccggaaaaaacttgagcggtgctggtgttcccagcaggggggacaaaggttgtttttaaagatttactaaatttgcattgaccccgcccacttctaggacttaactt

SEQ ID NO: 4936 - DNA, 6000 bp, Homo sapiens
tcaaagcgtggaatggcggtttgactccccgctggcacacccaagctgtgacactgcataggttcctgcaactcactaggggaatttactgcccacttgcagttgtgtcattttgccactagatggtacactgttggtccttttggcttttacccaaaggtgcctggctcatttggaggggacttgtaagaggcattccaaagacgtgccatcatgtactcaaccaaatcaggctctttacagcttagtttttaaataaatattaagtgttagaggtttttatgtaaaataaactctcaagttctcatctgattgtaatggcccatattatctctaaataaacagcagggactagactatgattttcaaagctttcagtgttccggtcaagctcaatttgtgtagtttcatggatgcgtcctcactgcccaggctctgagcacttaaggttgtagagacacaaccactgccgagccacttgggattcagatctggtcagcctcatgtcaggagagaggaatgaagattctcctcttcagatgaaaccttggggacttctccctcccatcttctgctggtcaaggttcttgggtggcagataaccagaaaccacctctggtgaactcaaactgaagagggatttattggcaagatcttgggtagttcacggagtttatggaaggttggagaactgcactcagaactggggcaggaattccaggaggctgagctggctgggatcagagccagaatcaggccctggaatagtctggataggacgttgctgctgttgccacaacaggggaggactggatgcagggcactgtccttggcactgctgccgttgctgcagttccttttcttcagtcagcccattcatcctcagcacttttaattttattttaaactatcccttgtttgttagtatcacctgctgcagatttaatcaccagagtgagaacacacaacagaacctgctactcaaaaagtcctcgtgtgcaagagctggtactcacctgtgcattgtcattgtcacgtactatcgtcatactagctcttaaaatatcaaagtagtctcttaacacccagggtccattctccttctaccctctcagcatccagccattaaatggttaatagcaggcacagggaggggcctcccagagagtgctacaactggtgtctgctccagttggtagacatttgtggcaaaatgatggttaaatattttgaagattatccctgactgtgtctattttaggttagtttgtaagtaagggggctgacacttagaagttagtagtttctatattgagaaatgtgaaatgtgcaaagggctacccgcatatgacggtgattacttatcatgtatgagttgaggtatcctttttgtttggttcacaagacatctccattcatttcttctccagcctaagaatgctgtgtgctttgtacttgttttttaaattaagacgaattaaactatacaaagggaattggtaaatggattatggagtgttattacaatgaaatacagccattaaaatgatggatatgctgactatatagaatcccagaaaaatgttcatgaaatacttgatttaaaaattagaacacaaagctgtccagatattatgtttacaataatgtacttgctatttatgtatctaaaggctagaaaaaacttataaaagaatgaaaatagtttcagttaagatagcttcacagtggaaacaaaaagatttcttcaataatgctttaaaaattgaggaaaggccaggtgcagtagctcacacctataatccctgcactttcagagactgaggcaggaggatcgcttgaggccaggagttgaggccagcctgggcaatagagagaccccatctccacaaaataaaaattttaaaaattagccaggtgtggtggtgcatgactggtcccagctacttgggaggctgaggtgggaggatcgcttgagcccaggaggttgaggctgcagtgagccgtgatcacaccagtgcactcaagcctgggtgatagtgcaagaccctgtctcaaaaacaaaaacaaaaataaaaataaaaataaggaataaaaaccttaatacaattgctcatgaaaattatttataaaataaaagcatttggatgctatcacaacaacacttttgatcctgggaggcaaactaaggtatcaaaaacttaggactggaaaacatgaggacatacagataacagcaggttgtgtgtttctcgattgaaagaacaaatgtttccacagcttagagaaccatctgtggggacagctattgaaggtcatagatagtctcagatgtatttgacagtgacagaggcaaagttcctgctgatttgggctgcagagatggactttgaatgatttcctcttcatccctagcattctactctcttaattacaaggacagtaaggcaaagcaaccatccagaaaggaaaccagtgtccaacttcagcttttttaaaagaaaaagctaaagcatgtctccttttgcagaccttcataccatatcttcatatccctattacagaattcgtgaaccggggtttttctctgtatcattgcttctcacaccttaaaatgcaaagggagcacctgggattttgttaaaatgcccattctgattcagtaggtacaggagtctgagcttctgcattttctttccttttattttttggagttggagtctcgctctgtcacccaggctggagtgcagtggcacacacgaacttggctcactgcaacttctgcctcccaggttcaagcaattctcctgcctcagcctcccgagtagctaggattacaggcacccaccaccacacccggctgctttttgtattttagtagagacagggtttcaccatgttggccagggtggtctcaaactcctgacctcaggtgatccgcccatcttggccttccaaagtgctggaattacaggtgtgactcaccacacccggccgcttctacgttttcagtaagctcccagctaatgtgaatgctgctggcctgtggaccacacttgaaatatcaaggttctacatatcccgaggacttgtttttcagattgtgtgaccttcagatgtgttcagtaagaccttattagtcgaggtatgtacaagacttgtactttgaaaaaactataaaacattaccaagagaaattaaagaagtcctggaaaaagggagagataggtcatactcatgaactggaagactcaatattgttaaaaatgttagttttccacagattgatctatagattcaacatgattccagtcaaaatctcaacagacttttttaggtagaaattgttaaggtggttttaaactttatatgaaaatgcaaaggatctaaaatagccaaaatgattttggaaaaaaactcaagttggaagactcactgtattaggccattcttgcacagctataaagaaataccagagactgggtcatttataaagaaaaggggtttaattggctcacagttctgtaagctaactgtacaggaagcatctgcttggcttctggggagcctcaggaagcttcccatcatggtggaaggcgaagggggagcaggcgtgtcacacgacaagagcataagtaagggtgcggggggggggtgccacatacttttaaatgaccaggtcttgtgagaactcgctattgcagagatagcaccaggccatgagatatccacccccatgatccaaacacctcccaccacgcccacctccaacatcggggattgcattttaatgtgagatttgggcagggacaaatatctaaactctatcactcatattacctgatttcaaggctatgtaaaactacagtaatcaagacagtgagttatcagataaagacagctcactgaaacagaaaagagtccagaaattgacccagccatatctaaccagttgcttttcagaagtgttatgctaaacgagagaagccagacacaaaggattacctgtactatgataccatttatataaaatcctggaaaaggtaaaacaatagtaacagaaagcagatcagtcgttaacagggacctgagatggtacttggctgtagagatacacatgggaactttttggggtgatggaaaggctgtatattgtgattgcggtggtggttataggatgtatatatttgtcaaaactcatcgaattgtacaattaaaatggatatttttggttatatgcaaactataactcaataaaagatctggatatatattagggcattgtcagtataatttcagctttctttgagaccctactaaattaaggggttatccatttgaacatcagggattggttcccacctccaggtggtagagcacagtgcataggaacttgggccagaaagtcaggctgtctgggttccagtatcagctcctccactgcagcaagcacacagcttcacctgtctgtgtctcggtttcctcatctgtgtaactaacctgacattagtggttacctcctagggttgtgagggtcaaatgcgttaatatattcaaagcatttagaacatttccttgtgcatagtaagctatatataagcattcagtatgatcagtaagttctcaaatcagtttgtgttgtgattttacctctttctcctaaaatgtgttttttcccctttcctttaccctctctttaaaccacgtgcactcgtgtagcttgaggtttttaatagaatgtttgaaagggatgtcggataacatcagcaccaaatatgggcaacaaaactgaaaccagtgaggttgagtgatgtgcccaaggtcacaataatatgtgggtgaccacaaaccagaagcctggccaggtgactcctggttcagctctgttttatcaagggttacagtgtttgcatttttaatactaaccattgggatttatcgcgaacctgccattcatcaattgcattgtgtggtgtttgtttttctacagagcagttcagagccccagttgcagacgacttgtcctgccaccaccatgagttctggtaagtcattttaaactcatctttctcttatctaccaaactgggcagtttacccagatttcccacgcaccctgaaggccccactctggcattttattttttattttttgccacctgggtgaatgccaaagctttgtcataagttgtcatcatcactctcatcaccttcatggttaatgattttttgagtgcctactactattgccaaagaactgtgctatacactttacatgcacattagccctctctttattgagatgtaactggcatactataaaccacagatatttttagtatacaatttgataaaatttgacatatgtgttacaccttcatggcatttcttaatctgggtgactgcagcaaaagtaaactgattggccataattgcccaaggatgtgaactaatctaatgcttccttcatctaggctagtagagtagtttgctccctcttttgctttgcctttggtagtaaaagtcaagacctaaagaaataatcagttttgagtatttttagttttgagctgaggtagaaaacgtgggttagggaagacagagatgggaacagatccctgctcatcatgcagctaagagctgtcagctttccaacccagaattggagcagagaagtttccatctggagattcagccccacctaggctactgagcatgccctggaccctcctgagacctgcaggtggggcaggctgtggggtgggaagatgatcatgtggatatctcattccggagtctcccaatcctgccgtatttcgtgagtgttgtcagtgacctctgtggattaaaaatcacccttttccatttatttgcatacaatgccgttttaggcaagttctgagtaggacagtatgtagttcagacctaggaaggctctgggctggaatagctgaggcccacaccctgacctcagtgtttactggctgcatagccttgggcc

SEQ ID NO: 4937 - DNA, 6000 bp, Homo sapiens
aagcttaggttcaatggaagatcatgatgtaggcatgttaaggtgttgcctgaatgattcctgtttggaaacttctcagagtattcttggagaaaccaggagacacctaggagacagcacagtttacttgttatgattgcatacttgggtatctacagactggacttaagttctagctgtaccatatgtatgctttccaccttgatctagttccccaagctctctaagcttctgtaaagtggggataaaaccactatttatggatctatcataatcatctattaaaaggaagaggtaatagttttcaccatgtgatagaatctctagaatgtgtgaaatagctagaaaataaagaacttttggaaacagtatgataaatgggaaaggcataagcatgagagcctgaaagcactggaataaatgtccatgctgttgctcagctttttttatggccatggaggtcacattaacctttctaagtctcatttttatctgtaaaatgggcatatctttcagagtggttgtgaggaatagtgtcatgtgtgtaaagcaccaagtgtagtgttgggactgttattaggtagtaacgatagccatttacatggtgagatatggaaagagctggccttttggggtcagtctgttctgggtgtgaactccccacttaatagccatgttactctggccaaattatttaacctttcttcctcaactttactcatttgcaaaatagaaataatacctacctcatagggctataaagaggattcagtgattaaatgtggataaacatcacgtggctggtagatgctcagtgaggggtagctgctgctgctattgatgaaggctgaaagtccttgggcttccttctgctctggaattgtgtctgtgtttctgcacagtctctgtgggattctacaccttgtgttttcatctcagaacaactttatgactctaagttctggcagaggtaacttaagggaaactcatacaagtaactcacttttttttgggctcagtgttttacttgataaatgagactggtcccttaattactttgtaggaatgatgtgttttacttgataaatgagactgatcccttggttactttgtaggaatgatgtaaggctgcgggactaatcatggtggaaacatttccagagagtggataattttcctcctttttctgttacttgccattggctatttatgtatgtatgtgtgtatttgataattccacctttggctatataagatatatataagatatggtaatcttattaaaagctaagtcttggtatgacatttatggacacctttggggtaccaagattgctttgtttctccatcaaaagagcctgttcagttcatatacactatgtatgtgatcatgtgtgtgcgcacacacaaatgagattgtccgtaaagtagtgaatgaaacattccacaaggaaagatcattctctatgttatagtcacatgttttatttatagctgctgtgatagccattccctgtgataattagtaaccaactttgagagaaagatgagagggactgaaggttaaaactacattgtgtcaggtggaaacatccctattcttggacagtcagaaggttccttattatttgccatcctttcttcagagtattgttcactggactcctctttattttatctgagatttttcttgattatcaccagcattcagtgaggtatagaatcgattatgcagagagttaaaaaaatttttcttgacttgactttttctatatgtgatcttaggaagacccagagaggtaacatcttgacatttacaaagaaaatggaatgaatctagctaaattttttgagtgcttttcctgctgaaatttcatcttgctgcctgaaaaccttggcacatttacagttccctgctgttctggcaatgtcccagcatttattctttaatgggtttatatgccttcagtacttcatttttcaggggcaggtggggagaaactgtttagactggaagtcattagaatgtcatcataatacaaaaattatatatatccatcaatttatgttgctaaaatgcttgtcagtaattaaaacaaaaatatttgttgattttttttaatgtaggaaaaaatgactacattaaggtgggatattatgagcatagcatttttgttttgaggaattaagtttaaaagtgcacctctattattcctaagatatttacttttctagagggcatattcagtattctctttttataaagtcatgcccttgtaagtttattcttgaggtactcataagattaggaaaaatgattctctaggttgaaactgttttgattttaagcatatttctgctcaaaggggaacaatgttttgtacgtctggaaaattggatttggttattggactagtattataccattaaaatttttgatgctaattaaaattttatacatcttttcgtgtcgtaaggattcaggtatattttcacaaaattgaatgatttttctcttatcctgtaaagaattgtattgtaactattctaaaatgcattatcaatattttaaaatgtaatattgttatttcctattataaaagaaatgtcattgcaaaaataagtggaaatagtgttgctttgtcactttggttttttgtattttaatatttaataaagggaaactttgaaatacatacaaaaatagggacaatactatatatagtgagtccccatgtactaacacccagtgtcagtaattatcaactcatggcctatcttgttttatttatattctcactttgtatcccccccttttattctgacatgaatcttagaccttatgtcatttcaagtgtaaatatttcagtatatgtctctccctgaaagataaatgtaatttcttaatatgatggaataattcagttaatgttcagatttaccacacttgcaatgacttctttttaaatatagtttgtttgctttgagatcaattaagattcatgaattgcttggctgaaatgtctcttaaggctcttttagtctatagatattctctctctcacttgcagtttatttttaaaacttaaacaatttctgtagaattttccagactctggattttgctgattatattgctgaagtgtcatttaaagtttcttcaagtggtagttagatctgtaggcttgatcatactcaagaatacttgtccaagaatgtttaacaggtggtttgtaagcttttatcaggaaagcacataatttctggttctatttctttgtgaagttagcagccattgatagttattgcctagctcaaataattcattagtggttataatattctaattctgttgttccttttatatttgttagctggaatacttccataaggataaccttcctttcatcaaccagttggtagccttggggtatagttcatacataggagaaacaggagagatgcttgattcttgcctttcattcaccagtttagtgaataaaagattcactaaaagattcgttcaaggatgactaggcatttgtgtgtgcacttaatattactaattaatggaaggttttcttttaagctttcaataatattgggctacatcataaattcctgaggccaatggagatttcttctctgacagttcaataaccaactgcattgtcctaaagagcccttagtaggttggtacaaaagtaattgtaaagctgcaaatacttttgcaccaacctatatttgcaataaagaaccatctagttcattcattcattcaacaaatatttaccaagtatcttatatgccaggcactcttttagacacaggagataaatattttacttaacaaaacaaacatccctgatttctggtgttttaagctctggttgaggctaattgttaaaaaacaacatttcaaaacttctgacccacttacctctctgtcctgtctattcccgcaaatatgtcatccctactaccaactacacagcttctacaacttaaaaataaaaaagaagctgtcagaaaatgcctcttctctagagcttcaactgctattgggacatggttccctgtccttccttaagagaattttcagtcacttctaactatttatctattggattttgggaagatatattgatttttactttaatgacctagaatagtatatcttcaaatcaaagaaggcatgttttttgatttaacaaccttttgccattatcaaattattcttgctttataagagatgtattttaattctgtagttactgattatacaagaaataattgctacttgattagacttggcgtatgatggtcagactcagtgtattatggtatcaggtgatttgcaaagcaaatgatacagttttagtaagttcagagagaatactaacataaggatattttctttaaaaaagaataactttccagagcatagagtatttagtgtttttaaatgatggatactgctctgtatgtatttgtttcaaaacatcttattttatctttgcaggagcgattggttacatgggaacaagtgcctttgtccgaaaaatctatactaatgtgaaaattgactagagacccaagaaaacctggaactttggatcaatttctttttcataggggtggaacttgcacagcaaaaacaaacaaacgcaagaagagatttgggctttaacacactgggtactttgtgggtctctctttcgtcggtggcttaaagtaacatctatttccattgatcctaggttcttcctgactgctttctccaactgttcacagcaaatgcttggattttatgcagtaggcattactacagtacatggctaatcttcccaaaaactagctcattaaagatgaaatagaccagctctcttcagtgaagaggacaaatagtttatttaaagcatttgttccaataaaataaatagagggaaacttggatgctaaaattacatgaataggaatcttcctggcacttagtgtttctatgttattgaaaaatgatgttccagaaagattacttttttcctcttatttttactgccattgtcgacctattgtgggacatttttatatattgaatctgggttcttttttgactttttttttttcccaatccaacagcatccttttttttaaaagagagaattagaaaatattaaatcctgcatgtaatatatctgctgtcatcttagttggaccaacttcccatttatttatcttaaaactatacagttacatcttaattccatccaaagaagatacagtttgaagacagaagtgtactctctacaatgcaatttactgtacagttagaaagcaaagtgttaaatggagaagatacttgtttttattaaacattttgagatttagataaactacattttaactgaatgtctaaagtgattatcttttttccccccaagttagtcttaaatcttttgggtttgaatgaaggttttacataagaaattattaaaaacaaggggggtgggtaataaatgtatataacattaaataatgtaacgtaggtgtagattcccaaatgcatttggatgtacagatcgactacagagtacttttttcttatgatgattggtgtagaaatgtgtgatttgggtgggcttttacatcttgcctaccattgcatgaaacattggggtttcttcaaaatgtgtgtgtcatacttcttttgggaggggggttgttttcttctgtttattttctgagactcctacaggagccaaatttgtaatttagagacacttaattttgttaatcctgtctgggacacttaagtaacatctaaagcattattgctttagaatgttcaaataaaatttcctgaccaaattgttttgtggaaatagatgtgtttgcaatttgaagatatctttctgtccagaaggcaaaattaccgaatgccatttttaaaagtatgctataaactatgctactctcatacaggggacccgtattttaaaa

SEQ ID NO: 4938 - DNA, 6000 bp, Homo sapiens
aatgaacataacatgccattatttaattttgtagcttcatcaaaaactaatctcaaaaaaatagcaaaatgaatcactgctataaagaaatatagaccttctgtgcaactggtatagctaaaagtatataaaataattcagatgtactatctgtgaaaaaagatgtcaaactttcactggatagaacagtagattaaacactacagaaaaaaatactaacaaatttgaaagcagcaaaaaaatatacgaatgaaacacagagagaaaaaagactggaaaaaaaatgaacatcagtgagctgtgggaaaacatcacatagttcaatatacatgttactggagtccccagaggaaaagcaggggagaacaacaacaacaaaaatctgaagaagtaatggacaaaatgtttccaaatttgattaaaactacaaatccatagatccaagaatcaacaaatcacaagcacaagaatcaggtaagcagggcacggtgacccatgccagtaatcccagcactttgggaggccgaggcaggaggataggttgagctcagcagtttgagaccagcttgagcaacactgcgagacctcacttctactaaaaatcaaaaaaattagccaggtatgatggcatatgcctgtagtcccagttactcgggaggctgaggcaggaagatagcttgagcccaggagattgaggctgcagcgggctatgattgcaccattgcactccaacctgggagatgcgcgagatagtctcaaaaaaaaaaaaaaacaaataaaatcatgtagaaaacaacatcaaagcacatcacaatcaaattgcttaaaaccagtgataaacagaaaattctaaaagtattcagaggaaaaagatacattctatacagagagaacaaagattaaaaggacagcagacatctcagaaagaatgcaagccaaaagacagtgaagcatcatctttaaagtaatgaaaggaaaaaaaatgatcaacctagagttctatacccaatgaacatttctttcaaaaggaaagcaaaatagggactttttcagtcatataaaagttgaaagaatttatcaccgcatacttgctctactagaaatgctagagaatgttcttgaggtaaaagcaaatatggaaatatggatccagatggaaatatggatctacacaaaggaatgaagcagaccagaaatggtaaatatagacaaaagtgactccatcttggatgttaatctgccacattgacttctgactagcctcagtcccgtaaatgcctcttgattcctgctttatttactactgtaagaacatgtcaaccttggtgttggcacacaaatgacaggatatggcacatgcagcattcttacctgttctggagggctgtctttaattgtcttgcacagggtgcatataccatctccctgtactatataagccctgggtctggggagtaacagtatggagatctatctgtcttgcagctacccagggccacgcttctgtctgcaaattccctcaataaatcaatgaataccaacgaacaatttgcctgcctcctcctttggtttctccgtcccttcagcattcaagggtcactttgcttatatgaccctttcaggcaacaatatggttaaatacataagcctttttttcttatattgaaaatctcttcaaaagacaattgactaacacaaaaataataacaatatattgtggagcttataacatgtagaaataaaatacatgacagtagcagaaagaccaaggggaagggaggaatgaaagtatactgttgttaggttcttgttctagatgtgaagaggagtaatattacttgaaggaagattgtgataattaaagatgacactataaactttaaagtaaccactaaaaaaagaagaagttatatctaataagccaacatgagagataaaatggaaacataaaaactgtgctcaactgaaaagaagagggaaaaagaggaaaaagaacaagaacaaatgtgacaaatgaaaaacacatagcaagattaaaactaaacatactaaataatcagattaaatataaatggcccgaacaccccaattaactgcagagatagtcagattggataaaaaaacaagacccaaccaaacactgactacaagaagcccacttatataaagacaccaataggctaaaactaaaactatagaagaaatatctgtcatgctaatgttaatcaaaagaaagttggagtagctatattaataccagactagtagatttcagagcaaagtatataatcaaggataaagaaaatcatttaataatgataaaggggtccattcataaaggtataatacagtcctaaacatttatacacacaataagtttcagcccaccaaaacaagaaaacacaaagatgcctttcatgcagtatcagtattcctgtaccaaactgcatattgccaaaatagggcttaaaatcttctttatgtaataaatggcatgcaattttactaataaaagtacagtatcacccaaaagggtcaaagtcagtagtgtgttaaacagcttatgaaaatatttatgacttgagtgccaaaatctaaagctgactcacctttcgtattgcctatctcgtggtaatgaagcactccaatgtcgaaagtctatgattaacataagtaaaaggagacaggatatgaagaagagtcccaggaatgccacccgctgacggagaaatggactcactgtgggcacagtgaagtaccaggaggctgggcagaggtaggaaaaactgatcctgaaattagacaaacattagtaagtctgaaacatttctacaactgagtgcttaaatatcgttttaaaattggataaaaccctcctaataaaggcaaaaatccatgccaacagaagtctaaatgttcttgtcatctctaattttagaagaagctcatggtgcttctactatatatatcagaaaagccttatctgccctttttccaaactgcactttgagtgcaattcaaagacttaatctcatgttagtgaaaagatcaccagtctccctgggcaacctcataacattggagaatcagagcaactacagtattcccaaccaagaattctgtcaagaaacaggatggtcagaaaatttatttaactgattttaaaaatgttttaccagattatacaagcacatagtaaaagacaaatcagtttaaaaggatatattgtatagtgaaaagtgattcttgccctgaccccacaatctctcagaggcaaacattactacccagttgctgtgtaattttttttttttttgagatggagtcttgctctgttgcccaggctggagtgtagtagcgcaatctcagctcactgcaacctccacctcctgggttcaagcgattcttctccctcagcctccccagtagctgggattacaggtgactgccaccacacccggctaattttcgtatttttagtagagaccgggtttctacttggccaggctggtcctgaactcctgacctcaggtgatctgcctgccttggcctcccaaagtgctgggattacaggcgtgagctactgcacctggccgttgctgtgtatctttccagggatattctacggatacacaagcataaatatacaccaatatatttacagtaatatatctctgtgtgtgtgtgtgtgtgtgtgtgtgtgtgtgtgtgcgtatccattccctcggttttacacaaatggtagtccaccatacctgctgttctgcatctttcccccactttattttataactttcccttattggtgcatgtagatccacattaatattttttaaaagcttcaggttattataatgtatggataagtgtattcatctgtgaagttcactttgtatattgattcaaaaggacctcggtctgtctgcttttaaagttcactgcaaacaaaaaacaaaaaaacttctttgtttaacctcctcaagtggcacctagccttgctcagatgcgaatctgaatcaatgttacaaccttgcactttacagagctgagcaagccgactcactctaccactcctggtctatgggctagaaactattatttatcagccctcgaaataatacaactttgatcgtctctgcatccaactaaccagaatacaaagtccaagtgcagctccagggcaaacctcacttgggacagcctcccagggccccccaacctgcctgccatcctctgccgtgctcccagccggagggaaagtgtgcagccttacctagccatgggttcccttcggtggtctcaacgcctgtcaccttctttttcttttgccctgagaaggtggcctccttgtcccaggcatctcctacgtctgcagcctagaaagatttgatttcaggcttctgtccgactgagcccacgagacaaacctgcacgggaattccacggctcccacctcctccccaggctcccgctccgtctgctctggttcctcaggcccaggggaccctacccgggcatcctgggagcggggcgttctcgtgggccagctctgtcctctaggaaccggtcgtccccaggtggcggggtgtgggtcccgcttcctctccccgtccctccgggtcccacagccctctcgcgcccacactcacgggatcaagcggcccgccggttccttcggcacctctcggttcagtcccgagctgctccccgcggccccttgcccagccggaaggagggcccggccggcggcggcgccacgtccccaaggaaaccgcagggagccaatgactgacagaagactcacggaggggccggctctccacgagccgaaccgggggcgaaccagctcggtcagcagcacgtccgtccgccagggtggccaatcccctagagcgctcggcctctgatgcccgccccgggactttgagccgcgcccaatcggaaaggcgtcgtaccgaggctccgcctgcagggcccgcggagagctcacaggtgagtggcgctgggcggccctgtgcccgcttccctccctggggcgcgaactctcggctggttgctttctccacggccgctcctgggacagagtagctccggtaggtgggttcagggtgttcgcgaccgaagcgcatcccttgcccataacctattgttggttttgtgcccactgaccctccctaccagaatggcagttctctcaccttaaaccttccctatcacctcccaaactgatgccccgacctcactgtcttgccccgtgagaaaacagaaatcgaagacaatgacgtttacaccaaagtgcttatgtccattcattcattcattgaatgtctgcttatgccagtcatcatgaatttctgtgtcgccgccctccttgaccttacagtaacacaaaggaaacgacgcgcgcgcgtgggtgtgtgtgtgtttctttcttgcttacaccagccgttatctcatttccaggaggacggcataaagtccaagctctttccaacgtggcacatccattgcgccccacgatccgccctaccgccgtcctctgccgctacttgccttccttaccacgctccagcaacgcgtcctgttttgctcattctgcccctccacctgccttgaataaccgtcccagcctcttagccaaatcacctcctactcatcccttaccacccatcttaagggtcgccttcccctaaaagccctacttgacctactacaccttttttatacatgcctattgtttcacttagcacgttgaattactattatacgtatatgtctgtctgtctgtcccactagacagaatatccttgaaggcagggactatttgcttccacatattcccaatactggccactgcctggcagataaaacacaactaatgtataattaataagcaaatgaatgaatgggggggatcggggaggaagaccacccaaatgctttatttattcaaagcttactatgacaagggagtcagtcaccatcacttgcatttggccg

SEQ ID NO: 4939 - DNA, 6000 bp, Homo sapiens
agctggaggaatttgcatgctttccctcttccgggcctcggcagtggtgaggccagtgggtggctaggccatttgggtacatttccctagcaaatgcccccatctggtgcttccctgctggggagtgggagctgaggaccagggtgtcctggaagggggtgcatgggtgagagagaggaggccctgttgggatgtgatggaaaggcagtttggagagaccactgacgggtcagccagagtgagggtcctccccagccctactcccacatcctctgcccctccatgctcacccatccaagcctctcgggccttctccaacccagtcagtgccgtgtggggaggaccacccaggcagcctgccctcacagctggcagaccaggtgctgtcagggcgaggggctggggccagcctgctctgcaaggactggagaaacgtgcacactctgccctggcaagtccagacacccctggcttcccactctagcaggggcctctctcctgggaggcctctgtcaccacccagatgaccttggtgaatgtcatgctctaagcatcccgactgaactctacttccctctcctccctaacctgtgcctcctctcctgtgggcactcatcccatcgtccccggcctcagggccttggcagctgtcattccacctgacctttaagccaccacatcataagctgagagggccccagaggccacaggctgcctggcctatacatgtttcatttggccttcagagactgaattctagattcaactttagaatttgttggcatcttctaaaaaccagaatgggccgggtacgatgtgcctcatgtctgtaatcccagcactttgggaggccaaggcaagaagattgctagagcccaggagttcaagaccagcctagggaatatagtgagaccctgtctccaaaaaagaaaagaaaagaaaaaaattagccaggcttggtggcacatgcctgtagtcccagctacacaggaagctgaagtgagaggattgcttgagcctgggaggtcaaggctgcagtgaaatgtaattgtgccactgcactctggcttgggtaacggagtaagacctgtctcaaaacaaaaaagtaaataagattaaaataaaaatcggaatttttcacataaaaatcagattttcaagttggaaatccagaaaatccagccccaccaggcccgcgtgtactcctggaacaggctggggtgcccccagcctatgcacatgctcagtggctccccaccccgtgtgctctgtcacgacctgcctggccccataggcatctgggcttgccctcagccccagtcctgatctgcccaagtgcttctctgtgcggctggggcctaaccctgaagcgtgggccaggggagcatcctgccccgtgccctgcagtgaggtgacagagcagagctggaaccaagcgcagggtgctcttcagcgcagagtttgatttcttgcctgattcgcctctatgacccctgaaggcccagctcagaaccgacacagaggaggtgctcatttggcactggtgacaatactaggagccaaaggagaggttcaggactcagaggaaaatgggccactatggcctggggagatcaaggaaggcttcctgaaagaagaggcacagtaagtaagtgagggcctattggcacaacagtaatggttaatagtcactgagcactgggtaccaggcactgcactaagcttatcacattcagtcctcacaacaacactctgagataggtgctaccaccagctgctttataggtgtggaaactgaggcacagagaagttgagtgctttgctcctggtcaactagtaaatagtggagacagcattcaaacccaagcagcctaactccagggtctgcccacttaactcctgggccctgggtgccccgccagcacggtgggtgctttacccacgtgatcttctttccatgaggtgcacctatctccattatttcaatttctatgcccattttacagatgaggaaatggaggccaagaggcaagctcacttgcccaatttgtgctctttgccctagaggcactggcatagagagtgctttgggagtctgaacaggctcggaggcccaaggacagtgccccgtgactctctctcatcttcccacaggcgctgggctggtccttcgtgctgctgaccactctgctggcattcgtggtgcgctctgtgcggccctgcttcacgcaggccgccttcctcaagagcaagtactggtcccactatatcgacatcgagcgcaagctcttcgacgagacgtgcacggagcacgccaaagcctttgccaaggtctgcatccagcagttcttcgaggccatgaaccatgacctggagctgggtcacacccacgggacactggccacggcccctgcttccgcagctgcccccacgacccccgatggtgcggaggaggaaagggagaagctgcgtggcatcacggatcaaggcaccatgaacaggctgctcacgagctggcacaaatgcaaaccgcctctgcggctgggccaggaggagccaccgctgatgggcaacggctgggctgggggtgggccccggcctccgcgtaaggaggtggccacctacttcagcaaagtgtgaggtgtggccagctgaagaggcaggaacggggatctgagcccacagcccctccaacccccaaaccaggtggaaaaaggaagggtttcagtgctgggcagtactcccctaggcagatccacactccctagcactcgcctgcccattggaggcaggaaatttggagctggaaggggatctgatgccttcaggtgtgacactgccctggatggccctagggcagtgggcccatgagcagtattagtctaaaggggtcggaactgtcatggcaggtacagggaccaatggctcccctctgcccagcccttcccaggctgatgttcactgtctcctcccaggttcaacagacatccctgccccagggtccaccctcgtctgtggctgttcagtacctctcttcctttatgctccgggctcggggagtgggaatcatcaggcgtctcatgaagtgggagccctctgatttgggcaagcgtgtcgtaggtgagactgggtgtgccggggcaggtccataaggacatgacacacagcctacctggtgtgacacacctggggtgacaggcgatgagacaagatgtcagaagctaggttcacatggaagaggtcagagtgtgtggtcaccatgggggtcatgtgacaattgtccaggtggactgcatgtttatttagcacaaaccaagcacaaaagtcctcctgtagaggggtctttgaaaaaccaccttaatacccccgtcacatccaggtctccaggggaaatcagaccatccccaaggcttgagaagttagacacagaagctgaagtctctccatttttctcaaagaccccacctcttggggatggagttctaagaggctaagaggagctccaaggctctagcccaggtgggatgagggtggaggagagcagtgtaaagagaaagcagctcagattccagagtgagacagaactgggtcaaatggtgtctctaccactcacaaaccctgtccctgggccagctgcatcactgcctgtgccttcgtttcttcatctatacaatgaggatgaggcccccccggcccgccatcatggggttgctgtgtgtaaaagcacatggcacatagtaggcacccagcacagggtggctaatgtatttgttgatttctgaacctaaggacttccttcctcctcccctgggcagggatgagacagcaacacaaacactcgagcttccatcttgttgaggaggaaacagaggtacagataggtttctcagcaccgccctcagctctgagacataagtcccaagcatctaaggattcattttgatcttggcatgattccatccttttttatccatccttccctctattcccacttctggggtccagtttccctcctcttaattatttgggaggagttgctcagatctttgtgggccaaggtgggctgggagggctcttccaggaggtaggagttggtatgggccctgaagtcagggaggattaggatgagcaaaaaacaaggtgtatgttggtgggtggcagcacttccagtgggaagagaaggcccggaggtatcaggaggtacaaatgtgatgaagagcaaagctttgggtcaggcacacctgagttcaaataccagcactgcaggacttgtggccagtcacccagccactctaagcctcagtgtgtctgtctataaaatggatattagaagacctgcttggccaggcggagtggctcatgcctgtaatcccagcacttgggaggccaaggagggaggatcacttgagcctgggagttggagaccagcctgggcaacatagcaagactctgtctctgtaaagtaataataataataagaagaagaagaagaataaagagaagatttataatttttttaaaatgaaaaaattattttttaaaaaagacctgattttcaggattgtggtaaggatagaggaagataacttttagggaaggatctgggactgtgtttagcacatgctgggatctgaaacaaacaaataaacaagcagaacttggtaccttttctttccttcgtacatatggtcaagcccagctcagggaggccagcgggtcactcggcagctccaccatgacggaaccacgagcactgcagagctgacagatgtcgggggtcctctccctccatgctaagggtcatctagcctgtccgtagactctcctgtgcagcattcctgacccgtgacgcttcagcccgcatcttgaccacttttagatacaggctgggcagctctgattattacacagggcttccttcagaaacctgcctccttgtaactttcacccaccagttggagctctgcctgcaggacccggagaatccctaggctcctgaattcaatcctcagccctccagggatccgaagcaggtcccggggagttagctgactataggtcaaagagtcagcattggggatggtttgtccagtcaatggacaactctgagggagaagggccagtagagggtggggccctggccctgagcatcctgcagggctcagcgcgggcctgacgacaccctcccttgaccctcgcggggtctcctttggtagcttctgcccagcgggggtcaagtacgtggggtgctcttgaaactgtcatggggggcaggtctgggtcagatctccccaatgcctccacatccccacgtggccctcccgactggtcccattggtgtggagcatggcccggtccgggtctgggccgagggcggagggccagcacggcccagggacggcgagcagcgggtcggtgggacgcgcagcagctgcagaacaggcatctcaacttcctctcggctcctctcctctcgcgccgccctcggggcccgccctcctctgcctggtggcgccgggaggctgtttttccactcactggcgcgcagactccatcccactgttttcttctctcttttctggagttagattagtctgaagccgccaccagccccaggcccccgtgcagaagaaaagcgggagggaacggcggaggccgccgctgccctgcaccgccctcctggaggccacttggagagtccggccccgaggaggccatggccacaagtgcccacagctggccccaggtaaggaaggggccctccctggggtgtgccaggtgtcagcggagcatggtggggcctgtcccacgctgcccagagggagagaggcccctagctgaggttccctccacccggttgaacagggagcagtcctgcccctccccgagccgccagtctcctgtcgtcactgatgttggaggaggtcccactgggggtctggatgtgacccatccttggcctgggggcagtggtctcagaagatggcctggcccatcctc

SEQ ID NO: 4940 - DNA, 6000 bp, Homo sapiens
actgttgagcccaggcttcaaaccatggagggcctggtcttaggagcggctatttttagtgatgacagcgtatcacaagtagggcattcatttatgaaaatttcttctaggtggctgttcaatgaacacaagcctcaaataccataaaaaagtgaatgattacaataaagaatgtgtttgaaagccagcagttgtttccagcagagattctctgcatgaggggcagggggccgctttcatgtagtgctgatgtgagtggccatcttctcacgttactggctctccagagaaagtcctctgtccacttgccttgtgtctcttgtcccttcctcatgacttcatctcctgcttttgcacactcaggtgagccaatccaaggagcaccagcagtttatcaccttcttacagagactccttgggcctttgctggaggcctacagctctgctgccatctttgttcacaacttcagtggtcctgttccagaacctgagtatctgcaaaagttgcacaaatacctaataaccagaacagaaagaaatgttgcagtatatggtatgttaagtcactatttattcttttaaaatcttttttttttttttggatttcagaaatttgctaattgtagaaaattggaaaaatgcaaacttatcctgacctctaacaccgtagagtattactattatcttctttggcatgttatataagttgaatgatacagttatacactcttacatctggcttttttcacgtaacgttatttttgagattcatacatgttgcatatagttgttcctttgttcttgttgtgtagtgttccattgtataaatatttaccacattttattcattctgctgttgatggatatttgggttgttttcagttcacagctgctttgaacagtgttgctatgagcatatttgaatatgtcttttggtgaatatctgtgcccctatatacagcatgtatgtgggaacagaattgcctggttgtaggctctgggtatattcggctttggtagataccaccaaacagtttccaagggattatacctacttgtactcccacaacagtgtgtgtttcacttgctgcacatcttggccagcgctccgtcttctttgttttaggaggtgtgattggggtgggagtactattttatacagttgtagtttggagctgaaactacttgaatcactttttagagccaaaaggaatctaatctaatcacctcattttatagttgaggaaaataccccaggtcacactgctaattaatgggtaatctcgggatcagaattcttgtttcctaacctcgaggcctgtgctttctctggttccactgatgtacaatcatctgtgtaccactgggtagcttaaagaatatttatacactatctcatttgattctcacaacagtcctggaaaatggatgttttaggtatttctacttccctctgttctccctatttctctctctacaccctcttttctttccccttccctttcttatttacctcaatataggacaaagtaggtgtaagcaaagtaggtttaacagcaagtcatctgagaactcacaggttgccagtggtggaagtggggccccacccttgtctgctgacttgccctcattctcttcctagctccccatactttcttactgtggctgctgggattgtcatgatttgttgagcgtaaccatttgacagggttttattctctctcttcagctgagagtgccacatattgtcttgtgaagaatgctgtgaaaatgtttaaggatattggggtaggtgtccaccatttatggtataaaagctatctcaacttctgttctctttagatctagtctgtttgagctacctttgtggtggggtggaccccgagagaagcagtttctgctggcttaatgataaaggcatttttgggaacggggcatgtaggatgggttgggctatgttgaaggtgaagcccatcagtgtagatttatttgaatgttctggaattttactggtttcacatttattcccaagctgctatatataactggtatcaatatgtttcaaggtgctacaggttgaatatcccttatccaaaatgttgggaccagaaatgttttggatttcagatttttttgggattttggaatatgtgcattagacttacaggttgagcgtctctaatccaaaacccaaaatgctctgatgagcatgtcttttgagcatcatattgatgttcaaaatctttcagattttggagtacttcagatttttgattttgggattaggaccacaatcttggctcttaattattccatatgatttttagttactttcttgtatttttacaagaatttctagaagtatcctcaggtgtcctttaccttcatgattcatggggaatgtaagttctatagagatactagcggccttttgtgagggactgtttgtgactttattctaagtcattttagagtatagttatgttggttgaaattttagaatatagttaatgttggttgaactccatcaaaacaaaaaaaaaaaaatagaaaaagaaaaccttgtttgcattggaaactcccacctcatgctcacacacacccaggcatacatttacttaatgccaggatatggttttttgtgcctttactgccttctgaggtctaggacaccacaggtcaggttggtaatggaaattttttttattttttattttttgcctttaatttaatctaaaccttttctttaggttttcaaggagaccaaacaaaagagagtgtctgttttagaactgagcagcacttttctacctcaatgcaaccgacaaaaacttctagaatatattctgagttttgtggtgctgtaggtaacgtgtggcactgctggcaaatgaaggtcatgagatgagttccttgtaggtaccagcttctggctcaagagttgaaggtgccatcgcagggtcaggcctgccctgtcccgaagtgatctcctggaagacaagtgccttctccctccatggatctgtgatcttcccagctctgcatcaacacagcagcctgcagataacacttggggggacctcagcctctattcgcaactcataatccgtagactacaagatgaaatctcaataaattatttttgagtttattaaagattgacattttaagtacaacttttaaggactaattactgtgatggacacagaaatgtagctgtgttctggaactgaatcttacatggtatacttagtgctgctgggtaatttgttggtatattatctggttagtggttaatgcttcctttaaaaataattgagtcatccattcactctttttcagttttatctgtcaatagtagctacatttttaatgggagcaccttttatcccaaagtgctttataaattgagtggactgatatatatcacacccaggtatcactgtgctgtcctttgctgtcagatttagaaatgtttttaagagctatgtgaaaacagacaatattagtttaggtcgggaactgagatattgtaatcaaatagttaacatcaggaagttaatttggctggcaaaattctagggaaacttggccagaaaactggtgttgaaggcttttgctcatataaacaagtgccattgagtttcaaatgaccagcaaatatatttagaacccttcctgttttatgtctgtacctcgtccacccctcaggtaatacctgcctctcacaggtacagctgtttcttggaaatcctccaaccaaatagcagttttcctaacttgattagcttgagctgacagactgttagaatacagttctctggccacagctgatgagggctttctgtactgcacacagattgtgtactgcaccccagtccaggtgactggtacccactcgagttgtgccgtgcacaacctgtccagtatatgcatgtggtggccctactgactggtaatggttagaggcatttatggatttttagctttgaggaaaaaccatgacttttaacaaatttttatgggttatatgcctaaacccttatgccacatagtggtaaataattatgaaaaatggtctgttcataattggtaggtgccttttgtgagcagggagcataattattggtttattatggtaattatggtgattttttaaatatcatgtaatgttaaaacgttttctaacagtttactgttgcttatctccaagatattatggaattaagaatttttccagatgagtgttacatagattctttgaatttagtataaaagtactgagaattaagtttgtacttccataagcttggattttaaacactgatagtatctcatgagtaatgtgtgttttgggagagggagggatgctgattgatatttcacattgtatgaaataccatgtttgaaactcatagcaataatgctatgctgttgtgatccctctcaagttctgcatttaaaatatattttttctttataggaattgatgtataccatgaagtcattgtcagttgtagtagctctgatgttgaatgagatatcatgttttagcattccattttactgactagggtagaagaacacttttcttggctacatttggaggatacccagggagtcttgggtgttccttatctggggaagcaaacatttcactagtctctttttttcatcctttaaattgtaaattaaggattactcaagctcaccattattcaagattgggactcgcttcccagtcgacactctgccctgcctgtcattgctgcaaagagctgctgctttgccaacctaagcaaagaaaatacggcttctcttgcattattttcccttttggttggtttgttttctagaagtacgttcagatgctttggggaatgcaatgtatgatttgctagctctctcaccacttaactcactgtgaggataaatatgcatgctttttgtaattaactggtgctttgaaaatcttttttaagggagaaaaatctcaaccaaagttatgctcatccagacaagctgacctttgagttaatttcagcacaactcattcttcagtgcctcatgactgaaaacaaaaaacaaaaaaacgaaagcatcttcacaatgaagcttccagatagcaccgttttgctaaaagatacattctcattgttttccaacagtgatggcttccacataaggttaaacaaactaggtgcttgtaaataatttattacagtttactctatcgcatttctgtaacatgaaatgcatgcccttcttcaggggaagactgtggtcaagttaaaaaaaaaaaacaatattaaacaacatgaaactgcagtctgtttttgaaaatgagaatgtcctaagtgattcagaagagaggagggaagttgtgcactctgaaaatgcatgaaaaacaaaggcaaaaactagtgggaaatgtgtagaactgttaactgagatggcttcgagtcttccttctggaatctgttaaatttcacaaagtcatgagggtaaatggagaaaatatttctgggattacaatgaatgtaagcccaaattgtggaattgccagtaacctggatggggaaaagcatttcccatagcactccatgtaatatgagtgctctgtgagatgttcatcagtgttttatagaaatggtgttgctgggaaaccaagtttgcacctggaaacttacaatgcactttagcgcagtaagggcttggcatccggtagtgaaaaactgtctaacccagcattgcccaaactattttgacaccaggacctttttctcctttgggatacttatgaacctctcactaatgtcctgtggagaacattttgggaaacactatgttagatagttctttaaggagacaaaacggtaatgaacagatagcactggggcagaatatgcatgcattttgtaacgtccagtgtggcgttgaatagatgtgtatttcctcccctgcagaaaataagcacagaaaattataatgtaggtgatc

SEQ ID NO: 4941 - DNA, 6000 bp, Homo sapiens
cctgggggtcaggcacccagattgccaataagaatcttccatttgcaaataatgttcaaaagacacttcttaatatagtcagcctggaaaagggctctgaaatctgagagcaactggttcttcttgtattgccaaagggcaaatgtcaaagtacagcattagaaggtgagatctgtgtcagcatatagacccttacaccaactttctgggtgtagacgattcctattttctcatttctcctaaaagattgcaagaggacttgtgtgtttataaaagaatttttaacactttgggaccaatttgccttttaaaaatttgcctttgtgaatgaatgctccagggtagtcataatctagcccttctaaatccctgcctcccagccagaaagaggcacatttctagatgattagagaacttcaggtgggaacgttactctgcttctggctttatgccttaaaatatgacctaaggcaagctatcatttcccagaaatgaaatatgtcatatgttactattaaagtgaaccagaaaaagagcactctattacaataatgggttttgtttaaaaaaattcaaatgtcaaatccccaaaggaataatacatatttgatactattattagaacagcaataccagtaattgtatgaggtacttatattttgcattgttcatccagtaaagggattttatgtaaacctttcagtaaaattattgtgtcagaggaaaatgaggaacagcatcactcattattcatgcaatcaatatacatttattgggggtgactgtgtgttggttatcagtctaaatgctggggatgaaaaaaaagactaggacagcttcctgccttcaaggagcacacattccagatgaggagacagatatagcaactaactacaatgcaatgttacaatagacatggcggaggcttcagtgaggccgtggagtatactacagggaactatgaattctgaccaaagaggtccatattatcgtagtgtcctgtttgagctgagccgaaccttgaaatatcaggatgaagcacgcattaggcagatggaaatgaatgggcaaaggtatagcagtcaaaaatgtcatggcacacttagagactggtgaatagttttttttttttgtaactaccgcggtaaatctgtcaagctgtctgatgtcaaatgttgaactttcatggactagaatgagttaaaaaaatctgaatgctttttaagcagtagaattttacaaaatggagggccaaggaaggcaatgagagaaacagacaaaatgctgcatggaataaaactgtcattctcatcctgactcatctgttaacttatgaaaatacacttacatcaagaaatgccagaaaattgctcacttcacgtgcttatgggtagattgaacctaattttgtggcattaaaaccaattttctgctgagcaacatgtcacagaggattacatgaacctttataattatcaataatatttgatactttgatgtcacctttcatcctgagatcagtcccatacacataggaacagataagctccaaggaaacagagatgatattaatacattaagtcacaatgcttttctgtcttcgatattccaagggcagtgtgtttctctcacctttagaagttagtggatgtaggccgggcgtggtggttcacgcctgtaatcccagcactttgggaggctgaggtgggtggatcacaaggttaggagtttgagaccagcctggccaacatactgaaatcccatctctactaaaaatacaaaaaaattagttggttgtggtggtgggtgcctgtaatcccagctacttaggaggttgagacaggagaattgcttgaacccaggaggcagaggttgcagtgagctgagatcatgccactgcactccagcccaggcgacagctcgagactctgtctcaaaaaaaagaagaaaaaaagaaaaaaaaaagttaatggatgtagttgtaaagcagtgatttttttaattattatttttattagctcctactacgggaagtcttaggctacagtatgggccacatctttctgttcacagctttccttggaagatcagcttttgacatatagattctcctactccctggcttctttgcctgctgatctcatcctgacataccagaagtgggctgtgtcttcatcgattctttgacttctacaagagactaacaaggcatcatcatcatcatcatcatcatcatcatcattatccttccaactacaacccccagtactgctgctgcttatgaagtaagcactctatgcactattctactattctaaaaactttatatatgtgtatataccacattaactaattccacaccaacattatagggtagtgctgtccagtagagcttgctgcaatgatggaaatgatctatatctgtgttgtccaatatggtagccaccagccacatgtagctattgagcacttgaaatatggttaatgctactgaggaactgcatttttcttttatttaattttaattaatttcattgacatagccacatggctagtgactattgtattggacaacacagttacagcctctgggggtttattgttacctttttaaaaacaaagctctgtattcatcagcagcacaaacttaataaggacaagtgtgagtgaatggttcagaaatacattattgaagctaaaaatacagatgatccttgacttccaatgaggcttatgctctgataaactcatcaaaagttgagaacatcataggttgaaaatgcatttaatacacttaaactaccaagcatcacagcctagcctagcctaccttaaacatgctcaaaacacttacattagccggcagttggggaaaattatctaacacaaagctattttatagtaaagtgttgactatctcatgaaacttattcaatactaacctgacagtgaaaaatagaatgattgtatggtccatagtcaaaatacagtttctactgaatgtatatggcttttgcaccatggtaaagtctaaaaatataagtagaagcatcataagttggagatcatctgtattttaaaaagaagtcccatattctacactgggagagcttttagttcacccttcccccaccctgttaaaatttgattcaaaagaattccgtggaatatatagggtaacatgaagtcatttctaaacaaagaacatttacaaaagatgtggatgatgtcttaaacctcattgtaatccaactatcccaagtaatcagcaccggtaagcactagtccctctattgaaaattgaaattccaattactgattttccaaaagaagacattctcctccacttacgaaatggaacaatgaaagaggattttctgtttggggtgaccggggagaaacggagtcttcacacaaagtcttagttcatattcagccctcctttccttgaaaccacatccccaggatttatctggcttgtttgtgaaaatatgggaaaacattttaagtcgaagaaactgatcagatgacttaattacatttctgcttagttcagcctgtaacttagactgttagagagagagaacttaagtagcccttggtttgaaccatctgtcgcgaaaatgtgacatatgtttgctttgtttactcaacaaccaagtgtaaactgatacactgaactagagtatccctgaatgatgtggctatgggtgtgtgtgtgttggaggaggggtgtctgatgagggcgtccgtctcctcatacttaccctggaggaacacgcgtacagcacaagagaagtgcggatccgtaggatgtcccccgggtttggggcgcgccccgaggcgcagaccctctttggcgactccacacaatatgcagcccgcctgcaagcagccgctgcagccgaggggcgcgcctggctgatgtgtggttgaatggagagcggcccaaccctcctccttcctcctcttcttctccccgccctgacacccgggcctcaaacttcaaccaaagcccgtgcccttttcaatttacccccctcgatcaaaatgagccattcttgtctgtcctccgcggcggcccattgtctggcgtgataggtttgcagatttgacagctgggcgcacgcagatttgattcaaactcggtctccccgagagatgaacttggacatcagcaaagatcccgagcactgccggctggctcctagaccggtctcccgacccagtgtagacttcggtgccccgggcgccccccggcgtgcgggaaggggagcgtgtgtcaggcgtggggggcggggggtgagcagcacgactgggaaccagcggtcccaggggttggggcgaagggctgtgtacatgttaggctttttttgttgttgttaatttactctcgaaacagccaaaatggaggtcagcttataaattttctaaagccaggtctggccgggtttaaatgcagtgggctgggggctccgcttttgtctccttgtcggagctccaggagagaggtagagactgcgtgtgcatgtgtgcgtgtgagtgtgagtgtgcacgcgctggcgtggacgaacggatgggcgcatcccaggatcgccgctccagcgtcctgggtctgagtgtgtcttgaaagcaccaagtcttgaatcacagccactagtgacgtgggggaaaactttgtgttccgaagaagggtctggctcgattgccctaagaagaaagagcccttgtgcccgtgtatgtgtgtgtgtgtgtctgtgtgtgtgtgtgagagagagagagagagagagagacagagagagagagagagagagagagtgtgtgtgtctggcagcacccgcggccggctgcagaacactgcgtgtcctgtgcgcgagtacgggtccggccgcgggtcccaccgcaagcgggcgtgtgcagctgcggctgcctggcgggcgagcttaggagggagctggagctgcggagcggcgggaacaggagcaggccgagggtcctctggccagaagaaatctggcctcggaacacgccattctccgcgccgcttccaataaccactaacatccctaacgagcatccgagccgagggctctgctcggaaatcgtcctggcccaactcggcccttcgagctctcgaagattaccgcatctatttttttttcttttttttcttttcctagcgcagataaagtgagcccggaaagggaaggagggggcggggacaccattgccctgaaagaataaataagtaaataaacaaactggctcctcgccgcagctggacgcggtcggttgagtccaggttggtggcatttggagtttttttcgttctgtttgggaacccattgccgcttcccgtccctcttccccactccttcttcccccctcctccggccacccctttctttttgctggcgtctcccaactttagggcccggggggcgctcgtggcgccgggctgcacctgccggggcacgccgggactgcgggccggcgcgctcgccctgggctggggtgcggaagcgcccgagtcctgggcaccgggcgagagtgtgagaggagcggacgcccaggagggagccgaggacgcgcggcgggtagggggtaggggcgcaggaaccgggtttcagccccagtcgggacatcggttccccctggcttggcggcctctggagggagacgagtcccggggagaaggagggcggcgactggggctagggattggcgatcggagtggggagggccggcggctgagcgagctcgctggctgacgcgaggagggggaggccaacttcccgggagaaggggctctttcggcgccagggctggctagggagctgccgccgccgccaccgagggctcggactccaggcagctgcaggctccgctcgcgacgctcggaaagtaccgtttatttatttatttgcttgcgttcagcgtctcgggttgaacccaacagacacccccttggactttaggaaccctcttcagacctctcca

SEQ ID NO: 4942 - DNA, 6000 bp, Homo sapiens
gtaaaaggcattttcagtaaagatggaagtgtgaaatactctcatctctgctcaaaaccctagtaattgctttgcgaagcactaataaaataagaattgagtcagctaaagaggctcatatagacgtacagggttggcagtcattctgaacatctcagcaagtggaaacaaaaaggattcaagcttaagcagtgaatttctggtagcccacaggcccaaatgtgatacactgctgtgtgataacagcttttcagccacctctctgtttcacagaaaatcagaaaccctttcccagtgaaagcgaagtcccattcttgcccacattctttggggttttatttttgtttctatgatacatagattgtggttcagatattatgaagcatcaagatgggtgagatctttttattgaaattcttccttggaaaggcattcccataagcactttaatgtaaaagccgtgtaatttaagtgacattcttgtgttctagaattaaacggcaagccattgttgtgtgtaagggaaatgctttcatttatgggagcccttttaggagcctggcttgatcctcattaaaattgacaccattacttttcagctatttactgcaagggaaaattagtgtgatgctccacgttttggtaattgtggcgataataaaatgggctcccctaaagtagctgtggctccgggaggtggcgagccttcaccatcgttcatcattgagtggtaccagagccctggattctgactgaggtcctgtcactgtgaagctacaatgctgggatgactcattgcactttccttgtgtccaaaaatgaaggaactggaactcatgaatgttagaacaaaaaaagcggcttatgccgtggaatgaacagcaggtttgtccgtggccatacctggggcccctagtgaattgggacaaattatttagcttttctgaggctctgttttatcatcagtaaaatcggaatgatgatacttacctcattcctatgatggttgtattaggtttcctagggtacccctaacaaattactataaactaattggcttaaaacaaaagaaatctattctcttacagttctggagcctaaaaattcaaaattaaggtgttggcaagttccacgcccctctcccagcttctggtagctgtccttggcttgtagaggcaccgctccaatctctgcctccatcttcatgtagtcatgttctcactgtgtgtctcaaaatctccttctgtcttcctcttgtgaggacacctgtcactggatttagggcccaccgtaaatccaggatgagctaaccttgatatttttaacttaagtacttttgcaaagacctttttcttcaaataaggtcacattcctagtttccaaggcttaggacgtggacgtaccttctcaaaggtcacccttcagctcactacattagttacgaggcatcagttgggttagcagatgaaaacatcaggctggcaggtaggtggccagcaacaaatgctggtttcctcccttccaaaccaggattcttttgagggttagaatggatctttaatagcttttattagtctcaatcagaagtcttattaaacaaacagaatgccattttggggctgggcatggtggctcacacctgtaacctagcacttggggaggccgaggcgggcagatcacctaaggtcagcagttagagaccagcctggtcaacatggtgaaacctcgtttctactaaaaatacaaaaattagccgggtgtggtggtgggcgcctgcaatcccagctactcgggaagctgaggtaggagaattgctttaacctgggaggtggaggtggtagtgagccaagatcatgccattgcactccagcctgggcagcaagagtgaaactccatctcaaaaaagaaaaaagaaagccgggcgcggtggctcacacctgtaatcccagcagtttgggaggccgaggcaggcagatcatgaggtcaggagttcaagaccagcctgaccaacatggtgaaaccccgtctctaccaaaaatacaaaaattacccaggggtggtggcaggtacctgtaatcccagctactcaggaggctgaggcaggagaatcgcttgaacgcaggaggcagaggttgcagtgagctgagattgtgccattgcactccagcctgggcgacaaagtgagactccgtctcaaaaaaaaaaaaaaaaaaaaaaaaagccattttgggacctacagacgtggccagaggctgacattgacatttcctgctgaggtttccacctttgattaatgctgtcatcaaggccatcctgagactgatttggctgttggacttgcaggagaggggtgtggagtttgaggacttgaagttcatggagttggcttctttacgcccacccctcccctcccccactttgcagtggaggaagttcaggttcagctggggtaagtgatttgctaagtaagggcttggagcaggcattctggagctggggcctccatctgggtgttctccacgcctatctgtatgaatgctccttgctctccaagcggacttcttcatttgatgttcactgtggtgtgtttcagtagtgactgccacagcccgactctaaggaggtgctgctgtcaccccaccctgctttcagttctttgctgcagaagacagaatgtgcgggagaaagatgggaccttaaaagactagttgctcttcctcactcatgtagacgatttggctttgaatcgtgaattattgcttcttttgggcattccagttctgcatttccagagaccctcaggtatgtcaagctttttgcctggcatttgatattttgggggcaaagtacagtggaagtggaaatggtgcctctggttttgtcaaggccagatatgtcttctctccactccttgtgttttttgagacagagtcttgctttgttgcccaggctggagtacagtggcatgatcttggctcattgaaacctctgcctcccaggttcaagtgattctcctgcctctgtctcctgaatagttgggattataggcatgtgccaccatgcccagctagtttttgtagtttttagtagagatggggtttcaccatgttggccaggctggtctcgaacacctggcctggagtgatccgcccgcctcggcctcccaaagtgccaagattacaggcatgagccaccgtgcccggtcttttatcagtttaactttccagaaatttgttccccctgcctgtccgcatcccttcaaatgaaagctgtaagcagcaggcagttgttgtttgggggcccatcagaggccgcatgtcacttctggatgggtcaggcatcactaccagccctgacttgatggcggcagatcagcatggcactgtcaactagcccttgacataaatctgttgtaactcagccccagacatgataggacacagcctgaaagcgcacaggaatccgtaccagagcgaagtcccccctcaggtgtgtgttcaagaatgaagcgtcttttattccaagcactgactgataagctcgaatgtggagttgacacctggaagggagttttgggagcttttggcagcccatccccagtggaagaaggaggaatggctgaaattgttgactgcttggggcagcctctgtcccaggaagacaaaggctccagtgtgatagctgagctggggccaggggacggaggcacggcggagtccctcaaaccacagctggagtgtgaagtttggactgtctcctgggttgggaacaaagtagtggttaagtaaatgaagaagcggtggcctagttaattaattaacctgttaattcattactgaagctgtcaagattcagtcattcctgctcacttgctcgtgatggaaggctgcatctcagtctcggcttccatcacactgtggcttctggatggaatttttgtttctgtgtgtgataaggagtggctgtggtggcatcatttaaatgacatgattctgcacgtccagagacgttaggatattgaaagcctgaccattaccttttaggttgtcatgcttgtacctgttcctggcacaaggtctcggctccgtagagccctgtggggttctgaacttgaagcctcttgacttagaggcttcctggccagggctcatttgattttccatactcctgactttgctgccagtgaattcttttccatttcttgctctgagtgtaagacttggtgtcctaccctgacacgggctctgcatgccagctctagagttgcgaaatctcaccggaggggggcagaaagcccctctgttgagaagggattggggtggcgtgccaggtaatgggtcacagcgacagcctttctaagtgggcttatttagttgacagatcacggaaccggagcggagttgaggaggaagcaccttccttttgccgctttcgtgtccccagcagccatctcatcctgttcttataaaccatcgctgtcacagacaacccctaagggtctctactctgtgccagatgccctctctggaggttcaggtggaaattacgtggagaggggtgtcaagttctgtttccacccttgctaactctatggccttagaaaaggcatggaacctctgagcctcagtttccttgcctgtaaaatggggtgatgactgtttccttgtagcactatggggaggaggaggtggtaggagaggcagcgcttttaaataatagtaccatgcaactgttagtcgttattgtgcgttggtcccatacttcctcttgcatctccagacagagccgtgcaccctgagcccatcctgatgaaaggaggggtcagtcctgtcctttcctccaggatagagatttcaaaacttcctttggtagctactgtttaatgagcttttgattgctacaaagcagcttttcattcctgtttcacaacagggatcccggggggcaaaggctggttagtggcagctagatcactccaaacgtactgactggcaaatacagactctcccgcagaactgaccccagcaagaagcctttgggagcaggtggtattctgcgggtgccagctccctggggtgggagcaggcacacgccagcctggatggggcatggtagaactctgcgatgtcagcttttttgtcacattctctgcaggctacccgttgtcctttgccccaccattgaggaaggaagccttattgattgctttcgattcttgcagggggcctgggtgaggtggctggagagagggctaatatttggtctggcatttaatcttggcatttcatttatggtgtgggcaaagaggatgtagaagtgttaaaatcaagttaatatcttacagttttatgtaagaagaggttacctggagattcaggtgaggatggggcagagagaaagctgcttctgtcagagcttgggcaaataaacttgccatgaaatgtcaatttagtgatggcagtaagagtgtgcagtaatgtgctggaacttagcgaggtttctatcagcgtgtgctgaattgaaataatcaaaaaacagtttaataagttgcttatatttggagttttgtggttcttaacattgcaaattctgaagcaagaaattagagtttctctctaaactcatttactcatgtggctttatcaacggctgcctttgtaaaccgaaagacctcagttgggaagttttatgagacggagtcttgttctgttgcacaggctggagggcagtggcatgatcttggcccactgcaacctccgtctcctgggttcaagtgattctcctgcctcagcctcctggtagctgggattataggcggacatcatcatgcctggctaatttttgtatttttagtagagatggagtttcactatgttgcccaggctagccttgaactcctgacctcagatgatctgcccgcgcaggcctcccgaagtgctgggattacaggcatgagccaccgcacctggcctgccaactcttgttaagatgtgagtgtgg

SEQ ID NO: 4943 - DNA, 6000 bp, Homo sapiens
tttccagccgcatatcacacctgtgaaagggaaagattcttcccactgtttgtccttctgatagccttctctctggactttgcatttccattccttttcattgacaaactgactttttttatttctttttttccatctctgggccagcttgggatcctaggccgccctgggaagacatttgtgttttacacacataaggatctgtgtttggggtttcttcttcctcccctgacattggcattgcttagtggttgtgtggggagggagaccacgtgggctcagtgcttgcttgcacttatctgcctaggtacatcgaagtcttttgacctccatacagtgattatgcctgtcatcgctggtggtatcctggcggccttgctcctgctgatagttgtcgtgctctgtctttacttcaaaatacacaacgcgctaaagtgagtcacaagttcaaaataaacaacgtactaaagtgagtcacatggggaaaaggggatagcacttcctcagtgggatacctgggcttcctgttggagcaaggtcattccttgctgctgtggccataccctgggtgaagtcaagaagaacaggcagctttgtaaaagcaaagacagctgagtgtagaatcttattttttttcttcctggctggggttggtagaatgttctcagctttggcctgtgagtgtcagcgctgcttggctgtcactggacctcactaagtttaccatcaggtgtttaattcagcaccttggccaagactccctctgtcctgggcactgtaggctgcagattctgtgggggaggctgcatgaacgagctctgccttgtgctcatgtggaggacgggctggattgatctcttcttgcctgaattgggagctctcaggatattcctccatttgtttctggaggccttggggaaaatgactggggctctagatctcagggacagctgaaccgtgtgaaaaacctggggaacagtggacaagggagggtaggtcagataagattgcattttggggagaagaccctttaagtaccagagagattggttgtcagatgcaattgtgtccccattctaaggagttcacaatggcacatcccggagcctgggacacagccaaatgcagcaccttcccatcattcctgcatctcgggggcctgcagtgaccagttgggtgaccttgcttgcaaaatcactcactcttgcttttgtaacctcagtttacatttatagcaatcatagaagaggaaaggattcgagaggaacttgggatgggggagagagctttaatgtagggctggtgttcatgtttgactggcttcagcactaaactccccagataccccccaacagttctaacaaaagggctgagaagaaaaattctaagcctgtgctttgtgtgtgtcttttctcaagagctgcaaaggaacctgaagctgtggctgtaaaaaatcacaacccagacaaggtgtggtgggccaagaacagccaggccaaaaccattgccacggagtcttgtcctgccctgcagtgctgtgaaggatatagaatgtgtgccagttttgattccctgccaccttgctgttgcgacataaatgagggcctctgagttaggaaaggtgggcacaaaaatcttcatgagcaatacttcttagtagattgttttgttattcaaatcaagttctagtgtttttatgtgagattatataatttacagtgttgttttatatacttttgaataaatgtacactattaaaaataatcctctttgctgccaatattttttgattgttgattataaacatcctttgtttaaatatatttattactcactttggaatgtggggggggattagcttgtagcattgcaatagaagaaagagaattggaataaaagtgtccagcacatctcccacccgagaaggaaaatgcacactgttcttaggacacttccaatttcagcccagctgatcttgtccagctggagtcgctcgtttagctctcgtgagggcttggatggttgacatccaccgcagaaaatggtgtcatgtcctgatacctgtcctgttgtcctgtccatttatccaagacagtgagaggagccaggcaggacctccctgtgttaaagttgtctgacctgtgtaagataggcctgagctcagtgacctcaaaaggaccttttgaaaaccagtttcttcctactgcaatccccaaatctccagagcatgtggctcctgcgtggattacggtaacagtgatgtgtgttgatccagccatcaacatcttcaactgtaacacgaaccaccagccaaaggccaaagcccagactccctgaccacaacagcaggtggcaggaagcactcctccccactttactcccagctgccttctgttccagctcctgcccctgagcctcctggaacccctttctaagcatgattccctatctgtaaccgccatgtccactcctctcatgaactaaacccttgcttgtgaccatcacatgtatactgaatgtaaagaattattagctagtaacaggtggtaatctactaaaagggggtaaaaaggaaaacagaagtcgcaaatgaaggaaacagctgtgacagctaggcacagaaacaggccagatgtgggtggaggagctgcctgtagacgccgagcacctcctggaggctgagcctccagccccagcatgcttgggaagaggccaagtcagggcagcctccagctggaggtcacctgtcccccttaagtttccgggcactgtctctgtcccctgcctttgattttctcttgtcaccagccagctctgacagatggagcacatacaaatcccctcttaccccacccagtgggtggcccagtgcctggatccaggacgcctgtgccagggcctccccatgtgggtgactatacctggtgcaggtattgcgggggccgtgagggaggtgggacaaaggtcttcaggacacccccattagcaggaggacagagcaccgcacatgggctttagagccctatggagccggttcccatcccaattcggccttcaccaggggaagtcccttgactcatctgagcctctgtgtccttgatgtgaagtgcggacttgcacaggtgacagagaagaagcaatgagatgatgcagggtgaccccacagcaccccgtggtccccaggaagttgccagaggcctgaagggggcttctctcctgactggatctggaagcctgggtcctttgccagggccacctaacagagtgtggccatgaaactctcgcactcagtggagatggattagggatgttggagatcccagccatgggtgacaaagaggggttcagagggaaagcccagggtgggagtgggtatccatggacacagctgcaagcgcttagtaaccagaagggtcccccatctcaaacacctgtggcctgctaactcaccccaggacacccagtcctgcctcatccacagccagcccgggcagataggaatggagcagagcaaggcaggggccttggggtatgtccaagctcctcctgagcatcccaggtgctgcctttcccctgcaagggtccaacgaggaatggatcccctgggtcacaacgtaggactgtgctctccctagggaggcctcctgggctgcagcacagtcagaacaacacagaggggctgacggtagccagagggtttcaccctaggagacttagcctacacgagcgtcagacctccccagagctgcacaaaggttcttcagaaagtagccagtcctggcattgtccactcaatatgttccacctgaacttagagtgaaaaccagactcatttgccctatgggtccttccccatctgaccttcacctgctcctctccatcctcccctcccagctcactcctcccactcatgaccagccaggctgttctttattccctactattgtaggtgtgcccacctggtctctgcctcggggcctgtgcacttgccctctcttttgcctaagatgcagcccccaagctcagatcacccatgaatgcctccctcttgtctttctgcctttgttcagatttcatctctcaagatgccctccttctcactgtcatatttcctccccaccccaaggcaaccaccatctatgcagtcatcctgtttattgtatccttagctcctctcaccagttgaattcttcatttatttttgttgtttaactctccacttagaatacaagtttcatgagggcaggactgtgtctctcacattcaattctatattgcttaggccctagatcaataagtaatgtttactgactgaatgaatgaaaagagggcagcccccacccaccaccacttgctcctcccaatctcaatgtggacactaggatttctttctctcaactgcaaaacaccgtgcccgagagactaattcacctgcttcagtctctccagacataactggttagaaatcgctgtgggggaatctggatctgcactctttttctcttcatcctctaccctcttcccctcccccacagggtcagccacctggcagggcatctgaatgtcccagctggacccagattttgcccaggtgctgcaccccctgccttgccccacaggcctttgttctcccacaggctcccttctcaaagcagagccctgaagacttcaatgatgtcaatgaggccacctgtttgtgatgtgcaggcacagaagaaaggcacagctccccatcagtttcatggaaaataactcagtgcctgctgggaaccagctgctggagatccctacagagagcttccactgggggcaacccttccaggaaggagttggggagagagaaccctcactgtggggaatgctgataaaccagtcacacagctgctctattctcacacaaatctaccccttgcgtggctggaactgacgtttccctggaggtgtccagaaagctgatgtaacacagagcctataaaagctgtcggtccttaaggctgcccagcgccttgccaaaatggagcttgtaagaaggctcatgccattgaccctcttaattctctcctgtttggcggagctgacaatggcggaggctgaaggtaagaaaattgaaccagatttattcaccaaaacagagaagttcttctcttaagaggcctctttcaaaatttttcaaagtgtttatatctgttggccccagttcagagaaaaatgtactctaatgctcttggaggggattttaaattagttctaattttatttggctcatctgacaatgtccataaaaatatcaaaagtgtatagaattttactgagtaatttactgctaagagtttatgttttggaaataagcataaaagtgtccaaagatatatgtataaatatgtgcacttacataattgtaaactacaacatgaattttcattatttcttacggtaaatccataaaatggaacactcttttttgcaacttaaaaaaaaatgatggctgggggcggtggctcacgcctgtaatcccagcactttgggaggccaaggtgggtggatcacgaggtcaggagttcgagaccagcctggccaacatggtgaaaccccatctctactaaaaatacaaaaattagccaggtgtggtgatgcgtgcctgtagtcccagctactcgggaggctgaggcaggagaatcgcttgaacccgagaggtggaggttgcagttagctgcgatcatgccactgcactccagcctgggtgacagagcaagactccgtctcataaaaaaaaaaaaaaaagactctgatctataatgtgtccatagaccacattaagagaaaaaagagatctgaagtttgtgtacaatatgatggttcttatgtttgaaatatatacattcaagcattttaaatgtctagaaatagaagaggaaaggaaaaggagtggaagaatttacaccaaggttttagtgatgattgtttctggatggatggggttatgggagtatatgggagaat

SEQ ID NO: 4944 - DNA, 6000 bp, Homo sapiens
cactatgaatttgaattcatgggcactggtgcacactcatggaataggcatggccttttgtctttgagtgtttggtttgtaagcctcagtctcccggcctgaaaaatagggataagtaatactggcctcataggcatgggaaagtgcttagcacagtgcttgtcacaaggtgggactttgaaggtccctttcttcaggagggggctgagtcttagtgaccttagtggttcccacattcagccctgtgagtggcacacagcaggtgttcagagagtgtctgctgaatgaatgaatgaatgagtgagtgagtgaatgtgattttaaggattgtggcaagtccctgacattccaggttgctggtgtccttgtagcatctcttacagaatctttattcaagttatacttattcatggattcaacctcattacgtaattgcatgttaacaaacattcaattatgtgactatcatgggtaaaactacttgcaataataatgattactaataagaactactattttcaactcttactgtgtcctaggaattgtgctgagtatttttaaaatactttgtcttcagtcttgacactagcccactgaggccatgtatcagccagctacagccacaacaatgctgtgtaacaaaacactttgcaacattcagtggcttgcaacaataagcattttccctgccttgctcatgttctgtaggttgcctaaagcagctctgagtcctgctgtatgtggagtgacatggctccagacagcgaatcaagttcaggtttcttccttgtgtgttcattctgaagcctctctggaagaggcagcaacatgttcgtctcatggtggaccaccagagcagaggaaagcaggtctggccctgcaagcacattccaagcctctgatccagttatattccccattatctcattgtctaaagcaagtccaaagtcaaggaatggggaagtacagtccctgcactggaaggctgtgacaaggatgcagacgtgtgataaccaccacgggagagtgaggagttgggatcaacagctcaattgactgctcgtaggtgctaccagaagcctcaaactgaggcatggaaagaagtgacttgcccagggttgctcagctagtgggtggcagaagtagaatttgaacccaggcaatttaaatccacagttgtgggggcctagagtgcacacacgggaagcggggatttattttctgaaagtatctgcatttttttttcttttttctttttttgagagggtgtctcactctgtcacccaggctggggtgcagtggtgtgatctcggctcacggcaacctctgcctcccgggaatctacgggcttgcgccaccacgcctagctaatttttgtatttttagtggagacggggtttcaccatgttggccaggcttgtctcgaactcctgaccttaagtgatccacccgcctcggcctcccaaagtgttgtgattacaggcgtgagctaccgtgcttggccggtatctgcatttttttcagccgtgacttgctaataccatgttggtatcaacctctcttgcagttacacatttatttgtctatccttccacccatccacagggacctggcatttgggtgttctttcaattctctgcagtaacaggctcaagtgcaattcttgggtaattttttgaaattaaggttgaaaggaaaaaaatcaccttctagttaatctcaggcacgtgtataaatacctttggaaagtccctggtggaattcatatcaaagcggcaccgtgatttttacttaaaaacaattttgctccatgtcaaccgtggtttctgacacctgaatttgaaagtgatctgggtgggcccagcgccatctccataacggagttatgtgtttacttggagggaggagaggaaaggcattattccctggcagtatgtgtggccctggaataatgttccacacacccttacagaaggggatttcctccttgctgtttccacagacccttccctgtgtttgtttaaacccgttgcacactggtctgacagctgcctggcccagggccttccttgcagacgcatgtacaaccaaccctctttaacagcaacctgctctgtgtcccctgatgcaattactcgagtatataaacctcactgaaaggcaggcttttcttgggagctaataaataagccccaaagccacaacgtgtgtgagaccttgaaaaatggcatcatcatctattgggaattgtgaaccctgcaaaaagcagctcgttgtattttcagaaataggtttttgtttaaaaaaaaaataaagaacaaaaatcactaagtggagtctatatggaaaaagcaatctagtctgagattctaaggcaagtctctttgctgcattcatctttcttcgcagattttatgtaagaggcattatttgcaggaaaacaagacaggattttaaagaactcccctctcatcccggtttcccatctgcagttataatcctctgatggtgacctctgcattagttgccatgggtgctgagcagaagtttatgacctcagggtggactgtagcttcaggggggcgagatgaagcctccggcaataaagagataatggggagaagccactgtcaggaatgacccttcggtggcatgtagtctacagttaacggagcactttcatttccacttctggttgcttcgaggaagagggtgctggactctggccacggggacacaggccggcaagagactgcagattctttttgtcccttggacctcagtttcctgagaggctgggcttggtgctccaagcgccctctgagcgaatctgccagaatttcatgtgtcttttctttaactgatggcatcttcagcccagagtcagtggagtcggccactggtgccgctttcttgccctcgggctgtccaggtggttccctggggcagccgactccaggccactgcggcaggccgtggcgatcggggtcctgcagagctttacctcccccgcggaagcaaaacacgccgggccaaagagccgggccagccttcccgggatgcaaaaatacaacagagggcgccgaactcaccagcgctgtggccttgaatattaatgtacgggctggctccagaccgccaagttccttaaagatgtctctggcggccgggcgcggtggcttacgcctgtaatcccagcactttgggttgggggggcggacggatcatctgaggtcgggagttcgagaccagcctgaccaacatggagaaaccccgtctgtactaaaaatataaaattagcctattttgcgtggtggcgcatgcctgtaatcccggctactcgggaggctgaggcaggagactctcttgaacccgggaggctgaggcaggagactctcttgaacccgggaggcggaagttgcagtgagccgagatcgcgccattgcattccagcctgggcaacaagagcgaaactctgtctttaaaaaaaagaagtatctggcaaggtgtcactgccagatttcaggggtttcgatgtgcttttatttggaatcaccgcaacacacaagcagtgttgactcggagggggagggggcaggggccaaacccaccgctcggcgcacacgccttgatctcacattccagactggagctgatgtgtgtcagcgcgacatggggcggggggagggttctcctcggatgtttcattcgccgtctgcacgtcactcccaaacttttcctcccagcgctcggggagtcaggttgacgcgccctggatgcggggctagaggctcggggctgggcgcgctcccgcggagccggagccgcagaggctcccgggctggactcaggcttctcaggtacaagttaggtgccagacgccgaggtggggtcggcgaggagcggcggtaggaggtctggccctgggctcggggctccggcgcccctccgcgggttcgggccaggcagcgccggcggcggccggggctgggcgtagggagtccgggccggcggaggcggcgcgcagcctcactccccgcggcgctcccggcgcggtggtggcggtggcggtggcggcggcggcccaggcagacaatgaacttgcgagctcgacgagccgaggcaggtttgggccccgggctccttggcccggcctccccgaggcttcagcgatccccagcgggaggagtcccttcgccattggtcctggccgcgctccgggcgccctgcgcgcttgaggaccccgcgggaagggttacccagcggcgacacacgccccctccctcgcagagaggacgcggccggagcgaggggacaggggaccgagcagtggcgtggtggcgccgtggatagccggaggccggcggggggcgcaagccgcgtggaacgcaccggcgggctgtccgggagaaggagcccagtagtcggaatcggggcgcccctgcaccgcccagctctgggagccgcaggcgggggaccgaccgacggacagaccagtgctttcacggtgtgagcgcgcgtcgtttggcggtaggggacggggattccccccagccttgcgctccgcccccacacccctatcgcactttggggaagtttccaggcgcggcccggggcaggtaagtgggcatccgccactctctccccggttgcgagctcggatgcgcttccagaaccctggctctagccttgcggcggttccgggcggggaggccagagctctcccgcgcctaagcccgtgggacccggttcagggaagggggatggcgggggcgggcctgggaagagataggggagcggctgagccccgagcggtgtgaacttttgctccccgccccctcctccttcctcctccccgccccgcccccactgctgtcccctccctgcgccccgccgcgtctcgggaggcggcgtgactcgggagttgccggcgcttcccggcggtggcggcgtctctggccggccttggtgcggcgagccgagcgaggcagctctgagccgcgcggtgaggccagaggcggggagccggggctgcggggcggcgaagctggggagccggatggcagcggccggggcgcggaggcgacgctggcggtggagatgtaatgcgagtctgttgggttgtgtgtgccgggagataggacgcggtggctgtgggtggctgggtggcgggctgtggcgcaattggccccctgggatggcaggatagaggcgccggggcgaagggaaccttgcctttgggaaaatgaatgaagagccgtggaagcaccttcccgactcctccaggcaaccgatgggccggcgtgcgcgcgagtgtgtgcgtgttgaggcttcggagccgcccgggtcctgggcacagctgcttgacctccccgtcgctgtccgggtgcccacgttcccgcccgccctgcgcccggggccggccggcgcggctgggacggcgggtatagaggaggaaggctggggctgggttgccggctgctggcggctggaggtccgcgcccagtgtagggaagtcttcgaaggaggctgccaggctggaggctgggaccagctcctgggggcgggggcccttcttcgtctgcctgcgtgcgcggagccgctgtgacagctgggcgccttcgccttgttcacgttggttaagttaattgtaccgagttctcgggaatgaagtgtggctccgggatgccccgcagagggatgtgacaagccggtcagtgaggctgagcaaaggggctaaccttgcctctgggcgccctagcagtgcccccagcccctctttatcagctgcaattcctgagtgttgtgggatgcctcggtgggttagggtagccacccagcgttggggcagaaaggcctcggagggcatctgcacccccgaggggccctgaagtaaactgaggcctagagatttgcccagcgtttctcctggaccctccttggaccttcctggaccattatccatcccccgctttcctgcttctcctcccaggaccggca

SEQ ID NO: 4945 - DNA, 6000 bp, Homo sapiens
caatgaacccctctctcatgggtatccacaggaggggccccacgaaaaaaaggggcatgtgttcttacatttttttttttttttttttttgagacagagtctcactctgtcacctaggctggagtgcagtggcacgatctcagctcactgcaacctctgcctcccgggttcaagcgattctcctgcctcagcctcctgcgtagcctgggattacaggcatgtgccaccatgctaggctaatttttggtatttttagtagagacggagtttcaccatgttggccaggctggtctcaaactcctgacctcaggtgatccgcccgcctcggcctcccaaagtgctggagttacaggcatgagctaccacgccccgccgtttttcttctatttctactaaacatttttaaattgcggcatgaaggaatgctgatattaataactattatctgtgtgctgggaacttcctatgcattattttctttaatcctcataacaatgctgagataggtctttttccccacattttccagagaaagaggtcaagtgacttgcacaagtcccaaagcatcatttttggctaaaacctagcgtggaataaccccaccttccctggccagctccctcacactggcttctggtcaacacagccctgccccttagtgtgtttacaaagcttgacttgcccctcagaccactgcatcaattctctgagcttatgagaaagtatctagtggaagaacttcagtgtatttcgcggagccttcagagcaacatgtggaacagcgcctgcacgtggcagactgagcacaaccatcctcaccgtctcatccacccacagatgaacgagtcctgctatgtgatgttggcaaaactgaagaaacgaatgtgatgtttgaaaagattttcaccaacttcttattttagggtgaacagagaagccgcctaactaaaagcacaggaaagtgtgtatcctcagggtgacactgacagagaaaccccaacatcaacgctaccccagggcccaggggcagtccagaagccccatagttgagtgtttataactacgatccatggataagtcttaaatgttacagaaaattttggcaagaagattaacagaggtcagcctccacccaccttgtatggtgacaggatgatattcaggaagcagggcctgtgccaagcggcaggccctgcttctcaggggcctctgctggctcctggtaagtgaccctgcctaaccctatgtttattgcaggggacctgtaagccaaacccccctcagaagcctctgcctgcagatcctctggccagaacaactcggctcactcatgccttggccaggaccccaggacaatgggagactgggctccgcctggcacccctcaggtttgtgtgacatgccatgcccatctctttctctctcaaactcttgtgggaccaaccacgactaatccaagccaggacaggggtgcagtggtctaggccgtgcttcctgctccccctacaactgggaataccgtaaaatagacatgacaattaccaggaaggaagcagtccctgtgagcttataatcacaggcattggcacacagtgcctatcaacagccacagtggacctaagagagcaaatcaagatgtcataaaactacagtacctcagaaagccaggcctgtaagacacaaagaaaaagaggagctaccaagtagcatgacagtatgaagactggacacctgtgttagtctgttctcacattgctataaagaaatatcgaagactgggtaattcctaaagaaaagaggttcaattggctcacagttctgtaggttgtacaggaagtatggcagcatatgcttccggggaggcctcaggaaacttacaatcatggcggaagggggagccagcacttcacatggctggagcaggagaaagagaaaaaggggaggtgccacacacttttaaacaaccagatttaatgagaactcctatcacttagaaccaaggagatggtgctaaaccattcatgaaggatctagtcacctcccacaaggctccaccttcaactttggggattacaatttgatatgagactggggcaggaacacagattcagaccatctcaatgcccacctccacaactctcagcagaatctgcccagttcctgaggtcctgagacattagtcgggttggaggcatacggctggagcaagggacatatggggagtaagggaaagcagctgcctggcagcaggacactgggaaaacagggacaatgggcaaaaggaatcacctttcacagcttatcctgcttggtccactaggaaggcagagacctcaatcccaacttatgctgggaggctaaccccatggtgtaggggagccagcttaccctggttggtgagagataaccaatttccaggaattttgcaagctaggtgttaaacctagccaatattaaggattaaattatacaaatttatgatattttatattagaaacaaaggtaataagtgctcaaaactcacttcacatttttctccattttgctataattgtctgtgctcttgagattgcactcatccattatttctgtatggcagaaaacctaggtcatggtagctgcctgcatctcttccatgtttagtgatgtcaggtggtagcttgaaaccagccacaggaggagtatttacaccatggacattggcaaatactgcaaatcaggctttcctgcccccaaccccatgggctgttcaacatttaccagcacacagatgagttaaacccacagccaaagtactcttctgacacacatgccctcttggcaggaagcctgctttgtgagctcaaaagaaccaaaggtactgtgttggccaggccctgggttcagtaatcctgtatctctgaaggagaagacacactggagtgattttattacagctcttgggaagaatgtttggcccgtgaaagaaagagctgcttaataaatgtcagagataaaggcggtcaaagggtcaggacaattgtttaattcccaacttcataaatagagaaaaattgcatagcatcctaattatttcattgtggtttgcatgttgatcttgaagttatttttcttgttctatttgaggaagaaacactactttacatgaaaacaatgaggggaagccctttttcttaaatgccctcaagctgtggccaatcttacctctggtcagttgctgattttggtcctgtcctgcacatttcattttttagggatactgggtgcccacctttgctccctgttctctggagctgtgctgtgggatgcagggactgctaggcatgttgcgcctggtaaaagtcttactgtattttgaagacttagtaccctaaaatgtcaactatccatttttttctattgatgatgacctgttgaaataatcctctaggtatactgagttaaatgtattactaaaattaattgcacctttctctttacttttttcatgtggctactagaaaatttaaaatttcttgtgtagctcacattttttctgtgggacagtgctggtctagagttgacttgtgggtgggaagtgcggctttggagacaggtttcccacccccgttatgaggggcagtggtatctgacacagaaaacccttcagactatcagaatacatctccaaccccagacctctctatcctcagaatcacttctcaaggtctctgatcatttttttttctcctctcttcattcagacctgctccacaatatccacaccaagtgcccagatccacccacaccgcctatattaagtgagaagccgacaccttttttcaacagtgaagacagaagtttgcactatctttcagctccagttggagttttttgtaccaacttttaggattttttttaatgtttaaaacatcattactataagaactttgagctactgccgtcagtgctgtgctgtgctatggtgctctgtctacttgctcaggtacttgtaaattattaatttatgcagaatgttgattacagtgcagtgcgctgtagtaggcatttttaccatcactgagttttccatggcaggaaggcttgttgtgcttttagtattttagtgaacttgaaatatcctgcttgatgggattctggacaggatgtgtttgctttctgatcaaggccttattggaaagcagtcccccaactacccccagctgtgcttatggtaccagatgcagctcaagagatcccaagtagaatctcagttgattttctggattccccatctcaggccagagccaaggggcttcaggtccaggctgtgtttggctttcagggaggccctgtgccccttgacaactggcaggcaggctcccagggacacctgggagaaatctggcttctggccaggaagctttggtgagaacctgggttgcagacaggaatcttaaggtgtagccacaccaggatagagactggaacactagacaagccagaacttgaccctgagctgaccagccgtgagcatgtttggaaggggtctgtagtgtcactcaaggcggtgcttgatagaaatgccaagcacttctttttctcgctgtcctttctagagcactgccaccagtaggttatttagcttgggaaaggtggtgtttctgtaagaaacctactgcccaggcactgcaaaccgccacctccctatactgcttggagctgagcaaatcaccacaaactgtaatacaatgatcctgtattcagacagatgaggctttccatgggaccacaactattttcagatgtgaaccattaaccagatctagtcaatcaagtctgtttactgcaaggttcaacttattaacaattaggcagactctttatgcttgcaaaaactacaaccaatggaatgtgatgttcatgggtatagttcatgtctgctatcattattcgtagatattggacaaagaaccttctctatggggcatcctctttttccaacttggctgcaggaatctttaaaagatgcttttaacagagtctgaacctatttcttaaacacttgcaacctacctgttgagcatcacagaatgtgataaggaaatcaacttgcttatcaacttcctaaatattatgagatgctggcttgggcagcatccccttgaactcttcactcttcaaatgcctgactagggagccatgtttcacaaggtctttaaagtgactaatggcatgagaaatacaaaaatactcagataaggtaaaatgccatgatgcctctgtcttctggactggttttcacattagaagacaattgacaacagttacataattcactctgagtgttttatgagaaagccttcttttgggggtcaacagttttcctatgctttgaaacagaaaaatatgtaccaagaatcttggtttgccttccagaaaacaaaactgcatttcactttcccggtgttccccactgtatctaggcaacatagtattcatgactatggataaactaaacacgtgacacaaacacacacaaaagggaacccagctctaatacattccaactcgtatagcatgcatctgtttattctatagttattaagttctttaaaatgtaaagccatgctggaaaataatactgctgagatacatacagaattactgtaactgattacacttggtaattgtactaaagccaaacatatatatactattaaaaaggtttacagaattttatggtgcattacgtgggcattgtctttttagatgcccaaatccttagatctggcatgttagcccttcctccaattataagaggatatgaactgagtttttcttttgttgtttgttcttagctgtaattcctatgcttctatttcagagagccaggagagtttgatattaaaggaggttaaaactgtgatcttatgccatgtcatcaatggccacttaggggccatggctgatgacacattcttatctctacagtactaatgtgttattatagagccatgc

SEQ ID NO: 4946 - DNA, 6000 bp, Homo sapiens
ataccctgctggctactactgaagatatagtcttactgtcaaagagcagagaaatgagaaaaagggaagaaagtgcagagaatcagaaaaagttaaatagaaggaaagttggcctccaattgaagggggccagagtgtgggagctggcacgatttgtgggaaagtgcgagaggtggtgtgaaaaggcttgaatttgagcccctgctctctaacgagagggcacagctctagcaggctgagccacagcctcctcttctgaaaaatgggtacctggtgtgttggttgctgcagctcatatggcttctagtgagatcacagatatgaacatgctgaacaccagaggcattcacactttattttttaaagttgatggaacttccaggggtggtggaccttcttgagtctcggcttctaaggcattctgctccagcctagccattgcctgggtcaatttctcctccctcctgtaagggcatctaagaatggggaggctgtgggtcacactgggcacatcccggggtcctgggaagcaggtcctgactccctgctctattgcctgcagcgatcggctggcccttctccaggtcaggaggattctgcagcagctgggcctggacagcacgtgtgaggacagcatcgtggtgaaggaggtgtgcggagccgtgtcccggcgggcggcccagctctgcggtgctggcctggccgctatagtggaaaaaaggagagaagaccaggggctagagcacctgaggatcactgtgggtgtggacggcaccctgtacaagctgcaccctcagtgagtgcccacaagaggcgtggcgggtggggctggggagggctggcggccaagtgtggacttggcatagcctcctgaactgcggcatgggaagatgcatccccgtccttttatgggaaaggagtgctgtgtggtcaagtcacctattcaatctgacagacaaggtgtgagccctggtgcctctgctacctggtaatacgatgtgggaatgttagccggcctctctaaaccccaggttcctcatccacaaaaggccagcactaataatccctaccacatagggctaaatgtgtgaggttgaaatgagttagcacatgtaaagtgcttcacacggggctcaagaaatgtaagttggctgagtgcagtggctcatgcctgtaatggcagacgggaggatcacttgagcccaggagtttgagaccagcctgggcaacacagggagactccatttccacaaacataaataaataaaatacaaaatgaacaaaaattacaaatattagctgggcgtgatagtgcatacctgtggtcccagctacatgggaggctgagctggggggcttgagcctgggaactcgaggctgcagtgggctgtgattgcacaactgcagtctacaccctgggcaacagagtgagaccatgtctaaaaaaaaaaaaaaattagaagaagctgtttagagccttgaaaagcaaaccaaagggaagaagctaaagaaattagattatgatcatttataaatgttctgattctacatggaagggctgatgatgtttctttctctttttcatagcttttctagaatattgcaggaaactgtgaaggaactagcccctcgatgtgatgtgacattcatgctgtcagaagatggcagtggaaaaggggcagcactgatcactgctgtggccaagaggttacagcaggcacagaaggagaactaggaacccctgggattggacctgatgcatcttggatactgaacagcttttcctctggcagatcagttggtcagagaccaatgggcaccctcctggctgacctcaccttctggatggccgaaagagaaccccaggttctcgggtactcttagtatcttgtactggatttgcagtgacattacatgacatctctatttggtatatttgggccaaaatgggccaacttatgaaatcaaagtgtctgtcctgagagatcccctttcaacacattgttcaggtgaggcttgagctgtcaattctctatggctttcagtcttgtggctgcgggacttggaaatatatagaatctgcccatgtggctggcaggctgtttccccattgggatgcttaagccatctcttataggggattggaccctgtacttgtggatgaacattggagagcaagaggaactcacgttatgaactagggggatctcatctaacttgtccttaacttgccatgttgacttcaaacctattaagagaacaaagactttgaagtatccagccccagggtgcagagaggttgattgccagggagcactgcaggaatcattgcatgcttaaagcgagttatgtcagcaccctgtaggattttgttccttattaagtgtgtgccatgtggtggggtgctgtctggggcatctgtttttcattttgcctgtggtttgtgttgcaggtgttgatagttgttttaaggattgttaggtataggaaatccagtaaattaataaaaaaattttgattttccaataaactttgcatgaagtggtgatatttcttctgggaggctcacttggtaataccatgctttgttgatggaataagggatgcagagtcagaaggagcttgagcatttttctcgagtccaaacttcctaccaacaggggtaatatatggaatatcttctacaatatccttaacagattatccagatgtctttagaatacttccagtaactgagcatttcccacatgatcctacagctcttgcttttgaacggctggagtggactggaagtccttctgacttctgagctcggttcctcccatacaccccactgatctccattctaccctgcagaactatgtgtaataggcctgtccctgaccatttctccagtggacttcctctctctctcctctcttccccactttacctgaactgcctgtgcctttctgttctgccacatagttatctgtatgagtttcacatctggccagatagattgtaaactctttgtcaaacacattcttgtattgctctagtgaacctagcactgtgccattcctatcaaatacttacttgtgggaggcatgattgaagaaatagaacttttcaagaaattttcttcagataaagtatagactgggtatggtggctcacacctgtaatctcagcactttgggaggccaagtctggaagattgcttgaggccaggagttcaagatcagcttgggcaacatatcaagacccccatctgtacagaaaaatttttaaaattagttgaatgtggtggtgcacacctgcagtcccagccactcaggaggctgaggtgcggggtatctctcgagtctaggtttgaggttacaatgagctatgactgcaccactgcactgcagcctgggcaacggaaagagaccctgcttcttaaaaaaaaaaagagagagagaaagagaaagaaatgaaagaaagaaagaaagaaaaagaaagaaagagaaagaaagaaaaggaaggaaggaaggaaagagacaactattgtcatgggaaacaaactgaaaagaataatccacagtgattttatttgtatttatgtgcttaattacatacttaagtatgacaactccacagagtgctcttgctgtctcttcaaaagattatggctttggtcaggcgtggtggctcatgcctgtaatcctagcactttgggtggctgaagcaggcagatcacttgagttcaggagtttgagaccagcctggccagcatggtgaaaccccgtctctactaaacatacaaaaaaaaaaaaaaatagccgggcgtggtggtgtatccttgtgatcccagctacttgggaggctgagtcaggagaatcacttgaacctggggggtggaggttgcagtgagccgagattgagcaactgcactccagtctgggtgacagagcgagactctgtctcaaaaaaaaaaaaagtttttggattccagctctaagcgtcaccatttgctgaagcgggatgtccagatggagtgaagggggctgagtctaaagacggagagagagagaggccagctagggctggggataatgagggagctgagggttccccaggacatattttttacactttcttttttgttgttttttgagacaaggtctcattctgtcactcaggttggagcatggtggcgcaatcacgaatcactgcaaccttgacctcccgggctcaaggcattctcccatctcagcctcccgagcagctgggactgcaggcgcatgccaccatgccagctgatttttaaattttttgtagagacaggggtctcactatgttgccctgacttgtctcaaactcctggcctcaagtgatcctcccgccttggccttccaaagtgctgagatttatagtcgtgagccactgtgcctggtccatactttcaatacaaatgtatggtgatactactgtgaacaggtcctagatttaccaaaattatctttttgtgtgtttgtgtattttaaggttatatctctttagagaaatgtcgtatgaatttattaaatgtatctttttatattttgaagttatgcctctttggagaaaggtttcaccttatcaggtttcatcttaatcagttgaaaaccttgctgtccttattctctttccccaggtctcccatttcatggtaagtcatcctcagctcccagtccctctttcccctggttctgctaggggtctttctctttgctgtctttcctggacaaatgatctgacccatagattcaggttgttgtgccactaagttctcccatgacctggtctctcagcacatgtttggcaggttagggaggtcacccagtcccttctcacccagccgtggtctcttacaagaaaaaggagacacaaggtatctaggcaagcttgcacattctgactaattgattgcatcatagaatccttgaacaagaaccagaactccagagagggaaaacatctatcttgctgtgtttggacaggccagcccctgaaacatcttgggcaatggagggttaacttctcaaagtttaataggcaagaccagcaaccatgcaacaaggtaaattgtcctcacgagaactccaaagactatttttctctctctttttttgaggcagggtctcgctatgttacccaggctgctctcgaactcttgggctcaagcaatccccccatcttaacctccccagcagctgggactacagccacgcgccactgcacccagctgacttttccttctaagcatctttggctgggcgtggtggctcatgcctgtaatccctgcactttgggaggccaaggtgggtagatcactggaggtcaggagttctagaccagcctggccaacatggtgaaacctcatctctactaaaaatacaaaaaaattagctgggcatggtggcaggtgcctgtaatcctagctactcgggaggctgaagcaggagaattgcttgaacccaggaggtagaggttgcagtgacccaagattgtgccactgcactccagcctgggtacacagcgagtctgtctaaaaaagaaaaaaaaaaaaggaagagagagcatctttatcttcattttctaacctttaagtgttactttctcccagtaacattttgcccagaaagaggtgatgaatatagatttaagaataagattttccccatgttgctgcctttccagaacaagtgagttcattctcatttgtctttcttcagaaatcttttatctgtctttctcccattagctggaatgggtgctccatgagaataaagacttgggttccattcttcctattgtccccagagcctacatactggctggcattgagtagcaattgaacagttttctgaatgaatgaatgaatgaatgctcaaataagcacatgaattaattatcactttcctttgaatctctccattcttcttcctcacccaatggggctcgatccttatacacagaagatactctataaat

SEQ ID NO: 4947 - DNA, 6000 bp, Homo sapiens; identical to SEQ ID NO: 530

SEQ ID NO: 4948 - DNA, 6000 bp, Homo sapiens
tgggttgtattaatccaggtatttattgaacacaaattatgtgcccacgatgagggaagagcaaacaaagcagatacagcaccaccctcagggattggggagtggcagcaaccctcctggggagaggtccccagaatctggatgtgtactcgagacttttatgatcaggccagtgtttggggaatggtggttataaaatgagaggctggggcagggagtggggatgttctgagaacctgtccacacactgacagcctcaatgggttctgtggcacccctgagccctgggatggcaactgcaagaatttactatccatggtcacagatcttcaggccctgtgaagcatccagatccccgctctgaataggccaactgggccaggaccgggagtcaggaaggtttccgcctttttttttttttttttttttttgagatggagtcttgctctgtcgcccaggctccaggctggagtgcagtggcaccatctcggttcactgaaatctccgcctcccgggttcaagcgattctcctgcctcagcctcccacatagctgggatcactggcacgcaccaccatgcccggctacttttgtattttcagtagagacgaggtttcgccatgttggccaggctggtctcaaactcccgacctcaggtgatccgcctgcttcggcctcccaaagtgctgggattacaggcgtgagccaccgcgcccggcccctgctttcttaaagaacacgcggcagctgtgtgttacacgctatggctgaggtcaagtgtgagggctggaattgctgactgccatgttctgggtctactgaaaatagctgcctggcctgggaggcccagttcagtccgggtgtgggtcccgcttcacctccagagcagcggcagccggtaagggtagaagcggcctttggagaggggtctctgcagcggcctggggacaagatgagggctcctttgagtcctggggtgcaggttatagtagctaaaggggaggtctgagacagtggggtctggctccaaggtaaagaaggagcagcaaccaaaaggcctgatgcgcagcgcacccatcgcaagcatgggcagtgcgtttaagactgggtgactcactttttctcctataaaatgggcgcacgcaggccccagctcagcgccagaagggggagccccggcgcgccggcagaagacaaaggaaaaaagcgtgtttgcaaacggggaagcggcggcgtgctgccgcgaggggcggggcggggccgggggaggagcccgcctgccgcctgccaagcccagtggtcctggccgtgcgccggaggcagcggcggcgtggcgcagcggcgacagtaagtgcgggccggctcgggctcttccggctacggtcccggccgcccccagactcgcgctcagcgacctccctcccgggccctgggggcggctgcgggctgccaggggagccgcaggaccctaccccatccgtggtcccttccccaccgtccctcctctctctccttgctctctgccacccctctttctgggtctctatcttctcttccccaaatcctctcccctcctcctccctgagactggacctcaccgcctgtatggtgggggcctggtatggacccgtcggcccgaagtatccagacggtggctgattctctcggtcccagctgcggggcctgaggctggggctgtttacaccgcaaagccggttctgccgcggccagtaggcggtgccctgcgcttcccagtgccttcccacaggttagccctaccagctccccaccccggttcacagcccaggagatcgaggcacagaggggcgagccacctagccagagtcaggaacctccttggaaccagcacccaggcttcccagcccagatgaggttttgccgcggccccagcagtgcctgcctccttgtgtggggctgtctgtctgtgcatggccgggctcccgcaggtgacccaggagcacgttccaggccacagccagcttgttttggggaaggttgggcacttccttgcctgcctttctctttattttttaatccagaagccagcagctagcttttataaagactaataagactttgctcactccagtgccctggcctgtgaccctggttagagaaaattcctggctccttcttcagaagctcagtcaagccttgacaaatagacgctaggaactgagaagggggccctagccaggtgtggtcctgagtgacagggctggtggaccttctagccgcccccacaggtagctggagcctctggaaagaaccacttgccggttctctcttgttctatgtgggtgggtcatgattattttttacattttaaacactaatttttaaaatgtaacaagtgagcttgttacatttgtaccattttgtgccagacaaaatagcatagactgggtggcttaaacaaaatttgtttctcatggatctggaggctgggaagggcaagatcaaggtgctggttgatttggtttctgatgagggctctcttcctggcttgcagacagcctccttcttgctgtgccttcacatggcttttcctctatgagtgggtgcatgtggaaaaagcgattttccacacagtgagcttccagacagtgagcttgttaatgctggcctccatgcgaatccaggctggggaggggctctgctaaccaggggagtttaaaatagacttgctggctggatgcattgcacttgggcatccagtggccccccacctgctggctccagggtacatgctaccccagcaggggagaatgtcctggtcgtgcagagtccgttcattcagcaaacattgacaagggtgcctgcagtgtgcctgggcccctcccgactcactggcttcaaggcttgcaggaaggatgcctgtacttggaaccagcagacacagattcccattcccagccagtcctccccggtgtgctgaggagtccagcatgggccccagtctgcttggctgtgtaacttcactcttgtcatctactagttatgtgaccctgggcaagttactcaacctttctgagcctcagacccctctgtgaaatgggtcttagagtagtacctaatatattaggctgttgtcagcctcaagtgtgacctctgttaggcacagaccttggcatttgtgatcactggacttaagtttagctattgggagttctttctatttgtgggacatagcaagtgccttccagacctcagtttttccatctgaaaaaagggggcaatgttttctgccctgcctaattccaagggatgctctgaggttctcctgaaatagtggataaggttctgcacccatgtgaggaggtgttcccatcccaccagggaataaaggccccagtcttcttggtacgatgctttgagttaggcttagcctcctatagaaaccaagatgcatttatttattagtttattgggtggggaagaggctactgcagaagggactctgaagtgtcccatcctcagcattttggagacatttctcatttatcaagctgctgccacatcctaggtgctatgtagagcaaagaagcaggcatgctaccttacagccaaattcagcagccagccagccagccatgcgacaggcccaggatgccagggagatgctgacatttgttcaacagctgcttataggccaggcattgccagccagttgcagttgcataactatcataaaaacagcttctctgggtttacatttggggaaattgaggcacagaaatgtggtaacttgcccaaggccatgtaggcaatagttgctggcagcctaggctcttccatttatcttaggcgctaccatagattgaaagtggctggctccttgtagggtgtgatgagcagaggtgggacccaggcaggagctgcaaacccaggcttggccatttacgtggcctatggccttcagttctttggacctctctttcctcacaaatgaaatgggaatggactgtcagaggctacacaccagcttctggaggcagccctggacactaccagttttttaaacaattattacttaatttgaatttttttaaatttacacttttaattttgtttttgaaccggtaataaactagtcacatagttcaaaattcaagagacacaaataagaatgcagggaagtccccctccccgccccccaccatcccagtttccctccttagagacagccactgttagaaacttcttatgtagccttccagagatattctgtgcatatacaaatacatatgtgtatgtatattttctctccccactttttttacacacatagtagcatattctacacaccatcctgctccttatttctttcacctgaaatcgaaaagggtttagagatcattctttgcccattaagggtcctaattcttttttatggctgcacagaactgtgaatgcccttagaccaggtttgcctttctgggtacattgccacagtccccactatcatgcagtgttttacaaaacccagcctgttccacagttatgtgctactgctacctctgttgcccttgcatggttggggtgacctctgaggacacttacagttctgacatcctgcccttctccaggtctgatttttgtctttctccctgatccttaaaatgaagctctccaaccaggctttggtgactttacagagcccagggtgagggggcatggtcattttgtaggctgggtgggtccccagctgtcccccagccttggtttctactcacctaccctgtctctgttgccctccttgctccaatagtggccgttgtctcagaggacgactttcagcacagttcaaactccacctacagaaccacaagcagcagtctccgagctgaccaggaggcactgcttgagaagctgctggaccgcccgccccctggcctgcagaggcccgaggaccgcttctgtggcacatacatcatcttcttcagcctgggcattggcagtctactgccatggaacttctttatcactgccaaggagtactggatgttcaaactccgcaactcctccagcccagccaccggggaggaccctgagggctcagacatcctggtaagggcatgtttctcctgcaaggctggtgggagcatacagaggcctcatgcctcacatgcaggggaagatggagatttcagacacatttccagcctttagatcacttactgtttagcttgggaagaagatgcaaattatggttccatgtggtgtgtatggtaaacccataaatccagagtccatgcctccagggatgtgaaggtatggactgaatagtgttatgttcagctatgagttacagaaaattccaaaagactagtaactaaaatgagatggaaggtcatttttctcccatgttcaattctggtcgggacagcccaaggctggtatgatgttctatggcattaggaacccagttgcttcacttctgtgcagctttcatggccaaggccacctcatagtgcaagacggctgttgtaagtccagccattacatcagtaggaaaaagcaagaggagaaggaggaaatgcctgttgcctgtacgaacacttcctggaagtaacatacattgctcttcttacattgcattggtcaaaacttaggcatgtgaccacatcagcttgcagagcaggctgggaaatgtagtctttcaatgtagctttatctcagaaccatgtgcctgctaaaatgggaggttctgttatggaagacaaggaaaatgaatccgaagggataattagtctgatcaccatgggagagattgctgtgacttgggagttggtgggtttcaagaaaggggaggaaacgatccaggtagaagaaaaaggctgggcaacggcagaatgggaggaaagttcaggtgtgtatgacaaactgtgaagctgtgtttggggcacaagtaagagcaagaggtcttgagatcattgcctggggccttgaatgtccaggtgaggagtcaattttgttt

SEQ ID NO: 4949 - DNA, 6000 bp, Homo sapiens
gccacatccgtctggtcctggacaggaggccgctttggtgacaggtgccgacaggaaagcacatctgtcaacagagacggtcaaccctgtgccctgggtcactcttcccaggcaagagtcttgaagacagcagagggcacctgcagaggggacaaccacaggaaatgcatggggccctccctcagcacgggtggttgagcctgtgggggagaaagtcattttgttactgcctctgctcctctttcatctctgtcccatggtgcccctgtctttctctgctctctccctgttggttcttgccctgtcttcccaccgcaccccttttctgtgtgtttccctggctggcggcaccgggtgccaggtgtggtgaccgtgaggtcaggtgtcatcattgaccgggaggcattctcgccacccatcctggagctgctgctgctggctgaggacatcgggctgctcaacagcacggcccacctgctcatcaccatcctggatgacaatgacaaccggcccacctttagccctgccaccctcactgtccatctgctagagaactgcccgcctggtaagcaggggacaggccccagcaccccacaaccaggggccggttggtggtcacaggggactggagcctcaggttggacacggagtttgcctccagtggggagaaagatgggcagcagggtgagtgtagaacacactggagagggagtcaggagacctgggcccctgcttccctcctctgagcttctgtatcttgcctgcaaaacaagattcttttttcctttctttctttttcttttcttttctttttttttttttaagacggagttttgctcttgttgcccaggctggagtgcaatggcacaatctcggctcactgcaacctcagcctcccaggttcaagtgattctcctgcctcagcctcccgagtagctgggattacaggcgcccaccaccacacccagctaatttttgtatttttagtagagacggggtttcaccctgttggccaggctggtcgcaaactcctgacctcaggtgatccactcgcctcagcctcccaaagtgctgggattacaggtgtgagccaccacgcctggcctacaagattcctaagtattctccatttgaattcccagatggaaagactgactattttaaagtcaaaataggatcaacatgattcccatcaaaatcaaatataacttctggaagaataagaaaattttgaaaaacataagtataataagccagatttggcttaccagattttataacatattataaagctacagtatttaaggccatgcaatatgggcacaagactccaggacaaagtagcccagaaacagatactggtaaattaaagaataaaatatgatgtgataaaggaagcaatgaggccaatggggaagctacttattcagtgtgcaaaaacctatttaatctaatcaattacatccaattattataatctgtatgtaatctaatataataataatgtaatatttagtgtagattctcccccatgtcagacaccaaaataaaaaccaaaagaaaatattaaaaagtagaaaacactaaacaataaatgaagaaaacttaggtgaataactcatttctgggtaagaaggttctaagcataaaagaaaagaacttaagaggaaaaatattaaatttctatgcatgctaatttaaaccttgttacatcaaataattatagccaatattgaaaggcaaacaacaaaccaaaaagtatatttgtcttggtccaggcgaggtggctcacgcctgtaatcccagcaatttgggaggctgaggcaggtggatcacttgaggtctggagttccagaccagcctgacatggagaaaccctttctctactaaaaatacaaaaaattagccaggcatggtagtgggtgcctgtaatcccagctactcaggagtctgctgcataagaatcacttgaacctgggaagcagaggttgcagtaagccgagatcacaccactgcactccagcctaggtgacagtgtaagactccatctaaaaaaaaaaaaaaaaaaaaaaaaaaaaaaaaatatatatatatatatatatatatgtctcaagttgtcataattatgtgacttgtataattgacagaaaaatggacaaaagacaaaagcagaccatttgcagaagatacaactaattattacattataaaatattgtttaatcaaagaatataaaataaaataacatgccattttcctataaaattgcaagtatgaaaaaggtataaaagaaaatgctgtcaaggctgtcatgagaaggggacttgagaagatcaccaacaaatgtgtcttggtagatctttctggaagaggccactgtgcgcagctactcccttttccctctccaacaggattctcagtccttcaagtcacagccacagatgaggacagtggcctcaatggggagctggtctaccgaatagaagctggggctcaggaccgcttcctcattcatctggtcaccggggtcatccgtgttggtaatgccaccatcgacagagaggagcaggagtcctacaggctaacggtggtggccaccgaccggggcaccgttcctctctcgggcacagccattgtcaccattctgatcgatgacatcaatgactcccgccccgagttcctcaaccccatccagacagtgagcgtgctggagtcggctgagccaggcactgtcattgccaatatcacggccattgaccacgacctcaacccaaagctagagtaccacattgtcggcattgtggccaaggacgacactgatcgcctggtgcccaaccaggaggacgcctttgctgtgaatatcaacacaggtacaagggcctgcacccctcccacctccctcccagctcccagtcctgtctcctcgctccctgcttcccccttctttctcctttctctttctttgctgttcccttgctactctcttctctccccctcctctggagggaaaccagaaccgtccttctcttttccatctctccccttgctttctttctctgcttcctcatcctcccttgagcagctcctctggccttcctgattccctcgccctaccagtgtatgagagcacctatctcaccacatcatgccagtattaaatatgataacattttcatgttggcaattttagaggaaagtaataccttgtttgttcttttgttttttgtttttgttttggctttttttttgagatggaatttcactcttgtcacctaggctggagtgcaatggtgcaatctcggctcactgcaacccctgcctcctgggttcaagtgattctcctgcctcagcctcccgagtagctgagattacagacatgtgccaccacacccagctaatttttgtatttttagtagagacatggtttcaccatgttggccaggctggtcttgatcatcctgacctcaggtgatccacctgcctcggcctcccaagtgctgggattacaggcgtgagtcactgcacccagccgtgataccttgtttaatatgcatttctttactaactaggtggctgaacactttcttcatatgtatgctggccatttaaatcctctgcaagttgcatgcgatcaatgattttcttacactatcacgaaaccaagagaaccatggcttatctttcacaatgtatgtagtttattgtaatgctgatggttttatcattttcccaaaagttcagtgtttttctcctttgaggagttaggaaagggacatggagctgatacgtgtacttcttggaaggcccagaggaatgatagaagaatcaacatggctgtgacaaagcactaaaacagcagtaagatatcagtttttcacacgtgattagtggacattaggatgctggacaatgttgatattggtgaccgtgtggggacatggaaaccctcatgcactgctgtaggagttgtgactgattccactgtctggatagcaatccagcataagggacacttgtaccaccattacccagtatatgttccagagaaagtctcagggcattaatgaaactgtctgaggatgctcactgcagtgttattggtgatggtggagttggggccatgcaggtatccatttctgggagactgaagagtaaaatatcatgggtgtgcatcatgggggtaccagccagcagtgccagcggtgagaagcaataaattagacacacacagagcaatgtagatggatcctaataataagtatttactgaaaaggataataaatgggatgagatatatgccacagcaccatttccataaatgtaaaatacatacaaaataatacatgattttcagaaatacttttattaacaaaaaatatacttcaatacattacaatgactgcctgaggggagaagggaaggagagatgagtatgggaatgaaagggagtagacgcacacataaaacaagagaagtgccagtggtcatagtgtgcagcgagccaaagaacatgataaactcaatctgcatttgaggcccaaagggaaacagaagaaggaaaaaccatgagcactaggagaagttagatagaaccagctacatcccaggttagcaaaattcctggctgcatgggttggtcaggaccatggagagctgctccacgtccctactcaacttgaggctctgctcaatcccctactgcttttctctttcctgttcccccttcctccagctgactctcttctctatttttctttccagtgtcttctctgccccctcctcctcagccctccactcctcccttgcccactttgctaccttttcttcttgccagagcctcagcccctgagctctccactccaaatgggcttccacttgctcccctggtttccttcccagtgcctcttcccctccccactccctgtttccacccctccctccctcctcccaccccgtcagctctgagtccccaccatcctccctgccctgctctgctccatccctgctgcaccctgaactaactgatgttaaccctcttctctcttcctcatggctggcaggcccacaggtttgagctctgtttctctgtcacttcccacctcatctcttctctgcctcaccccattgccttcctccatgcccaccacacccccaccacccttcctgtcctgtggggcctgggccaaggccgtggcccagcctttgcagactgaatgcagccgccctctccccatcctcgctccccagcctgggggacagggagcgagagtaggaagaggaggaggaggaggaggaggaggcggcccagggtaagtgactaccccatggctggggacccacggaagacagaagcccagcagggggatctgccaagggggaagggaatctcagatacccctgtacctgagagggagaggaggtctcactctgggatgaagccaatgggaggagaagccaccaggccctctaacaggcaggaacaagaaaggtcccaagaaacgcagcactgaggtcagccaaactaggtctgtccagtccccgcccatgcttctggggggttcctctctgatttggggagcaggcagggactctgggaggcagtgggtagaacagaaggaaaccccttgctaggactgccatggaaccaatgctcctgtcccacaatcagcccatgtcactccctatttaatcaagacaaagggatgggcctgaagtatccagacggtcccaccactgtcccctccagggaacccctcagggcttttcagctaccatgactttcctttaaacttgatctccctagaatctaagcattttttaaatggtgataaaatacacataacgaaatttaccattttagccactttttaattgtagagtccagtagtgttaagtacatttgcattgttaaggaatacagcagtttttaaacaagcagttacatagcttctgtgtgccacgcactgttctaagtactttacaaatggaaactcattttgt

SEQ ID NO: 4950 - DNA, 6000 bp, Homo sapiens
tgtgtttgggagtggacagtattatttaaaatattttttctggaatagataactaattgccccaaaataatttactgaataatccattattccttccttaatttgaaatgttacctttattataaaataaacgcttggatatgtatataccagatccatgtctggagtctgcattattttttcattgatccatttgttgatttctgcatgtcaagtgccaaatgttttacattattatagctctttacagtgtgtcttgatatctagtaggccaatcttatgaggaaaaacaatgttatttttgctttattttgcgtatcccatagggccattaagattgaaccatcctttcattttgcttggtctcaagttttctcttttgaggatgcccaattcatatcctttaatcatttgtcaattacatatattggagaattccttcttccaggtatttcaactttatttacagtgtcattcatatgaatgaagcttttcatctggatgcagttaaattttcaatctttccttctatggcttttaattttaataacttgctaaaaggtttccttcccctccctcaaaagttgtaaaactattctcccagactttcttcattatttttcatatttaggtcactaatccatctagacagggggataaaaatgtccagggatgagatatttctctgccaattcagatgggacagcagtgtagggtgcctggaccttagagaattcagtcacccctgccgtgtgtgaagggtgactgtaatgaagaaaggaatgccttctgaacatccagttgactgtaagttcttcatgaatttacataaactactcacatctgaacaaagatcttctggtactgtcttctggattccttatctgtgcgtgaggggctaacagtaagatgtttagtgttgagctgttggtggccaggtacagcctctaactataatcccagcactttgggaggctgaggtggaaggattacttaaggctgggagtttgagatctgcctgggcaacatagtgaagcaccgtctctattaaaaaaaaaaaaaatagtgtggagttggaagacataggacactaagtaacaggctgggctccaagcagggttgtagaagacatgaaactaaaacctagctccctgtagtctgttgactgaagccattttgcctctccaacatttcttgtagcatgaataatttctccaatatctccctcgttgcagatttaatacctaaatagaaatactgaaaaacggcagcctaaaattggggaagttcttgaaacttttggtaaggtaggctgggtatggtggctcacacctgtaatctcagcacttggggaagccaaggcaggtggatcacctgaggtcaggagtttgagaccagcctggtcaacatggcgaaaccccatctctactaaaaatacaaaaaattagctgggtgtggtggcatgtgactgtagtcccagctactagagagagtgtggcaggagaatcacttgaacccagaaggccaaggttgcagtgagctgagattgcgccattgcactacaatctgagcaatagagtgagactctgtctcaaaaaaaaaaaaaagttttggtatggtaaaggcttgatcagaactgtacttgaaaaagatgatcctgttatttgtcagacagattcaataaagggactgcatgtgggctgaagtggcaggaagtaggaaggagtgactgactcatgagacagtggagatgaagccatgatttaatctagaaggattagatattgtattacccaatcagtagaactcttgacagctgattagtctgcaatctttatatgatatgggggaagtcaaagcaaggaatctgggtacaaggtagaaagaaagtgctgttcacatagagtaggccgggcgaggtggctcatacttgtaatcccaacactttgggaggccgaggcaggcagatcacctgaggtcaggagttcgagaccagcctggccaacatggtgaaaccccgtctccacaattagccaagcgtggtggtgcacacctgtaatccaagctactcaggaggctgagacaggggaatcacttgaagtggggaggcagaggttgcagtgagccgagatcgcaacactgcactccagcctgggcaacaagagcaaaactccatctcaaaaaaaaaaaaaaaaaaaaaaaaaaccacagacagggtagccttggtgaggatggactctgtggataatgataatggacttcttgtctttgaggtgtgagtaatctttggtaaaggtgaccaactgggaagaggtgagggctgaagagattattttagtcagctgaaggtgaaaattgaatctgataggtactgaaaacacaaagaagataataagcaaaacttattctaggagagaagaaagaaaaggaaagctgagaaaacaaggagttattcagaaggaggagaagaataaagagggtggtgtgatcaaggatgataaggactaagaaaacaccaattgttacaattgttactgttaatcttgatattcaagagcactgtggtctacctgggaaatggatttcctcacatattctgaaattcattctttaagactttatatcccaagatactcacgtaaaaaatgaggaaagagaaccttggttggttccagagtgccctctctggaactggaacactcagctgccaattgttttccagtattcctcacccacttgggcatgacaggaccctgtgctgtttcttcttctttgaaataaggacaatagtttactgcctaggattgttttaagaattaaattagttaattattgtatagtacttagaacaatgccttgaacatagtaggtgttcaataaataccagctacagtatagtaactttttttttttttttttgacggagtctcactctatagcccaagctgaagtgcagtgattggatctcggctcactgcaacctccgcctccggtgctcaagcaattctcgtgcctcagcctcccaagtagttgggactatagacacgcgccaccacccccagctaattttttgtattttagtagagacagggtttcaccatgttctccagggtggtctcgaactcctgagcgatccacccacctcggcctccaaaagtgccaggattataggcttgagccactgcgcttggccagtaacccatttttaaggcccaggtgaaatagtttttctatttctatgattttctatttctatgattaaatagtgtttaatcagacacttcagctgcatatacctcccacagctcattgatgatacaacagttcgcacagggcctggcacacatgctaaaggctcagcagtattgataatcacccacacttacaaagcactatgggccagacactgctgtgctttctttacagatatcaactcatttaacccaccctaaaaaccctgaggttcccaaaactggcatatcctcatgttacagatacagaaactaagacacagccgggctaagtaattaatctaagcttacacaaatagccgagacagagccaggacttaaatccaggcagcctgtttcacagtccctgctcataaccatggtgctgtatagttccaaacatcttaactaatgaggacagcattatttctcaaggtgcacagcacagagaacttcaaaaattagactcttagtaaaacaccatcttttttttttttttttgagacagggtcttgctgtgttgcccaggctggagtgcagtggcgtgatctgggcccactgcaacctgcacctctcaggttcaagagagtcttgtctcagcctctggagttgctgggactacaggcaggcaccaccgcgcccagcaaattttttgtatttttagtacagacggggtttcaccatgttgaccacgctggtctcaaactcctgacctcaagtgatctgcccgactcggcctcccaaattgctggaatttattccaacacctcattcattcattcattcattcgagacagagtctagctatgttacccgggctggtctcaaactcctgggctcaagggatctttctacctcagcctcccaacgtgctgagattacagggacacgccaccgcgccagcccgaacatctttatcttaaacccagaaaagtgacaggagtgtctcccctacaagatgatgaccagccctccagacctgagcccaggtgtgattccaaggcccctgtactggggccagacagggagactcgctctcagggacttcccaaccagcaccatcttctccctgcggggatggcgagggagcgcgggccggccccggccctgcctccgcgctcgcgctcgacggtgtcctgaagcgcgctcccggggaggtgttgcagccatggctacggcagccggcgcgacctactttcagcgaggcagtctgttctggttcacagtcatcaccctcagctttggctactacacagtaaggacagccgctggagcgctacggtctgacgaacgagcgagcgctcggttcaccccaggacctgggctcacaggccgcgggccgggggaagtcgtgcaagcacaatcccgactcccgcgcgctaggagcggaggggaggggaccagactccgcaatgagagcaagcatactggtccgccagggtcttgggcgggcgcccagggccctgagaaaccggctagccaggcttttcttatatgggggcggggacggctggggagctcccagccaactctgtgtctgggtttttcaagaggatggtgaagtcggaggccagcaatgcggctaccgcctatttccgtccagcaagacccttgccctctctggtcacagtcctggggctgggctacttcgcggtgaggcgtggggtggggcggggcgggcctctgttttggcccgccgggccctcgtagggcgaggggagctctgggaacggggcctgtgcgcacgcgcatctgacggttgtctcggttactcatgtaagcggaaattcggtgggctcttaggatagtttctgctttctagtgttcctgtctttgggtcctcacctctgcatggttactaacgggttatccgagcctaagcctctcacgaagcggaaagtcaagttaacagactgccataggcctgccaagtcagaatagggcttccgaagcagaatgtttgagccaataggaattgtttggaaaacggggataaatctaaaggatgggtaggatttaagtggtaagggaggataaagaggctataactgttctgacataggtgtggaagcaagaagaaagctgtacctagaaaaagagcgacgtttgtttggctgagaaataatctgtttaaaggataacgagaaagatgcgtggaaaagtaggttgggggctaaggtggtagttttgtgtttttttgagacggagtctcgctctgtcacccaggctggagtgcagtggggcgatctcggctcactgcaacctctgcttcccaggttcaagcgattctcatgtctttacctgtagctgggattacactatgcccagctatttttttgtgtttttagtagacatgggtattggtgaggctggcctcgaactcctaacgtcaagtgataaggtggtaaaattttgaaggaaggcgaagctatttgggtataccaatagatcctggagattggagatttgtcttgtccacagtgttgtttgttggtgtcaaatctgacaacctatgtcctgatttccccatatgtacaatggaggtgttgaactgaaaattttcaaaggtgcatttctgttctacgatttagtgtctgtgactagttagaatatagttggaggaaagctttggggacttcaaattgggatcttgtggagctggcagatgctcccctttccctttggtttgggaggatgcagtgatatttgtgcattatttaactttcagatgtgaaacaacatcgtgagagaggtagtactgctcttgaca

SEQ ID NO: 4951 - DNA, 6000 bp, Homo sapiens
gccagtgtcctgatcttgaacttcccggcctccaggactgtgagaaataaatttctgttgtttataagccacctaatctatagtattttattctagttgcctgaatggactaagataagaacctatatcaacatcagcttccctaattatgattttttttgccacttatattaatttgctaaggctgctgtcacaacataccacagacagaaatttaagccacagcaggcatttattttctcacagtttggaggctagaagtccaagatcaaggtgctggcgaggtgaggtgggtgccttcagagggctgtgatggaagggtctgttccaggcctctctcctggctgcaggtggctgtcctctccctgtgtcctcacgtgggctcccctctgtgcatgtctgtgtcctgatctcctcctcttagcaggatgctcttcatattggattagggggcaccctgatggcctcattttagcataattacctctgtaaagagcctgtctacaaatacagtcaccttctgaagtcctgggggttaggacttcagtgtatggattttgaggacacaatttagctcctaacacctctaaaattaggggctaatactccatcatgttgccatggaggaggctgataggtgtgagggggctggggccgattgccctgtgtggggtgggcagggctggggtgtgtgctgggatggttactgacaccccaccggggttagcagtggagggagctggttggctggcgactgttgcctgctggctctgtctcctggagctgagcttactggtgggatgcccgctccgagaagcacccttcttctcttcttaggagactctggacccccttctccaggtttctctccctttagaggcacattttcctccaagccttcaagccccttctctttctccagatgtggatggtggggaagggtatcttgagaaagttgggctttaaatctctggagacctgaaaggaaacagccagggagcctttggtcagacaggtggtgcgatggcacagtgcccagcgaggggcagaggctgagaggagctgacgagcatctcctggagagtcctccttgcctgcctcctggatccctcgttcccaccctgctttgccctgctccttaccagagctcactaggggatcaggtggggacatcgtgtgtgccaaaggctcagacccctgtggtgttttcctgcagctgaagagcaagtgggatgagtccatcttcacgaaaggctgcatccaggcgctggaaagctggctcccgcggaacatttacattgtggctggcgtcttcatcgccatctcgctgttgcaggtgtgtcccaggagcctataggattggcaggtggccttttttcatttgagattgggcccttaacatagagtgcatgggtccagtttgggtatggtattaaggaagcttgcagaagaaaaaaagggattcaactggatgtccaaggctgagagagtgtatgcgtgtaagtgtattggggaggagaatggtggcttccataaacgctacctataggggggccctctgggcgggggcaggctgggaggggcttgtggccctgcacaggtcctggtggcagccctctccagagggcccaatgggctgcagaagggtcactgcctatctggaggtaggtcaggagtgtgctcggggtgggccatcaagtgctgcagatggggaggtgaaacccttggtcacctggggcctgagggtggcctgaggctcacgtgtgtgcacttgccccaggacctctcctcctgtctctggcccctgggctggagttgtcaggtatcttccctgtccatgagacatcctctgaggcctgctgccgtttgtggcatcctttcctctcccaggctgtgcttgttcatttgaaccaggttgcacatgtgggaggatgttggtggctgagcaggcagtgaggcctggggtgactgggctggttggtgactgctaggagaagaactggcagagaaagtcaagaattcagtgatcagagaaaccaggagtctttccagtgctgttcagggcttccaagaagccgcagcttctgggtccactgatgcatttcttgtgtggaaaataacaccatttagaaagtgtttgactctgtttttgccttgaagagggtgactgaggtagacccagggccaccagccacccacacatgccttcctccttcaaggaagactaagaaataggaggaagcaactggaaaaggaaagaaaaaagttatttgcaaaataggcaagggaagaatcagacttcagaaggactgactagtcaaattagaaccacacaagaatttaaagggaaaaaaagccatttccagaggtcaccaagttcgtgttcatctgttcacgttagaagaacatcagtctcctctcatgatttccctgctcaccaaggttgggatggatcttcagacattattagcacagccaaaattggggatggccttggttttattatggaatcgacgtttacaggaaacattcaagatttattattttgggaatgagaaccagtcagcgtgaccctgttatttttggtttaacccagggacaggcgtgtcctgccccatggcttgtgacatacttaatcatgttggaggcaggacagagtgtctgttttgcttgtggtgcctgtggtttgcctcttctaggctttgggaatgtaacagactagaccccaggaccccttttttgcgggaggggtggctgtgctgtgccactcgctctgcggtgctgtctctacgtcttcagtcgcagctggggggtgaggagaggcgtgcagtgggagctcccaaccccaccctccgctccctgccctctgcctttgggccccagcaatggccgctgactctgctggtgttggtttcagatatttggcatcttcctggcaaggacgctgatctcagacatcgaggcagtgaaggccggccatcacttctgaggagcagagttgagggagccgagctgagccacgctgggaggccagagcctttctctgccatcagccctacgtccagagggagaggagccgacacccccagagccagtgccccatcttaagcatcagcgtgacgtgacctctctgtttctgcttgctggtgctgaagaccaagggtcccccttgttacctgcccaaacttgtgactgcatccctctggagtctacccagagacagagaatgtgtctttatgtgggagtggtgactctgaaagacagagagggctcctgtggctgccaggagggcttgactcagaccccctgcagctcaagcatgtctgcaggacaccctggtcccctctccactggcatccagacatctgctttgggtcatccacatctgtgggtgggccgtgggtagagggacccacaggcgtggacagggcatctctctccatcaagcaaagcagcatgggggcctgcccgtaacgggaggcggacgtggccccgctgggcctctgagtgccagcgcagtctgctgggacatgcacatatcaggggttgtttgcaggatcctcagccatgttcaagtgaagtaagcctgagccagtgcgtggactggtgccacgggagtgccttgtccactgtccccctgtgtccaccagctattctcctggcgccggaactgcctctggtcttgatagcattaagccctgatggcgccggtggcgcggtgggcatggttcttcactgagagccggctctccttttcttaaagtgtgtaaatagtttatttataggggtaagaatgttctcacaccatttcacttcctcttcctctcctccagcattctcctctgagcagccttagatagtgtccatggctggagccgaccctttgagtccccttgagtgtcttaagaaccagcccacaacagcctctctttctcctccacatactgcagcctccctccatgcatcccacatacaagcactcccccactccccagcgtggcctcactgtcttctggtcttggtgctactgaaattgtcacccagaatttgaatcctgaccctccccactgcaagcccagggagccccagcccaagatggccagcctgaaactgttggccagggctcctcttgtggccatgtacccagggctggctggcctgccatttgcctctccccggagacagccgttcttctgcaaccacaccccgtgcctagccacaaccccaggctgcagctgctcagaagctccaggcattttgtttctggtgaccgcccctaatgggatatcggtgatcactggtccacccttcctgtcagggcttttctggggctgctcttggaaatgaagtcttaagtactgaataactcccctggggatagctggggcatttgtctagctgggctactttctaacactttgccatagctcagaccacttctcatcgttcagggatggactgcaaccttaatttacttgccggagtgtacattctagtgtggtgtatactggtggctgttgatgatgatttttttttttttacacaattctctgtagactaggagaagaatgcttgtgtttttcggaagtgtgatgcttctctttgactgccaaactcttttatggaatatatctttatattaatgctgttttggtcatttttgtttggggtcactattgagatattgctaagcatctcagtggtaaacgcggctgccagaggaaccaagggatagggtatgtagaccttacagaaggatggatggtaaaggcagtccatcatcagcacaatctgacttacatttcattgagtaattttttttttttttaagattctgtatggcagcactttcagttgcccttgtgtgccggccacagccgcacaagttggcttgtggtttatcccccgctataagtgagagctggagaaacttcaactccataggtctagaggaaacattgttttaggttatttctgtccacccctgtgcgatactatttattgatccaagcagaagagcttggggacactgagtcgaagtggggacatgggattgaagcctgggcactgctgctgcatgagctgtgtgtcctgggtgtgccggcctttctgtgaagggggttggtggcagtgcccacctcactagatgcctctgacccagcctcccctgggggagtgggtggccacagaccctccctgccagagctcctggaaggctcctgcaggcctgacccatctattcctgtagacctggtttaggatgaagtctcggtgcgatttttgcagagttgggtttatctttcaactatagacccttctggctgttctcagccatatcatgtgactctgaatagttggatgaggaatggaaagaaagcaaggatgagagccggtcacgtggcagtctccgcccagcatcggctgtccgcacagaggcacagggcaggcctcctgtgcactccccacctagcactggcctgtcctgaatccccgccttccctggttggaggccagctgtggcatttgcaccctcttctcacctcaccatgcacatgctaactttaaagccttggggtctttcctgtaccccctcctcaaccctggtccaccccctctcaggatcttgtcaacgttatttttcctgtcccgtcttcctatcgctggccttcctttcccatcctaaaaacttgccgaggccctatggctccctccctttctttcccaggcagcttcttatctgggctgtctgtaccccttcctttgcaccacccaccatgccccacgtagctgaaagctgcttatcccaattgtcaactctggccttcttcagcctctgtagcaccagacactgcacctcctgaatgtcctctgcttctctgcttcagaggcccaggctcgccagttctctgacctctcccatatgtctgcttaggactctgctgcagctgtcctcaccagcctccggggaatcccactacccacagggcagggctgtgggct

SEQ ID NO: 4952 - DNA, 6000 bp, Homo sapiens
acagattgccctcaaagtcatatttccaactgctcatcaatctaaaaatccaaaattttgaataattttttgatgaaataatttatttcattgtttctcaattttggctgcacagtggaaccacctgggctgtttgaaaaaacctaggcctagccaggcacggtggctcatgcctgtaatcccagcacttagggagaccagcctggccaacatggtgaaaccctgtctctgctaaaaatacaaaatcacctgggcgtagttgtgcattcctgtaatcccagccacgccagaagctgaggcagaatcgttcgaatccaggaagtggaggctgcagtgagttgagatcttgccattgcactccagcctgggcaacaagagcgaaactccatctcaaggaaaaacaacaacaacaacaacaaaatcctgggctctgcttcagactagttaaaccagaatctccagggtggggcaccggaaagaacaagaaaaaagaacaccttatttttatcttcttcagtgagccaatgttcattcaaaagagagattaaagtgctttttgctgactagtcacagtcagagtcagaatcacaggtggattagtagggagtgttataaaagccttgaagtgaaagcccgcagttgtcttactaagaagagaagccttcaatggatccagctgtggctctggtgctctgtctctcctgtttgtttctcctttcactctggaggcagagctctggaagagggaggctcccgtctggccccactcctctcccgattattggaaatatcctgcagttagatgttaaggacatgagcaaatccttaaccaatgtaagtatgctttatgttcctccagtaatgtacaaggtgtatttaacctcacaattcttaaagttttatttcattttaaagtgataaatgataattgtatatattaatggggtacaatattacattttgatacatgtatagattgtgaattgatcatatcagggtaattagcatatccatcatctcaaatatttgtcatttctttgtagtgagaacatttaaaatcctcttttttagctgttttgaaatatacagtacattaatattaattatagtcaccttgctgtccaatagaacacccgagcttattcctcctatctaagtgtaactctgtacctgttgaccaacgtatccccttatttggcccatctccacctgccagcctctggtagccaccattctaatctctacttctctgagtttaactttttaagattccacatagaagtgagatcatatatgatatttgcctctctctgcctggcttatttaattaatatgatgttctgtagattcatccatgccgtcataaataagaatattttttcctctttaaaaggctgaatagcatttcattgtacatatatgtcacatacaaaatccattaatttattgatgaacacttaggttgtttccatatcttggctattgtcaatagcactgcaataaacatggaagtacagacatgtcttccacatactgacttcaattcctttgggtatatactggtagtgggattgctggatcatctgatagttctatttttgttttttttaggaacatccatactgttttctcaaatcacaatgctaatttacatacccaaggttcactttattccacatctttgtcaacacttgttatctttttatctttttgataataataatatcttatctatgagttgtgatgagttatctcattgtggttttaatttgcatttctctgatgattaaatttgttgagtatttaaaaaatatatcttggccatttgtatgtctttttttgaaaaatgtctactcaaatcctttgcccatttaattaattaattaattaattaattaatagagacagggttttgctctgttgtaggatggagtgtagtgatgggatcatggtccctgcagccttgagctcctgggctcaagccatccttctaccttagacccccaagtagctggggctacaggtgtatgccaccatgcctggataattttttaatgctttgtagagatgtggtctcattatgttgtccaggctggtcttgaactcttgggctcaagcaatccacccacctttgtctctcaaagtgctggaattacagacatgagccattgcacttgacccctttgctcgttttaaatagaattatttatttgttattgagtaatttgagtttctaagtattttgggtggtcagaatctcatttgtctagttttgctttcatggcctgtacttttaggatcatatccaagaaatcattgcctagaccaatgtcatggagtttttctatatggtttctttcagtagtttttagtttcaggtcttatgcttaaggctttaattcattttgagttaattcttgtataagggtgagattaggattctcttttattctttgcatatgaatatccagttttcccaacaccttttgctgaagagtgctttccccattgtatgttcttggcacctttgtcaaaaatcaattgattatagatgtgtgggcttatttcagggttctctacgcttttcctttaatcagtgtgtctatttttatgctaatgctatgcagttttgcttactatagctttgtaacatattttgcagttcagtggtgtgatgcctccagctttattctttttgattaatttgctttagttatttggggtcttttgtggttccatacaaattttaagattttttttctatttctgtgaagaatgagattaaaattttgatagggattgcactgaatctgtatattgctttgggtaatatggacatttttccactattagtttttccaatccatgaacatgggatatctttgcctttatttgtgtcatcttcaatttctttcatcaatgatttgtagttttcagtatatagatctttctcttccttgattaaatttattcataagtattttattttttgatgctactataaattaattgttctcttaatttcttttttagatattttgttgctagtgtataaaaatgccactgatttttgcatgttgattttttatccttcaagtttactgaatttgtttatcagttctagcacttttgtactgaagtctttagattttctacatataagattatttcatcaggaaacagacaatttcacttcatcctttcctacatgaatacatcctttcctatacgaatattcctatatgaatattttctgtctttagtctaattgctctgactaggacttccagtactctgttgaacagaaatggtcagagggggcattcttctcttatttctgatcttagaggaaaagcttttagcttttcaccattaaatatgatgttagctgtgggcttgccacatataaccgttaatgtcacatagaaacttctgtattactggaggccagttattaaaggttatatgttataggaacattcctcagcattcctcctgtaccagcagaggctgattattaaagtatgctattgtaaagcaaatacttcctgtggagtatgtttttcttttttgtcattgtcagaaatagtggaataaaataatgcattttgccagaagagaaacatttcaagtggtaaggtagaatcaaaatgataaaggcctgctgctttctttgcttcacagtcatttgctatatttttttgcctgaaggaaaatggtagtggaagtgttttgtgattaaagattttgagaagtcagtcactgtatatgctatgtattttgcttagattagccatgatcattaaacgtcttaaaaaagcaaatcatgcctgatgtcaaagaaatatctatgagttcatcataaacataaacgaatgaaagaaagaattaattagtcagggccatctgggtggtaacagaatatttatggcctctgtacaaagctgctgtctgtgacctatgagtgtatagcatggaaaacatttttcctctgtgagatgccacacatcctgatactatctctgttggatccactctccttctgtggtgattataccagtggatctcaaagtgggctgggcagtagaatcatttgggtgatttaaaaaggtgtagattttttagtattgatgacaggactcctgcatcaggatccctatgggatgagctttgcaggagatcctgaagcagtgtcccagcagctgattattggtcaaaatatggacattaggaactgataaactgctcaggctcacagcttgactaagcaggcttcaaatttggaccttctgtttatcagctgtgggacactggcagtgaatttgaaattctttaaaatacaatctgtcttatctgtaaaatagagtaaacaaggtgttgatgtgatgattaagtttaatagcctgcatactacttgcttggcacattgaaggcactgtatatgtgcagctaaaacaataatcatcatctttgtctaaaatatacaaatatttgaagctgtatttgacagaataatcataacaacattatgatgataatatcagtctgaatcacggacaatatatagaccaaatactgagttttgctactatttgaacctccttttctatgtttagttctcaaaagtctatggccctgtgttcactgtgtattttggcctgaagcccattgtggtgttgcatggatatgaagcagtgaaggaggccctgattgatcatggagaggagttttctggaagaggaagttttccagtggctgaaaaagttaacaaaggacttggtaaatgtgcatgtatcgtgtgtatgtgtacatgtgtatgtactgggcagtggctatagggatggggaggatggaaaacaggcttgaagagctcctgggacagaacttgacctgtccacgtggctgccgagtgtcagctctcttgtccttgtttggattctccctcgtagcttctgttttctgttctgctaggaatccttttcagcaatggaaagagatggaaggagatccggcgtttctgcctcatgactctgcggaattttgggatggggaagaggagcatcgaggaccgtgttcaagaggaagcccgctgccttgtggaggagttgagaaaaaccaatggtgggtgacttttttttttcctgaaaaatgttttctaaaatttattttaatttatttttagattgatacataacttttatgcatatttatggggtacatgtaatattttgttacatgcacagaatgtgtaatgatcaagttaggtgtttaggatatgcatcactttgagcatttatcatttctatattttgagaacagacctgtgttctagctatcttgaaatacgcaatactttgacattaacacactgctatgttctctaatgacatccctggaaacctcctaggggcagccagatctttcatgatagtggttgtcagtcctcatatggagggtggaggtttgaagcagagagccaagggaggttttgtgcacctatgcttgttgtgtttgtacacaatgactatgcatacgctgtgagtataaaaggctcatttaatcctattgtgtcccaggcttggtttgttttcaaatcattacagcatgaatttagaaggttttgtctcatttttttcaaattattaaagagcaatgtttttcccaaagtgtaattgtgggttatctattctagaacatttcaccaggaatacttgtggcacagacatagtgggaatgacttctttacatcttttgggcatggaacaactgacatgtactttcatttgtttggtctatatttgtacagtcagtctcactaacatgtctgggggtttattctaaggtctgtgtctacaatttctaccataatgatgcttatctatggttttaagagactaggcatctttagtgtagcttttatcaattttaatttccctgttaattaagaagtaattaaaattatcagctggtgttatttaatgttactatttactgtaatgt

SEQ ID NO: 4953 - DNA, 6000 bp, Homo sapiens
gggcagatcacgaggtcaggagttcgagaccagcctggccaatatggtgaaaccccatctccactaaaaatacaaaaattagccggccatggtggcacgcacctctagtcccagctacttgggaggctgaggcaggagaattgcttgaacctgggaggcggaggttgcagcgagccaagatagcaccactggactccagcctgggtgacagagcgagactccatctcagaacaaaacaaaacaaaaattcagagttttataaggattatgggtcctggaattagattcagtttttggagtgcaggaagcctataacaggaaatgagtttagagaggtagagagagtccttacatattcgatgacaggaatttaaattttattttatgcatgataaggagactagaatttttaaagtctgccaatgacattatcagatatcgatttcagaaagatgagagagtatgcactatggcagaagtgacgagaatggagagaggagatgaatttgagagatcttaaggtatagaaacaattggatttggtaaacaataagatgtgggatgtggggaggggtctaggaggaccctgaggttgctgggttgtgtgactaggtggatggtagtgccattatctaatgtaggggttgggcgcagtggctcacgcctgtaatcccaggactttgggaggccgaggcagcctatcacctgaggtcaggagttcgagaccaggctggaccacatggcaaaaccctgtctctcctaacacaaaattagccaggcatggtggtgtgcacctgcaatcccagctactcaggaggtggaggcacaagaatcgcttgaacctgggaggcagaggttgcagtgagtcaagatcgtgccactgcactccagcctgggcgacagagtgagacatcgtctcaaaaaaaaaaaaaaaagtagggaatactggtactggatgggagcagatttggaagtaaagatacagagtacagtttggatgctaagtttgagctgcttgtgggatattctcttgacacccagtaggtggatggaaatatggatctggtgctcatgggagtggacttggcagaaatgtaaaggcataagaagttatgacctaggtagaataagtgaagtagggagagaaggcaaagggtgaaggtctagggaataccaacatttacaagacacaaaagttgactgaaaaggagccatcatacacagatggaggaggaaaatcagacatgaggggggttctggaaaataaggagagatcaattttcaagaaagaaggaaggccaacaatggcccatgctacatagatccaagaagataaaacacaaaaattggtctttgctttacaggccattggcaatcttagggcagtttcattggcatggtgcggtgagaaacgggaatgcaatggaaggaggagtaaatgaatgaggagagaatggaggtgatgaaggaaggcaaaggtagaccatggtctcaagtagcttgtttgtgaaggagctgtttttgttttaattaattttttaaaaattgtgataaaatagacataaaagttactatattgctgggcccagtgtctcacgcctgtaatcccagcactttgggaggccgaggtgggcagatcacctgaggtcaggagttcgagaccagccgcctgaccaacatggagaaaccctgtctctactaaaaacacaaaattagctgggtgtggtggtgcatgcctgtaatcccagctactcgggaggctgaggcaggagaatcacttgcacccaggaggcaggggttgcggtgagccgagatgctgagatcgcgacattgcactccagcctgggcaataagagcgaaactctgtctcaaaaaaaaagttaccatattaatcatttaaaatttatttttatttttgtagagatggggtcttgttatgttgcctaggctggtctcaaactccaggcctccagacaacctactgcttcagcctcccaaaatgctggggttacacggtgagccaatgcacctggcccatattaatcatttttaacagtatacttaagtatttttaagtacattcacattgttgtgctgccaatctcaagaatttattcatcttgcaacactaataattcataccattaaacaacagaatttgtttttaagaatgagaatcacttaaatattttatatgcatagggggatgaaccggtacagtgaaagaggatgaaggtgtaggaaaaatgaaaattctaccattctaagaactttataagaccatttcatcattaaaagacagacaaatatctttacccctttctgacaactccttccatctttctgagtgcagttttaattttctactttctattacaaaaaaaaacaataaaattgatgataattttttgttgagaaagacgatttattttttaagataaattctgaggcctttagaaagatacacacaaactcccatctcttttataattattcttgtatgaattggtgataatatatacttaaccatagtattttcatgatgctgaggagggtgcgaacctggacaacgtgattaaattgtagcacagagcatattaccataaaaagcattaaatgttgtcaaaaggctcatgtaatatgaattaggggttaaaactatgtttctattactccatattcagtttggatgaacttcaaatatttatgaagtgctagttactataatgagattttacctctcctggttaaaccagaagttgggtactagaacaatttactttttactaactctttctctccctgatgaaatgtaaagagaatgagacaattgtcaaagtaaccttttgtcgacaacgtctgatacaacatgactgaagtgaccttgaattttaattttgtttaaaatagagaactgtggctaggcactgtggctcacacctgtaatcctagcactttgggaggccaaggcaagcggatcacttgaggccaggagtttgagaccagcctggacaacatggtgaaacccaatctctactaaaaatacaaaaattagccaggcttagtggtgcgcatctataatcccagttacgcgggaggctgaggcacaagaatcacttgaacctgggaggcagaggttgcagtgagccaagatcacgccactgcactccagcctggatgacagagtgaggctctgtctcaaaaaaaagaatgtaagaacgtagtaaaataggccaggcatggtggctcacgcctgtaatcccagcactttgggaggctgaggcgggcggatcacctgaggtcaggagttcgagaccagcctgaccaacatggtgaaaccccatctctactaaaaatacacaaattagctgggcaaggtggcgggcgcctgtaatcccagctacttggaggcagaggcaggagaatcacttgaacccgggaggcagagggtgcagtaagctgagatggctccattgcactccagcctgggagacaagagtaaaactcttgtctcaaaaaaaaaaaaaaaaaaagaacctaatatcctaatgtaataaagtagagaaccgttgccacagcacccaccaaagtgtgtctctcattgacaagctcaggtacttgtttgtctgtttctcctgcctacccctcagccactctggatcttccctttgatcattcttttctctttctagctttgatgttttggtttccattctgtaattcgcacactattttgtggacatgctcttttcaaatttctctccaaaacaatagtacaaaggcagtcataaaccaattgttggtttttacaaaaaatcccatcatatcaccaaaaaccagttttatcataacaggatgaatatcagaccaatattcattattagagatgtagtctaaactgactcgggagaagacatccattgagtctttcattcagtgtaattagttgttatcatacatgcaaaatcctataactataaagcatttcagaaataaagtattgttaaacagctccaaatttattaaagtataaaaaatgtattgagtatataccatgtggcaccgtgcaaagtaacagagatgcctaaactaaaaggttatcctttgtccttattaaagtatgactgaaagctcgctggagaatatagtttctacatagagtcaaaacagtccttcgggctcacaaatttaatgatttatatggtataactggctttagatacaaatttacatgccagacaagcaatgtagaaaaatcaagaactaggaaacaggaaaacagatctacatttctgctttgctgcaattcattcatttttttcaaccattcatcaaatatttattgagagcccatgctgtgagagaaactgtattaggtgctggggaacatggtagcaaataagagagaccatgtatgtgagcatgagcaggtggcttaacctctccacatctctaacctcttttagactcaatgtctgaggtatctttcagacctgaaatgctaaggtttgcaacagccttgtggagggagaagctgccaagtcgccttgggacttgaggacttaccttcctttcaaaggattagcccttgttttgatttcaaaataattttgttacacagtttaaaaataatttggtcaggctctcatctacattggggtaatcttgacggtctggatgtggtaattcatgctcattagacttcaaaggtaggaagtcaaagttgggaaatggtggatgactttcatcaattcatagccaggcagcggttcccattgagcagctcctctgtggttccacccagccttccaaccaataacgcagcgtctcctgcaggaaactcatcgcttgggtcacctgttgctctttgctctaatgagccttgagaaaggattgctggtcatgggaccagaggctttatggggagggaagaactgttcttgactttcagtttttcgagcgggtttcaaggtaacaactttcttattatctagcttcataattgcagtaaggaatagctttttttgcttgcagctgagatgactttttcaagggagaaaaagggatttctataacgaagagagggagagagagatgaagagggagggagtaagggagagagggaagaagggagaaagagagagagatttgaatatacattgcttcaaggatgcaaaaaattacaacctggaaaaggcttcgagtaactttaggaaaatgagctgctggactcctcagtcaatctgtcctttctagtcaatgaaaaagacagggtttgaggttccttccgaaacggggccggctaatttagcccctcccacgagcccaagggtctgttatatctctgtttccttgaggacctctctcacggagacggaccacagcaagcagaggctgggggggggaaagacgaggaaagaggaggaaaacaaaagctgctacttatggaagatacaaagggtaagaccaaaattgatttgatctgaatccttaagaaaaaaaaaatagaaggaaaaataaaagcccagaccaaaaagcaagtacttgaaagctggaggcaaaaagccctgaatgaactttcccaccctcttccttctgagaggaggcagagaaagagctttgggaaactttttaggaagcagagtccagggttgcagtcaagggtggctctagagcaagctggaggggctcatgaatattcattatcaatttgtattcagagttggtttttttagaggcaaatgactttttcagtccccttgcagtttaagaggcagctgcctcatctgcagtccggactcatctagcctcgggtctgtacctcagggtgtttgcttgaagatgctgggctctgcgtgtagatttgttttgttctcgaatttcttgcatgctttcctgttgtgaaattagcaaaggcttctttgctgggaacaagacagagaagttaatgtggcacaaggctgtcacaacaggaccccagagtatgtctttcaaaatgct

SEQ ID NO: 4954 - DNA, 6000 bp, Homo sapiens
aaaaaaaaaaaaaaaagtacaaaaaacttagccaggcatggtggcacgtgcctgtagtcccagctactcaggaggctgaggcagaagaatcgcttgaacccgggaggcagaggttgcaatgagccgagattgtgccactgcactccagcctgggtgacagagactccatctcaaaaatatataataaaaataaaagcattttttttctctctttttaactttcacatatctcttttcaggcaccttcttaccattgtgcctattcttactttaacccatgattaaaataaatcatatacactgtataaatctgagattatcataggaatggagtttctggcatgagatgtttcctgtatcgcaaatggatctataatgaccttccccacctccagcctctgggtggccatgagttcaaagtggctgccaatatctgacctgttgttgttatcattcactcctccttgcctgctgctttcctcccttatcacctcaccctttgttctcctccagctctgtttcctgccaccctaatctttttgtttcttgaattacctcccccactgtcacatgctcatcttctctgccaaattaaccttctcccttgagcctttcttgggctgtctcttgctgccccagttgcaaagtcctgtcttctttctacccgttgaccctcttctttttttttcctcccttgtctctgtgtgcatctgattccattttaaatctggtaaccaaaggcctggctagtgcttacacacagcccagctgcaaaaccattaatggacattaataatcctcagtacctttattcctggcattctacccccctcctccccagttcacactgcagatcatcaggtgtcacagagagaggacataccttgaaatgccctagatgatgtcatttactttgcaggacttccttgccttgcttctgattaatgtcatgactggtctgtctgagggtactgttatctacaaagagccaaatattagctcttagtagctattctttatccatgcctgattagggtcagtattatttttggctgtggttcagaaagaagagtcctgccaagcgttggcaaactctctatctgtcgagtttccaaagctttacacgttagagaaattgctgtgaatccagaatttgtttgttttcctccctccagcaaagtgaaatgttcatcccaagagtcctcaaaatctcagaggttacagggtatttttcttcctcagagagcttctgttttatcagcacctcccccacaccagggtcaaagctcaaaaaagttggagcagcccctgggaactgcagtggctgaggacattccagcccctgggctggcctttcttctgatctttggctgcagggcccactcttttggaacctcccacccctagaggtggttccagtgtggtggggaaaggtgtgcttctttactcatttttttaagagtcatagccagagtgcttcattctgcaaggacgtgcacatgcacatgcacacagagccttgagggcagggccaagagtgaatttggaattttccaacctgatacccattcccaaaagtaggagcttctctctagtcattttatcctctgagaaactgtcagttctcctcccacaaggctcccagacagccacgggtgaccagggtctccaatcactccttaagatgcctttgactggctgggcgcagtgactcatgactgtaatcctagcactttgggtggtcaacgtgggagggttgcttgcaacatggcaagaccccgtctctacaaaaaaagtaaaataataaaagtaaagatgcctctgaggggatctgtttggttcatattaaaagagactgaattcatccattcaacaatagcgagtttctcccaggtgtgaggtaccctgctagctaactggtgtgcacaaatcaagaaaacctcaatgcaccgtcactccataacttctcgcttttgtttcaggtgagggcttccacaactaccaccactcctttccctatgactactctgccagtgagtaccgctggcacatcaacttcaccacattcttcattgattgcatggccgccctcggtctggcctatgaccggaagaaagtctccaaggccgccatcttggccaggattaaaagaaccggagatggaaactacaagagtggctgagtttggggtccctcaggttcctttttcaaaaaccagccaggcagaggttttaatgtctgtttattaactactgaataatgctaccaggatgctaaagatgatgatgttaacccattccagtacagtattcttttaaaattcaaaagtattgaaagccaacaactctgcctttatgatgctaagctgatattatttcttctcttatcctctctctcttctaggcccattgtcctccttttcactttattgctatcgccctcctttcccttattgcctcccaggcaagcagctggtcagtctttgctcagtgtccagcttccaaagcctagacaacctttctgtagcctaaaacgaatggtctttgctccagataactctctttccttgagctgttgtgagctttgaagtaggtggcttgagctagagataaaacagaatcttctgggtagtcccctgttgattatcttcagcccaggcttttgctagatggaatggaaaagcaacttcatttgacacaaagcttctaaagcaggtaaattgtcgggggagagagttagcatgtatgaatgtaaggatgagggaagcgaagcaagaggaacctctcgccatgatcagacatacagctgcctacctaatgaggacttcaagccccaccacatagcatgcttcctttctctcctggctcggggtaaaaagtggctgcggtgtttggcaatgctaattcaatgccgcaacatatagttgaggccgaggataaagaaaagacattttaagtttgtagtaaaagtggtctctgctggggaagggttttcttttctttttttctttaataacaaggagatttcttagttcatatatcaagaagtcttgaagttgggtgtttccagaattggtaaaaacagcagctcatagaattttgagtattccatgagctgctcattacagttctttcctctttctgctctgccatcttcaggatattggttcttcccctcatagtaataagatggctgtggcatttccaaacatccaaaaaaagggaaggatttaaggaggtgaagtcgggtcaaaaataaaatatatatacatatatacattgcttagaacgttaaactattagagtatttcccttccaaagagggatgtttggaaaaaactctgaaggagaggaggaattagttgggatgccaatttcctctccactgctggacatgagatggagaggctgagggacaggatctataggcagcttctaagagcgaacttcacataggaagggatctgagaacacgttgccaggggcttgagaaggttactgagtgagttattgggagtcttaataaaataaactagatattaggtccattcattaattagttccagtttctccttgaaatgagtaaaaactagaaggcttctctccacagtgttgtgccccttcactcatttttttttgaggagaagggggtctctgttaacatctagcctaaagtatacaactgcctggggggcagggttaggaatctcttcactaccctgattcttgattcctggctctaccctgtctgtcccttttctttgaccagatctttctcttccctgaacgttttcttctttccctggacaggcagcctcctttgtgtgtattcagaggcagtgatgacttgctgtccaggcagctccctcctgcacacagaatgctcagggtcactgaaccactgcttctcttttgaaagtagagctagctgccactttcacgtggcctccgcagtgtctccacctacacccctgtgctcccctgccacactgatggctcaagacaaggctggcaaaccctcccagaaacatctctggcccagaaagcctctctctccctccctctctcatgaggcacagccaagccaagcgctcatgttgagccagtgggccagccacagagcaaaagagggtttattttcagtcccctctctctgggtcagaaccagagggcatgctgaatgccccctgcttacttggtgagggtgccccgcctgagtcagtgctctcagctggcagtgcaatgcttgtagaagtaggaggaaacagttctcactgggaagaagcaagggcaagaacccaagtgcctcacctcgaaaggaggccctgttccctggagtcagggtgaactgcaaagctttggctgagacctgggatttgagataccacaaaccctgctgaacacagtgtctgttcagcaaactaaccagcattccctacagcctagggcagacaatagtatagaagtctggaaaaaaacaaaaacagaatttgagaaccttggaccactcctgtccctgtagctcagtcatcaaagcagaagtctggctttgctctattaagattggaaatgtacactaccaaacactcagtccactgttgagccccagtgctggaagggaggaaggcctttcttctgtgttaattgcgtagaggctacaggggttagcctggactaaaggcatccttgtcttttgagctattcacctcagtagaaaaggatctaagggaagatcactgtagtttagttctgttgacctgtgcacctaccccttggaaatgtctgctggtatttctaattccacaggtcatcagatgcctgcttgataatatataaacaataaaaacaactttcacttcttcctattgtaatcgtgtgccatggatctgatctgtaccatgaccctacataaggctggatggcacctcaggctgagggccccaatgtatgtgtggctgtgggtgtgggtgggagtgtgtctgctgagtaaggaacacgattttcaagattctaaagctcaattcaagtgacacattaatgataaactcagatctgatcaagagtccggatttctaacagtccttgctttggggggtgtgctgacaacttagctcaggtgccttacatcttttctaatcacagtgttgcatatgagcctgccctcactccctctgcagaatccctttgcacctgagaccctactgaagtggctggtagaaaaaggggcctgagtggaggattatcagtatcacgatttgcaggattcccttctgggcttcattctggaaacttttgttagggctgcttttcttaagtgcccacatttgatggagggtggaaataatttgaatgtatttgatttataagttttttttttttttttgggttaaaagatggttgtagcatttaaaatggaaaattttctccttggtttgctagtatcttgggtgtattctctgtaagtgtagctcaaataggtcatcatgaaaggttaaaaaagcgaggtggccatgttatgctggtggttaaggccagggcctctccaaccactgtgccactgacttgctgtgtgaccctgggcaagtcacttaactataaggtgcctcagttttccttctgttaaaatggggataataatactgacctacctcaaagggcagttttgaggcatgactaatgctttttagaaagcattttgggatccttcagcacaggaattctcaagacctgagtattttttataataggaatgtccaccatgaacttgatacgtccgtgtgtcccagatgctgtcattagtctatatggttctccaagaaactgaatgaatccattggagaagcggtggataactagccagacaaaatttgagaatacataaacaacgcattgccacggaaacatacagaggatgccttttctgtgattgggtgggattttttccctttttatgtgggatatagtagttacttgtgacaagaataattttggaataatttct

SEQ ID NO: 4955 - DNA, 6000 bp, Homo sapiens
gaggctgctattcaccctgcaatacccaggacagtcacctccaaccaagaattatctggcctcaaatgtcaatagtgccaagattgagaaactgttctagaaataggcaggtacaaggtgtgttttcaaacatcccttgagccatttgtaacagcccttcaaaatcaagctttgaagccaattcttttgtgaccaggagtgttttccggacaatgcagaaggagatgcacccagatagtaattccctgaacataaccatgacaaattcagaactgagttctccttcaagtgcagaggcagcagtcagctccctgactctgcaggatgtgggctgggatgaaaggccccttctcagtgcagagcgtctggaatcaaggctgacatagcttatcaccttgttcttgtcctcccttcctggaatcaagtggtttagcaccattataggaggaacctgttttcctagcttgtagattgggccttatttctttctttaatcttgcctcaagcctcttttctttttcttgggctgacagggctttgcagctcattctggagatgatgttgacttggtgaaaaaaaatgtgcttgctattccacaaagccgccattgtcatcctggcccgttctcaatgagctgttgggcacacctcccagacggggtggtggccgggcagaggggctcctcacttcccagtaggggcggccgggcagaggcgcccctcacctcccggatggggcggctggccgggcaggggggctgacccccccccacctccctcctggacggggcggctgcaatggcggctttgtggaatagaaaggcgggaaaggtggggaaaagattgagaaatcggatggttgccgtgtctgtgtagaaagaagtagacatgggagacttttcattttgttctgcactaagaaaaattcctctgccttgggatcctgttgatctgtgaccttacccccaaccctgtgctctctgaaacatgtgctgtgtccactcagggttaaatggattaagggcggtgcaagatgtgctttgttaaacagatgcttgaaggcagcatgctcgttaagagtcatcaccaatccctaatctcaagtaatcagggacacaaacactgcggaaggccgcagggtcctctgcctaggaaaaccagagacctttgttcacttgtttatctgctgaccttccctccactattgtccaatgaccctgccaaatccccctctgtgagaaacacccaagaattatcaataaaaaaataaattaaaaaaaaaaatgtgcttgctgtcaagcacaagagtgtttctgggatagggattctttaagtcttggtgatttctctgtttccataaagcagagcagtggtgcttgttagtcaccagaactcacacctgcagtcttctccattcaatcccattccatctcagggagggcagtggggattgttctagttctcgggtgttctgattttctaagttagtgaacgtgaagttccttgggggcatggatccctttgagaatctggtgaaagtggtcaatcttcttacagaaaaatgcatactgatgcatgcacacgattttacataagagaggtagcgcatggacctgtggtgttagtaatctcagagtttgacatgatgagtttacaggacacttcttggaggctgtaattgcttttgtgaatctatactgaatatcaacattagggtgcatgaggggaggatcctctttagtccctgatctctgagcactgctattcttggagattcacaacacaatgaattactactttcttgtgttttggctcattcattcattcatttatttagcgcttatttagtttctatatgtcaagttctgttttaaccactggggagtcaaaggtagacagtcttccttgatcttgatgataaactatataggaattggaagccaaaaaaaaaaaaaaagtgtagtggctcttgcctgtaatcctagcactttgggaggccaaggaaggcagatcacctgaggtcagaagttcgagaccaacctggctgacaaaaccctgtttctactaaaaatacaaaaaattagccaggtgtggtggcacgtgcctgtaatcccagctactcgggatgctgaggcaggagaatcgcttggacccgggaggtggaggttgcagtgagccaagatggcaccactgcactccagcttgggctacaagtatgaaactccatctaaaataataataataataataataataatagtgatgatgatgataaaagaaaggaagaaagaaaagaaaaaaaaaagaaaattaaatcctgaaggcagaagctgagaggaatggcttcaggttcaggtgcagagcatgtgctgggtgagaacaagccattcgagaccaggtccttgcctctgtgggtactggctcccttggtctgtgacccacctcctggaattgaagaattgtgcaggatcaggcagagttttctttggtgcctggcacttggttctggactgaagcttggcttaagaagtattttaagaacactgtaggaaaccattcagaaccttccaccaccccaaggcagcactgcccactcctgcttttcagtgccctctgcagaatgctatggaaattccacctgcccatcctgccccaccaaaagcatcagatggctaagctagacttgtagctaggctcaaagtactcaccagtgcaaaccaacagagcagcacagtcatggacagtcaccaagaatgatggccactttggtgacatcccatagatgttatatgcaaggagcaggagcacacagagtcctcaccttgggattttaggatttgactcatcagttgtgatctgtttcgccaaaggaggaggatgtgaggcagctgggggtgggattggggaggataatcatattcttggctcatggctatacctggtagggggtaaggttgacttttctgatcccagtattcttattgatgggtgctcactgatgctggagtctctgttgagggcataataataattttgcagaatgatgaagacctttgcaatgaatcatgttaatgccacagttacttctgttaggtctgcattgttgagctccataaggaatcataatgaatccactgaaacaactagatatctcctttatagttaggactcacattttaggcaacctggggagagcatgagctggtctgttagtttgtgctggggagtactttgaacttagctgcaagtccagcctaaccatctgatgctcttggtggagcagggtgggcaagtgggattttttttccagaaagaatttttgcctgtacaacatcatgatgttctcccatgaaaagggacaatgatgtccatagcagttggattcaaaagaagaaatcacttttccataattggtacctttttcattccctcttaaaaaatacccagcccgctaccctggccccgaatccccagtgaacttcagtgcagggaaacagaaatgcagagaaattacaattgtaaccaggtaatgagagtcagctacaagcagacggctctctgcctgtgaaaacagggcttacaattgcagatttttatgactccattttctgctttcaacatagcctgtcgacatctcaaattgagaagcccatcaatgtggcctgggcagcctccttccagctcctgtgtcaggagagatttattattcttatagactctacttggagccacttcttccagattggcctagagagggaggcttttatttaatttaattttgctgagaactacaactctgcagagatgcatgttctctctcctgaggtaggtttctgagtctaggtgaggaaggtggagtaattgaatcaggcaatggttgagttgaaagaaaactaaaacggagccaaaaggccatttattgttgcattgtgggttctgaggagtagaaagataactgtaatgtctgtcagtgggaaactggttaaatcagttatggtgcatttatagaatggaatactatgcagctgtgaagaggaatgcaaaagatttatttcccctgatcaggactgatctccatcagtccttaatgtaaaagaaggaaaaaaaatacggtgcagtatatatagtatgaatccacttgcataaaagtgatgtgtaaatacatactttgcatctacaaggatgatctctgggagagttcataagaaacctgtaatcctgtttgccactaaggaagctgttgttgagggaaaggggagccagaaaagcttttcatagaaaaccctttagtgcttctggatttgtgttttgttttctattatgtgtttgtattactttctcaaatcacttaatgttaaaaatgaatttcagatctaatagtggctagcaaggcttgcttttggaaagatgagcaaattgtggtttgaatgtgagtaactgaagctacccagaaatgaaaagtgtctccaggaactctcattattatgtgggatttatcactgctaatgataagtaagaactagaacctgtcggctgaggtacagttttaccttcatttatggggatgaattgagtacattatgggccacataaattgcatttacaccacaccgatttgttatgtgccatctgttagaagctggaacttccctcctaatgacatctttgtcttcccccacctgggctcctagcttcctcttccagtggctggttattcttcagcagggtgaggggggcaggagtcaaagagataatctctgtgtgtggaatggccaagtgggagcaagtgagaagtggtgaggcctttgatgactagtgtggtgtgtcccttttgaaaacagtcaaattcagcttaaaaaaatacctgcagttcataccttgttcaaggtccaggcttctaaatgcctttcttgaacatttccaagaggtcctgtcctccttctgtaatgcccagccttgggcatctgataggtgccttgtgagtcagaaagcactctcctgggcattggtgctgggagtctatgggaggaaaattgaccggatagccagaggcagctcagctatttgcgtctgagtgcatttagcctcaaggtccttaaaaggcatcttgtctcctgttttggacatcagattcctggagggcagggatttattcatctctccactcagggcagaggttaacacatctctccctgggcttttcttggaaaacccaagtcaggcagggtgttactgggttctaacattacaactgggagaccctcttctcaggatgtagttctctgacaggaaatgtaaaaactacaattgctaagaaaagtaaatgaatggatgaattcaaaaataaatgaatggatgcaatggatgcacaatgtttagtcagaaaaaaaacttgatatgcattcagtgaaaaattgttgttctttgaaagtgtagctgtatgtggggatgggctctgtctgtcctacttccaaaccctctgccaccacccaccctcacataaagaacctctggctgtgtgatcctgggggcactgtttcccctgcctggtttttctggctggctgggatgttggctgtcccagtgtgcaactttgttggataattcaggactttctcttcctcagcctgtcttttcttaatggtgtggaatgactcaggattctgtgccaatgcctccataactcttctcagtaactaacctatacaggggtgtcttccccaggacaaaagcaggagagcctgtccaggatctataactgtttctttccccgtgcagaagcaccaaggtgcagaccatatctaaaagccaccacagtactaaataacatgatgcagcagaccctggttcctataaattactgaaaacagtgctgaaaagataatgtaaggtgcataaattcaagtatttagccagaagcgcattaacttagggcagacaaaaagaaaggaagaacattaacaaaccacttcctggtaagagttttcagtagatggagaag

SEQ ID NO: 4956 - DNA, 6000 bp, Homo sapiens
aggagttcaagactagcctggccaacatggtgaaaccccatctctactaaaatacaaaaatcaaccaggtgtggtggcacacatctgtagtcctggctactccggagattgaggcaagagaatgtcttgaaccccaggaggcagaggttgcagtgagccaagacagacctgctgcactccagcctgggcaacagagtgagactccgtctcaaaaaaaaaaaaaaaaaaagttaatgcacatgagaatctgacctaagaagacttctatgttaatatgctagtctctcctccacacaagagtcaacaggaagtggtattagcttctgattttggtattggtcacctgaccaaatacagtaagtgagaggtgacagcgtgctggcagccctcacagcccttgcttgctcttggcgcctcctctgccttggctcccactttggcggcacttgaggagcccttcagcccgtgctgcactgtgggagcccctgcctgggctggctgaggctggagccggctccctcagcttgcggggaggtgtggagggagaggcgcgggcaggaaccggggctgtacgcggggcttgtgggccagcgagagttccgggtgggcgtgggctcggcaggccccgcactcagaccagcaggcctgccccgctggcccccggcagtgagaggcttagcacctgggccagcagctgctgtgcttgacttctcgctgggccttagctgctgcctccctgtggggcagggttcgggacctgcagcctgccatgcttgagccttcccccacccaaccccaccagccatgggctcctgcacagccagagcctccccgacgagcaccgccccctgctccacgttgccccttcccatcgaccttccaagtgagaggtgacagcatgctggcagccctcacagccctcgctcgctctgggcacctcctctgcctgggctcccactttggcagcacttgaggggcccttcagcccactgctgcactgtgggaaccccttcctgggctggctgaggcctgagcccgctccctcagcttgtggggaggtgtggagggagaggcgtgggcggaaccggggctgcgcatggtgcttgcgggccagcccgagttccgggtgggtgtgggctccgcgggccctgcactcagagcggccggctggccctgccggccccaggcaatgaggggcttagcaccccggccagcggctgcagagggtgtgctgggtcccccagcagtgccggcccaccagtgccggcccaccagtgctgtgctggattttttgccaggccttagctgcctcccggcggggcagggctcaggacctgcagcccgccatgcctgaacctcccccaccctccgtgggctcctgtgtggccggagcctccccgacaagcaccggcccctgctccactgcgcccagtcccatcaaccaccccaagggctgaggagtgccggctcatggcgcgggactggcaggcagcttcacctgtgacccagtgctggatccactgggtgaagccagctgggctcctgactgctggggacttggagaacctttatgtctagctaagggattgtaaatacaccaatcggcacggtgtatctagctcaaggtttgtaaacacgccaatcagcaccctgtgtctagctcagggtttgtgaatgcaccaatggacactctgtatctagctactctagtgggtacttggagaacctttgtgtccacactctgtatctagctaatctagtggggacgtggagaacctttgtgtctagctcagggattgtaaacacaccaatcagcaccctgttaaaacagaccactcagctctctgtaaaatggaccaatcagcaggatgtgggtggggccagataaggaaataaaagcaggctgccccagccagcagtggcaacctgctggggttcccttccatgctgtggaagctttgttctttcgctctttgcaataaatcttgctactgctcactctttgggtctacactgcctttatgagctgtaacactcaccacgaaggtctgcagcttcactcctgaagccaacaagaccacgaacccaccgggaggaacaaacaactccagacgccccaccttaagggctgtaacactcaccgcgaaggtccacagcttcactcctgagccagtgagatcacgaacccaccagaaggaagaaactccaaacacatccgaacatcagaaggaacaaactccggacacgctgcctttaagaactgtaacactcaccgccagggtgtgcagcttcattcttgaagtcagtgagaccaagaacccaccaattccagacacacaaaggctgaggagtgtgggcacacggtgtgggactggcagccagctccacctgtggccacggtgcgggatcgactgggtgaagccagctggcctcctgagtctggtggggacttggagaacctttatgtctagctaagggattataaatacaccaatcggcactcagtatttggctcaaggtttggaaacacaccaatcagcaccctgtgtctagctcagggtttgtgaatgcaccaatggacactctgtatctagctactctggtggggacttggagaacctttatgtctagctaagggattgtaaatacaccaatgggcactctgtatctagctcaaggtttgtaaacacaccaatcagccccccgtgtctagctcagggtttgtgaatgcaccaattgacactctgtatctagctactctggtagggacttgggtaacctttatgtctagctaagggattgtaaatacaccaattggcactctgtgtctagctcaaggtttgtaaaccattcagcaccctggtctagctcagggtttgtgaatgcaccaatcgacactctggatctagctaatctagtggggacatggaaaacttttgtgtcaacactctgtatctagctaatctagtggggacatggcgaacttttgtgtctagctcagggattgtaaacacaccaatcagcaccctgtcaaaacggaccaatcagctctctgtaaaacagaccaatcggctctctgtaaaatggaccaatcagtaggatgtgggtggggccagataaaagaataaaagcaggctgtccgagcccggagtggcaaccacctggggttcttttcacactgtggaaggtttgttctttagctctttgcaataaatcttgctactgctcactctttgggtctacgctgcttttatgagctgtaatgctcactgcaaaggtctgtagctttactcctgagccagcaagaccacaaacccaccagaaggaagaaactctgaacacatctgaacatcagaaggaacaaactctagacacaccgcctttaagaactgtaacactcactgcgagggtccgcggcttcattctggtagctaaacatacacagatcaatggggcagcataggggccaaggcactgcaggggttctcatgactctgagtcaggtgctgtcttgaccgactggttgtgtgattccagaagccttctttcacctgaaaaggcctcactggcctcacctatacagtaagtttgcacatcatctccagggtttctttcatttctacccactgtttttgtttagtaatgatgccttgcagtcctaatgatcttggaatcaagaatggtgactagagaacttcaaagtggaaagagaggctgggcatggtggctcatgcctataatcccagcacttcgggaggccgaggcaggcagatcacttgaagtcaggagttcgagaccagcctggccaacatggtgaaaccctgtctctgctaaaaatacaaaaaaaaaaaaaaaaattagccaggcattgtggtgcatgcctgtaatcccagccactccagaggctgaggcaggagaattgcttgaactcaggaagtggaggttgcggtgagactccgtctcaaaaaaaaaaaaaaaaaaaaaaaaggagagagtaggatggctgagccatgacgcagtagcaatgcttctttttttttttttttttttgagacagagtctcgctgtgtcgcccaggctggagtgcagtggcgcgatcttggctcactgcaagctccacctcccgggttcacaccattctcctgcctcagcctcccaagtagctgggactacaggggcccaccaccacgcccggctaattttttgtgtattcagtagagacggggtttcaccgtgttagccaggaagcaatgcttcctattctagcgccttgctaaactatgtgtgctgcagactgtgttcgtgattccgaatcctaaaaacaaccgtcctaggcttgtctctcagcctagactctagactgatttggctcatttggttgtcttggagacgttctaattctgaagggggcagtggtcccttctagaagatagctggtctgcaaatgcacacctctgcttagtctgaatcctaaagttatagcttgagccaattaaagtggcttctcatttttctctcactctgatctcaaggagccctttttcttctagtaatctagaccttcctcttcctatcacagtctcaaggattgtgcccccaaagcagatgcaaagccctgtctaccccttctccttcccctgaggtagagctttatcgaaggtttctcttggtaaacgttagctttctgaactaagggccgtcttttttttttttcccgcttaagcccattgcataacaatctcttgttttaatcttttgcccaacactgcttttcttactgtcagaggttactacaagtgtttgaacaggtaacttctacctttgaacttctgttgtgacagattcaaaggttccaggggagtgtgttggccactctcaggacagtacacagtagcttcgggtgtgtcccagtcagtcctaggagctgtggaaagagtagaagtgcctgaatgtggtgctgaatcaatacagccagctgtgaggggagcacttcctggacccaggaagggagagtcttcttccaaggtaagctgcaatgatactacctgcactatattgaatatatctgtgagatagtagggaggggattggtgtggggaaagaaagtgggatttgttatgctcaacctaaggctctttaataacatgaaattacatttagttgaatagtaatctcagctgacttgtgtgggaggcaaagaaaaaaatcagttggaaaaggggtggagatatatgagctatccaaatgctagcaggggatggaattggaagggaacactgattttggtaagtgtactaaagcacaccaagccagaatgtgggtctccttcatcttccattaagaaatttctgtctcagtgtagttagaaggatcgtgcgtcagctgctgagggcagagagtcccatttggcagacagagaggaagggaatcagcagatattcgattaggtgctggggactgttctgggtagattatgtatgttacttcattggtgtatctcatcctataaagcaggtggtatccttcccatttcacagaggcatagtgcgtctccaggctgttaaacagcatggcctaagctacatagctccaaggtggtgtggctagaatttgagacttgattggtcagtttccacagcctgcccaataatgcagaattgttgtgggttgccaaagctttcagttaccccctgaaatcctgagggtgtcactcatgtgcacagaggattgataggaatacaactctgatgggcctttagaatgactcaaccttcctgaacttgagcatttttactggaggaggtcaataaaaaaaaaagaaataaaacctcatcttcccctggccctgagccctttggtgaaggaagacagcacccggtgaagggctcagaggtattagtgtggctgagattcgacacccactctgccatcctctgctctcctctagaggaagttgcctcttggggagctgagttcctgaaactaagcaaatgacaagtg

SEQ ID NO: 4957 - DNA, 6000 bp, Homo sapiens
ctgtaatatctgcagtggtgattatttgaaaagtttgaataatattcatgtccaactaatggctatgttaatcaaggatgataactaattctttgctgtgtaaagaacataagcagtagagaatgttttctcttttattaggttggtgcaaaagtaattgcggtttttgcagttttttttttttttttgttgttgttgttgttgtttgttttgttttgttttgttttttttaaatggcaaaaaacacagctatttttgtaccaactaatattgttgcacctcatttatttctcctaagggccaggctgttttctcactggatatccttacgttgccttgttcaggtttattttatttatttattttgctcaaaattattattttttattattttaaaattttttttactttaagttcctggatacatgtgcagaatgcgtgcatttgttacatagttatacatgtgccttggtggtttgctgcacctgtcaacccatcacctaggttttaagctccacatgcattagctatttgtcctgatgctctccctcccctcacatgcccccgccaacaggccctagtgtgtgttgttcccctccctgtgtccatgtgttctcattgttcaactcccacttatgagtgagaacatacagtgtttggtttttctgttcctgtgttagtttgctgaggatgatggcttccagctccatccatatccctgcaaaggacatgatctccctttttatgactgcatagtattccatggtgtgtatgtaccacatttcctctttctttttttttctttaattttactttaagttctgggatacatgtgcagaatgtgcaggtttgttacatagatatacatgtgccttggtggtttgctgcacctgtcaacccgtcatctaggttttaagccccacatgcattaggtatttctcctaatgctctccctccccttgcccctcaatccccgataggccccagtgtgtgatgttcctctcgctgtgtctatgtgttctcatcgttcaactcccacttatgagtgagaacatgcagtgtttggttttctgttcctctgttagtctgctgagaatgatggcttccagtttcatccatgtccctgcaaaggacatgaactcattcttttttatggctgcgtatttttcatttctataacgatccatcagtaggactgcttatgacaaattcaaataaagtcattttaattgttaatttgtcttatttattctttgtttaaacatcatcagaacgctgcatagcatttatttgatttttaggacatgatctgcttatgagttctgtgtatgcagagctgtccgagggaaagctaaattgacggaaaagtgcttcttgctttctgttccaaaatgcctacctgtgctgtccatagcattatttcgctgaatgcaaggctattttccttttgtgtcctatcagtgatagatcgtagagttacatatataaaatatgaatttccacttttttgtttgttttttgatacagtcttactctgtcacccaggctagagtgcaatggcgcgatctcagctcactacaatctccgcctcctggtttcaggtgattcttatgcctcagcctcttgagtagctaggactacaggcacgtgccaccatgcccagctaaattttgtatttttagtagagacggggtttcaccatgttggccaggctgatgttgaactcctcacctcaagtgatccatccacctcagcctcccaaagtgctgggattacaggcatgagccaccacccccagccagtttccagtttttttttatgatctttcagtgaaagcataagaagtcattttctgttttctgtacattaaataattgtaggtcttgtgtataaaaattctcagtgaacccttagcaaacacattatcctgagtacatgcattttcttaatggagaagggttaaccttttttttctttttttttttttttttgagttggagtttcgctcttgttgcccaggctagagtggaatggcgctatcttagctcactgcaacctctgtctcccgggttcaagcaattctcctgcctcatcctcccaagtagctgggattacaggtgtatgccaccacgcccagctaatttttgtattttttagtagagacaagatttcaccatgttggtcaggccggtcttgaattcctgacctcagatgatctacctgcctctgcctcccaaagtgctgggattacaggcgtgagccaccgcgccaggccaggttaaccttttaagtatcacagcttctgattgtgatggaaatctctgaaaagtttgcattgtcttactgtttcaagtgcattgttgtgtggtgcagcccaggtgactgtttattgccaccttacgctgttcctatacagcatctccccagatacatttacgtggaataataatgtctttaaaagctttgggcttttgaggtgcagtgacacaggtatctgtttggactctttcaggctgttattcatctcttctcttctgttgcagtgtctgtagcttgccattctggcacttctagtagtctctgcttacactgctgaatcttctctctctctctttcccatctcctcttctctcgacatttcctttcaccctgccttgtgtgtctggtgtttccttttatggtcagcactaaccaatcgaaactctccatttaatcactacttattctagggattatgttaactattaatacttcacacgtatcatttcattgaatccccactacaatcgtatggggcaggtattgtatttccagtctacagagtaagaaactgaaaattacagagtaatctgtgaaggagctagatggaattcactctgggcctttgaagcctcagaacctgaactcttcacttatacttacagtgcatgtgctgcatctcctgctaaaatacgcacataggttagtaggaatcatgttggcagtaaaattaaaatgttggctgagccaagatttgtgctaagaatttcacacatgcttctgaaaaatcaaacatgttgtcttttcaaacacagaaagttttaatagctaattaatcagagaggtattaattttaagtaaggtttattatcctggattagtcaggttatagatgtcactaaatacttgacttatacatgttaagataatatttatggttgagtaacattgaaattgattataagtgttacttgggatactaactctgagggatatactacttatcagataaatgtgaatgatcatacaaagatactccatttttatatgaatttttcctcttcattgccattttgaaaataatttgtattttatattcagagatactgcccaagagaacactaaaatcctgctttgtgtttcagttaatgcaattttagtattataatcaaaagccattaagaaaatttcacagaaatacaaaaattagctgggcgtggtagcatacacctgtaggctcagccatttgggagcctgaggtgggaggatctcttgaacctgggaggcagaggttgcagtaagttgagattgtgtcactgcactccagcttgggtgacagtgagaccctgtctcaaaaaacacaaaacaaaacaaaacaaaactttcacgatgtattataaaaatgtctgaatttattagcagtaaactcaaaacattttagattttcatgtccaaataaggttaacttttagaaagttgtttttctaccttttattaagtgtgtttttaaaaaatcataatctaaagcacttgaaggttgtatatactgtgccggggactcatgacagcagatagcacaaagtgtgtgtgtttttaaaaccatgatgttttaacttgtgatgctttatgaatatctgttgaatatcttctctatgcttataaacagagaaagcctttgaagcttataatgcaatggaagatacttagaagtaaacaaaatagagaggtatatgtagattttcttaggtcattagtttgtgtctttgtctggtaggctgaaactactgtcatatgactctctccctggccagattttaatagtcatactaatactgatgtgaatcctgataattaaactatcttgtcattacatttgtagataaagttttggttagaaatgattttgtatgtgttaggtatggtaatacagtctcaaataaaaggtcatgttaagataaaaggtcatgcttactttttaattaatttgtgtaataaaatttaggtctttggaaaacttatttttcaaataaatgaacctttcaaataaaaaagagaattagtttaacctttatctcatttcctattataggggtattgaatggacaagtttgactagttttctttcttttgctacctcaacaccaaacaatatgggattagtgagaaatgaacttcaactggttgatcttccaacaggtttgtttttaaagatccaaataggtttgtcatattgaataaacatgttgccatttataaaacatgtttgaaagtacttctttcaccttggaatttttttttatatttcatgcttatatatttattcttttattctctaataattgccctagaaaggcctcatcattgtttacatggaaatgttgttggcacaaatacatggtaaaatggaggaccattagcctgaacagacagattcattaaaaaataggataccggttctacttttaagtgcattgttatatgtaaccaactttaaaagatcgatttaaaaataactctgtcaatggactttattagagtctgtgctggaaattttggcttttataggaaacacttagaaaatttataggttaaggattgtttttaaatgctcaaatttaaaacttgtaatagtctctggctgaatgaatagagaaacttaatttgggattttgaagattctacagtaggaaacgtcccaataaggtaactttttcagaattgaaagcctaaacccagtgaatttcaaaataaagaatttgaaaatataataaggaaagagtttcaaattattttctggtgtatgcagtagtttcaaagaggtttttttaaaaataaaattgtgatgagtttctttaaaatggtatagcaacacgaatcatatgtagatgatcttaaccaatgagagcatgtgtatgtatgtgtaaaatgaattaaatcaaataaatggttgtaaatcaagtaagttgtaaataaatgaagtacatggttgcttttttatgttctccatatgtattttcaagctctcaaagatccagttgttcttacttctcagggtatgttgctgaacttccaggaatcattcccgtctttagtccagtgttgctgctctagtctcattggaagtgacctgtccactgactctcatccccaagttcctaatttgccagcagaatggtactggccctgtgtctagtgatcccagggataaaatgctgttgtctagtatcattgacttaaaaaaaagaaaaaaaatccctgttttatttgttttggtcagctcaagttcaggactgttagataacttaaaatctgctttgcacagatgtatttttaaggaacaaacatctacagtaacagttacagatttccttaagtgggatatttgagttcatagatggtagacttttatagcctgggcttctaaggagggcagcagactagtgcagtcaggacaggacatgggctgtttggggtataataatagtgagtatagtgagattccacatgatggaatctcaacaaagagtaggaaggcgtttaggccttcagttgtccttgaattgagtatgttctctcttttgtttaatgtagataaaaatctaacacaagatactaaaacatacaaggtagaatttatactttttttattcacagaaaatcatgtaacttcctttgcgggtaactcattctttcacagcatacatgaacaccgtagttattccctagtttccagtttataaa

SEQ ID NO: 4958 - DNA, 6000 bp, Homo sapiens
ctgaggcacgagaatcgcttgaacccaggaggtggttacagtgagctgagatcgtgttactgcactccagcctgggtgacagagaccctgtctcaaaaaaaaaaaaaaaaaaaaaatcaaaaagggatgatttgtttttgttttattgaagttaaatatgcttattccagaaaacttggaaaatatagaaagatttcagaaaaatgtggcttataaaacattcagtcccacattgaggcaaccattcttatgattttgctccctttcttaaggtatatatttttataataggtggggtcatactaaatatagtgttatatcctatttgtttcatatattgttatttttttcccatgtcattaaaaattatctgaaaaccttttagaactgcaccatactccattgatgttccaccagtaaattgtgtctgtattactctgttgctgtattgtgtctgtgttactctgttcatgtgcatagtttttgtacatttactgtaataaaatgatgaaaaacatctttgtgcattactttgcctgatttctttagggtaagtttctagatcgagattaactatcagagcatgaccctttctattttgtcaaattgatttctagaattgtatttccattagtaatgaatgaagtatactctacctttggctacttgtatttttttttttttttagtctttgttaatattacttattcaaaaatattctgcattttaaactttttcatatttctagattctagaagtgtaagggattctagaatctagaaacaagaggcagtatctctgcaccccgattggggccttatttaattggattaatttcatagtaaggtttaaaattcacattgaaagccagacgtatctgtcaatacttattgtaggatttagggtactactagaaattatttccagaaaaatatgtaaaagaatgtcagaatttttaaaaattacacaactacataaatattcttgtagcagattcagacagtgtagcagtaggtagagtgaaataagaagggtttttcttggacttcctcctctccttgttttctgtctggaggtattcattattgacgcctgttgatgggtctgatcttgacattgaagtgctcaatttatgtctctgtgtagttaagacctagcaaaacctggctttaaaaaaatgatttctaaattttttggaaacagttgccttagagtgattttgttgatgacagtattttaagttatcaaaataaatacattggctgtatagaagtaggtgattttgagaaaaaattgtttgaatgagttcttttttcctttaggctgatagccctgaagagatgcacagttggattaaagcagtctctggcgccattgtagcacagcggggtcccggcagatctgcgtcttctgtaggtttcctgctctctggggtgatactcccttgcgtctcccccatcctatcaaatttcctctctcccaatccatccggtttctttctttcttgagatttatttgcatgttgacttttataccaattggacttgcaaaaaataatgcatttctaatttaatgcttccttgtagtattatgtatacataactttctgtgcattgtattgtgttaaatgcacaagtagggcaactaaagaataaacatttccttgctttgttttaggagttcttacttgtcagtagctctagatttggcataatctgacagattcttagtatggtgtgtgatcaggatcatgtaagacttttagttgtagcgttacacagttttgtgaacgtctcaatttcctctttacttcctctgatttcagttcaggttttttggttttgttttgttttttacctttggcttaaccatgccatcagatcactgagcagctggggccttaaatacagttcagtgctcccagtgtttccatttcatgttttaattctcattttaaaacctgctttaacagcctgcttctgaaaactaccataattatctttgtggtagtatgataataaaattgaaatacaactaaacattctgctcagaaatatttttttaaaagatttttcttgtgttcaagtacataagaattagatttgcatttggaatactttggccactgatctcaggtctgaaaatttaaagtatcttaaaatgtaacactgccatctgcggaaagtagtctcatatgtagcatgatagcctttattatctagatttactatgacatatatgctagttacttacacttttaatatttttttctgatagtattataataccgccttttattagttttctggtagtgataactacagataaataaatagaaatcaatgtttctgatttcttagttgttaagtcattctctctttatatcctttttgaaatatctaagaagtcactttcatagatgttcattttgtaactgcctgtattttatgtgactttttcagcagtcaagtatgagactctctgcaaaaacagtgtctgttgggaagaggaaaagttggagaaggatgtttgtgttttgtgctttgtggtgggggcagattggactatctagctatgactgtcagcacaactttctcttttcctccctctacccagtataggttaactctaatcttagctttgcactgtgttccagatgcggcaggccagaaggctgtcgaacccttgtatacagaggtatacatcaagagctggtgaatgcagcacgtatgtgggctctcacgcaaacgtgccttcttagtggagggcccagacttactacttacaactgatcatagaaagttgagttaaccaaactgccttttgcagttatcataactgattttgtcaatactaacgcaaactgtttcactgtagtcatcaggttggatatgtgtatttaaaaataaaaaataaaacatacaactttactaacagaaagagacattaacatataaaaattaatatactcaactgctgcaagagtttcaattttatattatgtatttaaaaatttttaagatacaatacttacgaaatgcaccattgttctaataatatatgcaaactaatgcatgcatatgcattggataaactgtacattactatagtttgcatggcatttaaaaatctctgaaatttagccatctaataggactctgtagtgttttggtaatttgtagcactttgatttcaaagccactggtatcataaatgaatataatatactagtatatagcaatgtatttagaatggtcatatttaaggatattttcagatttgatctagttagaagcatattgaaattaacattctcaactactaattatttcaccacagtttaaaatgtgataaatgtgtaccctttgttacctttaaaatattaagccatatgaatatatgacctattcagaactaaaattaagtaaaaaatgaaaagactgtgctattattggttgcagtgaaattcagggaagtaaaaactaagtcttatcagcagaataatgtttgaaagatgattcgtgcttattaaagaaatatggcctttcattgttatagtctatattttaatttttttcattctaaaatatgtgggataattcctagtgttgactgagaatatactcttaaataaaatgatacagctgggaggttctcttttaaacacagttcagttgcagctggaacactgtatttcagtttaggttggctgaatcttcaaagtgtcataggctgccaaattcagctttggtgacggaactggtttcctagtggaaatggtttttggctatcattgctttaaactcacctctaaaaacgcgttgctttgggaaagaacttgcacatttatgctgcatggcttctgctgctgcctttgtgtgtgtgtgtgtgtgtgtgtgtgtgtgtgtgtgttttatttgtttttcagagaatcaagtctcacactgagttactaacctggtcatgagtgactgaccgtgtctgactgccactcctttttgcaggagcatccccccggtccttcagaatccaaacacgctttccgtcctaccaacgcagccaccgccacctcacattccacagcctctcgcagcaactctttggtctcaacctttaccatggagaagcgaggattttacgagtctcttgccaaggtcaagccagggaacttcaaggtccagactgtctctccaagagaaccagcttccaaagtgactgaacaagctctgttaagacctcaaagtaaaaatggccctcaggaaaaagattgtgacctagtagacttggacgatgcgagccttccggtcagtgacgtgtgaggcagaagcgcacggagcctgcctgcctctgccgtcctcagtttcctttcatgaggcttctagccaaagatgataaagggggaaatggtttttagtgcgtatattatactgcctcttaggtgtactctttataagctggtaaaccaagaatctagggagtggccaaactaaatataatttctttaaaaaagaaagaaaaaggaaaaatccaaaatatctcagtatcatctgtctgaagcattgtgtgttctcattcgggtggtaacaatgtatgtgtaatatttttttcttagtgattttgacagtttaaatgtttaacaacttaaagcattaaaaatgcttattaataactttggtcatttaaaaaatgctacaatgacttcctattaaaggttcaatatttacacattcttattggttgatattaccacatgaaatattgccagaccaagatacctaaactcatgatgtctgtggtgctgtaaaatttatactaaaatgtggactattttgaaattataaccatttttgatgccctgaatcttgaggtgacttattttgcatagaggatatggatagaccaacagtaagggttgtgggttataccggcatagagaaaagaagaaaactagaattgaaacaactgtgtcttagacatttgtttgaaaaagcttcatcaggccttggagcagtcactgctttattccgcaaaaattatttggtaggaaatttttgggagatctgattttcttatccaagttttgtaaatagttgttatttctatatttggattggtgaaagacctcaagtttatatgtaaagacataactgcccttagtcatgaaattgttgtgacctctactttttgtcactaatagcctacattcaagtgcctgtgttttttcatcttgtttaggaatgttttgagattaatgtgcttaaaagtcctacgtgactgattttaaacattgtgataaaattaattttcagtagaatagttgaatgtgttaagataggattttatgttagagataccagaatgctggtattctactacttgtgcaatatatatgttttaaaaaacaaatttgagaatacatttaatcatagggatatagatataagcacctctctaaagaatctttagtttccgacgttgaattatagaccagtttgagtaagtactgctttttttttttggagacgggctctcgctctgttgctcaggctggagtgcagtggcgtgatctcagctcactacagcctccacctcgtgggttcaaacagttgtgctgcctcagcttcccgagtagctaggattacaggtgcatgccaccacacctggctaatttttgtattttagtagagatggggtttcaccatgttggccaggctcgtctcgaactcctgacttcaggtgatccacccatctcagcctcccaaagtgctgggattacaggcgtgagccaccatgcccggcccataagtaccgtttttgaggttcagtcttaaacatttgctttaagaaaacagtcttgaatttcacatgctgctatttttatattttgccattttacagtactgttttgttttgaattcatgcatatcattgaaaatttctcgttttcattttcttagatgacttcttgtctgagacagaaaaatttcctactacagcagt

SEQ ID NO: 4959 - DNA, 6000 bp, Homo sapiens
tcctctcttctttgctctctgggatccagccacctggcctccattccgttccctgaatgtgctgagatgctccccatctggctgttgccttcatctggaatgcccctccccagatggcggcctgctccacaccctcacttcactggggtctctgctcgaatgccttttaatccataaggtctaagtaccttatattacagaccccaccctggcctgacccttctctgccatgttgttttgcagcacttcacacctgctgccatacatcattttgatttgttcatcagtttattgtctgcttcccccactagaatgtgagctccttgaggtcaagccacagtttcattcactgctggggattcactgaatccccagtgcctgtacataatagagataaataattgttgaatgaatggatagtagaggtactatcattatcccttttataacaagccacttttgttttcagtttaatcgtctcctgttgggtagtgaatttcaaaaatatgaaatatctttgtatcttatgaccactttgtattgccgtaaaatgatcttattcaaccttcagattttatttccaagttctaatatctgaaggactgaactgttttctttcagatcttgaaaataagaaaccaagtgtgttttcttttatttgagagccaggaaattttggactaaggttgtttattataaagaaacttttttcctattattgattgaattatataaacaaagatgaagtagaaaaaatactaaccactcccactataccacattttgattcattttctcatctcttcttggcaaagcatactttatgtacttgtaatcatgtgatataaatccacttgaattctgattttaatctatttttctggttataaatataatggatgcttattgagcaatatttggagagttcagaaaataaaaaatataaagatatttttaattctactcatgtattactaaaattttgatgtatgtgctaacagttgttttttacctttgaaattattttcatagtttaaatcatactgaatataatgattatcaggaattttacaagcagagtattcacatgtcctttaggaaagagaatatgaacagtcatagttttagatctcaaataaaagttacagtcacaaccacaaattccaaagcagatcttacttgtcatctccctatcccttaattatcaacttataactcttgcagctactgctggtgggttttatgtcattatttctaaataatattcctattctactactccttgctttttttggacattatctatccacatcctactctagaagatgagacttacccctttgccaccacaaacacacatggggtatgcaatgtttatatactttcccaatcgtctcccaaaatacgtatgtcacgcttttgcttaaattgctgttcagttgacattaccatgattatgtaaacaccattcacaactgagccaagtagtgtagtatggcaacatttgcttttgttttcctaaggaataataataattgggtcctctttacattttcttgggttttatgcattgatcaccaattcgtccacaccctctccaccccagatgtgcatctctaccttctgtagtaaaacatatcagttccatttcttttcctcagtaatatccttccttgagcctttgtacgtcagctgcaagcctgatgctagctgtcatttcagaatttccctttgccatcaaatgtgcaagttccttcattcttctcctgggctagagagctgactttgtgatgctatgcacgtccctttcttggttaatttcctcttttggtgaggcataccctcttgcggctccccaaggaaatgggcaagggcaataaatcttttgaaaaatggtatacctgaaattatctttattttaccataaatctttgaaaagtatatatttaaatattttatatgtttgatatattaatatatatgaatatattaataataattttgaagttttgtgttgctcatttggggtcagttttcttcatgttcctatctcctgtttactaatattggtctctgccttttacattagtcacttccctaaatgtctgctgatccttggctattcattcgtatttaagaatgaattactgaaaggatgactggtatctctgtatgcatgagggggccctgactctttagcaaaacctgcaaacctacaaatgtcatatccacaggtcttttctcttggggaggttaaaactccagcgacgaatcactttcagaattaatttttcttctgagtctttagttctaatgtccacattcctttttttgaaatgtatttttatatgttcaatgtttattttggttcctctttaccctgctccaaacaagggcatgtgggttggcctttgcccctactctatttgattgagaacttgccgaaaagaggaagaagaaagatgaaagaggaagaagaagaaagagaaggagaaggaggaggagaagagggagaagaagaagagggagaagagagggagaaggagaagagggagaaggggaaggagaaaaaaagaagaacaataagaaggagaaggagagaagaagaaaagaagtagaagaaggagaaagagaaggaggaggagaatgagaaggagagggagaaagagaaaagaagaagtaaaagatgaaagaaaaaaaagaaaagagtgaagaagaaagaagatctgctggtgcagaggaggcagctttaactttcattgcactgcttcctagctaataccttatccagctggaatgagcctaaaatttctctaaacccacctgcctatctgactctctgtacagacagagaaaataaaaagctatgccacccagtgtgtcctacaataagacctgtgtctgatgttgtccctgctcatagcagatcctaaatctcacgtgcctgcttcctatccatttgtactctgagagttgtagtttctaagtacaaaagggattagaggacaatgatgggaattgcattctggttgcttctaacagcagaagtccatgtgataaatggatgactataacatgttcagtcattgtgattctatgccaaaggcagactcagaggcaggataacagccattgatcacagtttccgacatgtcccattaaccttatggttggttctaatcccttttgattccatcaatgtggtgcccattcctgttttcagcattatagaaatatttttcctcatctgtttctttatgcattacttaatggtttggaatcagagggatggtttgaatcccagttctattattacatcatctttctggattctggtatcttaatctggaaaacagggatactgttatctgcctgggagggtgttttgttgattagataagacaggctgagtggatgataagcaaagactggcatttttgtctgctcagtaaatgatagcaaactcttcttctggtccagtgagccagaagacactttacaccagaagcccccagagagctaaatttgattaattatagtaaatttaaagagatgacatcttggccgggcgcggtggctcacgcctgtaatcccagcactttgggaggccgaggcgggtggatcatgaggtcaggagatcgagaccatcctggctaacaaggtgaaaccccgtctctactaaaaatacaaaaaaaaattagccgggcgcggtggcgggcacctgtagtcccagctactcgggaggctgaggcaggagaatggcgtgaacccgggaagcggagcttgcagtgagccgagattgcgccactgcagtccgcagtcccgcctgggcgacagagcgagactccgtctcaaaaaaaaaaaaaaaaaaaaagagatgacatcttttgttgtggagtgcattctccttctgcataactgttagtgccatagtctgagtcattatttctaatcttgagtcattcaaatccttttaaaaatgggaatatcaaccattcaatcaatgaattattgttcagttatttcatctagattttttttgaactgtgaaaaccagtcatgcaaattcatttgattttataaagcattggaagaatagtttgcgaattattgtaactatgtgaatgactacagctattatttaatattttagagtcaataataatccattattggaaattcaaataagtaagaaaattgaagctttgaatccataactaatgaggaaagaactattatgtttaattgcagatggagattgatttttcaaattacttttcaaagtatttaaaaatatctgcttgctgggtgctgtggctcacaccagtaatcccagcactttgggaggccaaagcaggtggatcacctgaagtcaggagttcaagaccagcctgaccaacatggtgaaaccccatctctactaaaaatacaaaattagctgggcgtggtggtgcatgcctataatctcagctgcttgggaggctgaggcaggagaactgcttgaacctgggaagtgaaggatacggtgagccaagatcacaccgctgcactccagcctgggcaacaagagcaaaactctgtctcaaaaaataaataaataaaaattaaagtaaataaagaaaaatatctgctttattatgtacatgaaatcatcagaaactgatatttaagcttcccttccaagtaacaaatgtcctgatgcattgttaagaaaaactgcccatcagtgagctctgcagaccacattgtaagcacaatggctcatctcctttacattgagagcacagtttccagttgcaaagtgtatagcagcttttaatctatcaccacatggcaggaaggcattactgcaatactttcattctagtgaaatcaccctgaagtcacaaaatgtgctcggggtaacagtggcttgtggcactgcgatagaaacctgcattgttaggtcattcattttggggcagggttcccataaaaggaagtgggtctgggctggaaatatcacctcctaggaaatatgcagtaagatggattgtgtgcctgaaggttaaactctttttccaacaggtattcaatggcattagaagtaactcaccccagctagagaaactgtgtagtagtgtgaatgtaagcaatgagattaaatcttcaggaaacacaatgaaagtcatttttttcacggatggatccaggccatatggcggcttcactgcttcctatacctccagtgaagatgcaggtaatgtaggatgttgtaaatgccccccattttaatcaggggcactgcagatgcccccatctactgccaatggcagcagagccatccattttccctttagtgatacttgaaatctttgacataagacaaacacacataagcagatgaaaaacgcactgcagacagaaaaaaagctttctgatttcagaaagaaactgccatagtgaatttaaaacttttaatgctattagattagcttctagcacagtttcaggtcatgttaccatgagggttggtgacctgttccgtagtccctggtcaattcttttgtgctgaaagaaaccatctacctcctagagggtaacttagtctcagagagtaattaattttgctggggacagaacaggctttattgtttctagtcatctatccacacacatatttccagtgaaaataaatgggaggtttgatttgatatagaatattccaaaattaagcaagatatggcctctaattataaatatcctcctatttcctgaattgggttcaaaattttaaagggttttaaattttagaagtgggagtgttttaaaatttagaagttttaaaatttagaagtgggagtgaatattaaaagaaaaacgctaagttatttcattggtacaagaagcatctgttcctttattaaaagggggcaaattaatggcaaattaatgtcctattatctgtttgatttaaaataatttattagatcaagtggagaattgctaatcaagccatta

SEQ ID NO: 4960 - DNA, 6000 bp, Homo sapiens
aacaaatttagtataaaaaaaggaacaatttaacaattctgattaagaaacaacaggaaaatacagacagtattagaagtatgagtgggaattgccatggatatgtgaaggttttaaaattgcaaggtagtatgtgtaactttatgtcaaaaataaaaatatgttgaaatggacaattgtctaagcaattaattaacaaagttaacccaagaagagataggataataaccatgaagtttaaaagacagtattttaaaaatattgtccctttgccccagaggcactaggttcagataatttttatggctgcattcttctagaatcttgagtttctttttaatttaaaaccttattaaaaagaaaaagatagagttccctatttattccatgagattgctgttagtaaaactttttagtattagcataaggccaggcactgtggatcacacctgtaatcccaacactttgggatgatcgcttgaagccaggagttcaaaacaagcccagacatcatctcaacaacagcaacaaaaattagcccgtcgtggtatcatgcccctgtagttctggatacttgggaggctgaggtgaaaggtttgcttgagcccaaagttcaaggttacagtgagctatgatcatgccaccgtacttcagcttgagtgacagcaagatcctatctaaaaaatatatatatgtatatatgtatgtatctgtgtctgaatgtatatacacacgcaagcacgacagaggaacaaaatagatgtgtttcacttaacagaaatcctaaataaaatctgaagaaagcaaatctagaaatgtgctaaaaatattatatcatgattaaggaatacaaaagtgatttaagattattagtaagtcaatttatcatattgattagaaaagaaaaatatcattatttcaatgtatgataaaaagacatgatatattttaattgctgtgcttcctgaaaactcttagaaagttagaaatggaaggaaacttaaaatttattaaacatctattatgttcctgttaatttgagaaacatggagtatcctggtttttttttcagcattaatttggagattctgaacaatatgatttaaaagaaaacgaaatgagccatatgtaagtcaaaagaaggagtaaaattataatttgcaggtgataacgattgtttaccagaaaattcaagaaaatcatccaaaaggctgttgaaataaagagttcactgcattgtccataccagataaatgcataaaaatcaatagctttcttatattctagcggcaggttttatttacaatttctttaaaacccagtaaatgttttatcctgacaggaaatatacaacatagatatatacacacatacacacgtgtgtgtatgaagctttactgaaggaaatgaaagaggaactgagtgaaataaaataaggccataatcctatttggaagaactaggtattacaacagtatcaatttacacccaaatttgtaaagtcaatacaaccccaatcaaaactctaatgacccacttgggaaatcgagaagttgattttaaacttaatttggaataactgagtacatgttaaaagaatactaatgaaggggattttatcctacttaagtacatgaaaatacagatatttagccatggaaatcagtagtgtagtattacaaataactaaaattaaaaaatttaacctagtgctgacatacatcagtgcaacaaaattaagaattttgaatcaataagcaaatgatggattatcaaatgttatcagcctaagtggctgttttggaaaaatcaagttcttttcttacatcataccaaaaaaaaaagttccaaatatgttaaagggttgaaaacaaaaatataaaactgaaaatattagaagtaagtagactacctttaaaatcttagtttggcaatgaaactctaatcaagttaaaatgcagaaaacacagcaaaggtatggctgcactgagctaataaattactgtatatgatcgaaagacaaagacacattaaaataaatgtttacaatatatataactaaagattactatctgtaacatccatattatctaaataaaaatggaaaaatgtgcaaaggacatgcatggtcaatttactaaagaaataaaaataaaaatagtcaataaaaatacagaggaagcttttcaaaattttcccacacttgtaatctgggaaatgcaaagtaaaacaaggtactgttatttttgcccgtcagacttgcacaaatttaaaagattcatattatttagtgtcggcaaggatatgaagaaaaggaaactcataagcattggtgggcacataaattgataacagccttttttagaaagtagtctcttagtgtcaaacaaaatttaaaccttaacagtgtttctttcaggaattcagtctacatctgctgacatacatatataagaatgttcaccacagtattgtttccagcaataaaaaccagaaaacaaataatgttcagggaaatggttgaatgaattgcactgtgataaattggaaaagtgtaaacagccattaaactgaatgcactgttctgttctgaaaaatatgcacgaaaaatgaaaattgcaaaaaattaggtactatttctagagtagtttttatagaaagagcacctgtgtgcatgcatacaagggtagtcagaattgttaacaggttatacttctgggaagtgggattggggcttgagaaattagaagacactaatttgatacacttacccttttttcaaaaacattatgtaattaccaaaaacatgtaaaaatcagttgtgtagattcaatctattttaattacttggttgggtttttttttttttttgaaatcacagtttatcagagttgatactcagttttttaaattatattgtataaccctctgacttctctatttacctttatcccctatcaacataaaaaataggccaggcgcggtggctcacgcctataatcccagcactgtgggaggccaaggcaggtggatcacctgaggttaggaggctgaggcaggatagttgcttgaacccaggaggcggaggttgcagtgagcagcaatgccttgcactccagcctgggcaacaagagtgaaactccatctcaaataaataaataaataaataaataaataaataaataaataaataaagttccttttgaaaaaaggaggatagaaaaaactataagctgggcatgatagatttaagttctcagacctaatcccagctctttgggaggctgaggcaagaggactgcttgagcccaggagttcaaggccagcctgggcaataaaaggagaccccgtctctacaaaaaagaaggaaacaaaggaaaacgtattgaagtgtcaggcaaattagatagactaggatatacaggtagggtgtcagactttagaatcttaggcatttttcttttcctgtaacaatttatagtgacagtgaatggtattgttttatttagttttcatacagtctcggggttttaaaactttgaaatcaaggacacgacgtctccagtctacctccgagagattagctgaaacacagaatatagcgccatcattcgtgaaggtaattagacctttttatgatccaaaaagcaaatattttcaagttgttagagtgaggagcttcaatatctgatttcttttgttggctgatagatattcttccttctttccactaataataagggattagtaacctgtgtaatcattatacctctaactcttctgggcaccagacttgcctctccacttactagatttttttcccacaaacctacacctgtcgaggtgttctctgtattaatgagcagcatccacccaagctaaaaacctggctatcaacctacgtttgtccatgttgccttacctcccacatccattaaccactaaagtcctgttgatccaacctcctaaatatttcttacatctgttccactgccatagataggctataactatttgttgcctaaattactgtaatgaatacttgtttagtctccttgcctctagtcttgctgcgttcagtccagcctccagactgccacccatcaatctttctaaaataatgatctagttatattactctgctttattgcttacctccacctgatacactgggaatttcatcatttgatctctacctgccatgtttctcttctcaccattcaatatgcccctctgtttccctgctcctctcttggcattgaagtcttatataagattgcttacagttcttgagcactgaaggctattgattcatgcctccgtcagattgttcatagtgtttattccctgtgttttagatgtcctattctctgtaaggccttttccatattcctgaggtagcattgatttaccaccatacataatacttctaacataatatcaaaatgatttaagaaacttagttatttatatatctttttccagtagactgaaaactttaagatcagtggtttatttatctttacatcttcagaacttatataaggccaagtatatgaacggtgcttagtagacatttagtaaattaatgagattttttcctctagcaaagatagagggatatgaacattaagccaatcaaaccctaaaataatatgtgacctgttttcagtgtagtgttcgtgcagagaataatgccactttctttatattattaattgattgatgcaggaatgggatctagtgttagtttcctagttattgattaattcattgctgagtcttaatctgtttcttcacattgacagtaaaaattatacagaattttagtgaatttttttgagtggtcacaatattgttgggaagtatcactgtgttgttaaccagtactgatgtgttgtttgtgtattcaggggtttcttttgcgggacagaggatcagatgttgagagtttggacaaactcatgaaaaccaaaaatatacctgaagctcaccaagatgcatttaaaactggttttgcggaaggttttctgaaagctcaagcactcacacaaaaaaccaatggtaagttgaattgacaccatccgtgtttgagaagagtaactgaaaggaagtcatagtcctacatttaagttttaagtaacttttctaagaccatctattgattaaattccactatatttgtaacttaatctatgtagaaatggcgatactgctgatggtttccctttctcaagagagaaaacaaattggagaacaggaagtgtgaatggcttcataaaggtttttgtttctttattttttgtttgtgtttgtttttgagacacggtcttgcttcattgcctaagccagagtgcagtggtgcaatcatggctcattgtagccttaactttctgggctcaagtgatcctctcacctcagcctcctgagtagctaggatcacaggcatgtgccaccacgcccagctaatttttgtggagatggaatcttgccctgttgtccaggctggtcttgaactccagggatcaagtgatcctcctgccttgacctcttaaaatgctaggattacaggcatgagccaccatgcttggccttaagtttttgataatagggtacttacaggaaatcatagcagttgtgagaaagaatgccagattccaaaattggatgtgatgaaatatgattattaacaataacctaatatttgcatttcattgagctgtcatatttcataaatgtgatttcatgtaaagctttttctttctctcctagattccctaaggcgaacccgtctgattctcttcgttctgctgctattcggcatttatggacttctaaaaaacccatttttatctggtaaaagctttttttatttgtctaacttatttcttattcctttaaatacatgattccttttaatgcctaatctaacccttaaagaaagaacatattaatgtttacagtactagaattaggctttcattcctagtagtggttagt
